United States Patent Application Publication US 2025/0074962 A1 - sequence listing, part 4

SEQ ID NO: 3150 - DNA, 1699 bp, Homo sapiens
  source 1..1699: mol_type = genomic DNA
aaacccaggcgcggaccggctgcagtctcagaagggagctgctgtctgcggaggaaactgcatcgacggacggccgcccagctacgggaggacctggagtggcactgggcgcccgacggaccatccccgggacccgcctgcccctcggcgccccgccccgccgggccgctccccgtcgggttccccagccacagccttacctacgggctcctgactccgcaaggcttccagaagatgctcgaaccaccggccggggcctcggggcagcagtgagggaggcgtccagccccccactcagctcttctcctcctgtgccaggggctccccgggggatgagcatggtggttttccctcggagccccctggctcgggacgtctgagaagatgccggtcatgaggctgttcccttgcttcctgcagctcctggccgggctggcgctgcctgctgtgcccccccagcagtgggccttgtctgctgggaacggctcgtcagaggtggaagtggtacccttccaggaagtgtggggccgcagctactgccgggcgctggagaggctggtggacgtcgtgtccgagtaccccagcgaggtggagcacatgttcagcccatcctgtgtctccctgctgcgctgcaccggctgctgcggcgatgagaatctgcactgtgtgccggtggagacggccaatgtcaccatgcagctcctaaagatccgttctggggaccggccctcctacgtggagctgacgttctctcagcacgttcgctgcgaatgccggcctctgcgggagaagatgaagccggaaaggtgcggcgatgctgttccccggaggtaacccaccccttggaggagagagaccccgcacccggctcgtgtatttattaccgtcacactcttcagtgactcctgctggtacctgccctctatttattagccaactgtttccctgctgaatgcctcgctcccttcaagacgaggggcagggaaggacaggaccctcaggaattcagtgccttcaacaacgtgagagaaagagagaagccagccacagacccctgggagcttccgctttgaaagaagcaagacacgtggcctcgtgaggggcaagctaggccccagaggccctggaggtctccaggggcctgcagaaggaaagaagggggccctgctacctgttcttgggcctcaggctctgcacagacaagcagcccttgctttcggagctcctgtccaaagtagggatgcggatcctgctggggccgccacggcctggctggtgggaaggccggcagcgggcggaggggatccagccacttccccctcttcttctgaagatcagaacattcagctctggagaacagtggttgcctgggggcttttgccactccttgtcccccgtgatctcccctcacactttgccatttgcttgtactgggacattgttctttccggccaaggtgccaccaccctgccccccctaagagacacatacagagtgggccccgggctggagaaagagctgcctggatgagaaacagctcagccagtggggatgaggtcaccaggggaggagcctgtgcgtcccagctgaaggcagtggcaggggagcaggttccccaagggccctggcacccccacaagctgtccctgcagggccatctgactgccaagccagattctcttgaataaagtattctagt

SEQ ID NO: 3151 - DNA, 1927 bp, Homo sapiens
  source 1..1927: mol_type = genomic DNA
gtctggacctgccgagagcccctcgcacgcactgcgggctccggcgctgcgggctggccgggcgctgcgggctgaccgggcgctccgggaactcggctcgggaacctcgtctgcggtgggcggggccggcccggagccccgccccggctcagtccctgaaacccaggcgcggaccggctgcagtctcagaagggagctgctgtctgcggaggaaactgcatcgacggacggccgcccagctacgggaggacctggagtggcactgggcgcccgacggaccatccccgggacccgcctgcccctcggcgccccgccccgccgggccgctccccgtcgggttccccagccacagccttacctacgggctcctgactccgcaaggcttccagaagatgctcgaaccaccggccggggcctcggggcagcagtgagggaggcgtccagccccccactcagctcttctcctcctgtgccaggggctccccgggggatgagcatggtggttttccctcggagccccctggctcgggacgtctgagaagatgccggtcatgaggctgttcccttgcttcctgcagctcctggccgggctggcgctgcctgctgtgcccccccagcagtgggccttgtctgctgggaacggctcgtcagaggtggaagtggtacccttccaggaagtgtggggccgcagctactgccgggcgctggagaggctggtggacgtcgtgtccgagtaccccagcgaggtggagcacatgttcagcccatcctgtgtctccctgctgcgctgcaccggctgctgcggcgatgagaatctgcactgtgtgccggtggagacggccaatgtcaccatgcagctcctaaagatccgttctggggaccggccctcctacgtggagctgacgttctctcagcacgttcgctgcgaatgccggcctctgcgggagaagatgaagccggaaaggaggagacccaagggcagggggaagaggaggagagagaagcagagacccacagactgccacctgtgcggcgatgctgttccccggaggtaacccaccccttggaggagagagaccccgcacccggctcgtgtatttattaccgtcacactcttcagtgactcctgctggtacctgccctctatttattagccaactgtttccctgctgaatgcctcgctcccttcaagacgaggggcagggaaggacaggaccctcaggaattcagtgccttcaacaacgtgagagaaagagagaagccagccacagacccctgggagcttccgctttgaaagaagcaagacacgtggcctcgtgaggggcaagctaggccccagaggccctggaggtctccaggggcctgcagaaggaaagaagggggccctgctacctgttcttgggcctcaggctctgcacagacaagcagcccttgctttcggagctcctgtccaaagtagggatgcggatcctgctggggccgccacggcctggctggtgggaaggccggcagcgggcggaggggatccagccacttccccctcttcttctgaagatcagaacattcagctctggagaacagtggttgcctgggggcttttgccactccttgtcccccgtgatctcccctcacactttgccatttgcttgtactgggacattgttctttccggccaaggtgccaccaccctgccccccctaagagacacatacagagtgggccccgggctggagaaagagctgcctggatgagaaacagctcagccagtggggatgaggtcaccaggggaggagcctgtgcgtcccagctgaaggcagtggcaggggagcaggttccccaagggccctggcacccccacaagctgtccctgcagggccatctgactgccaagccagattctcttgaataaagtattctagtgtggaaa

SEQ ID NO: 3152 - DNA, 1633 bp, Homo sapiens
  source 1..1633: mol_type = genomic DNA
aatcaagagagtctcagcctttaggtagctgacactgtgataagagcatcctgtgaactacccaaataaggaggaaaacgaacgcagctgagcatgggatgccatataaaaatcacttaaaccagtcgccactccttgtttcctgagttgtcctgtgctggaggtctgctcagacgaaggtctccatggcgttagaagtcttgatgctcctcgctgtcttgatttggaccggtgctgagaacctccatgtgaaaataagttgctctctggactggttgatggtctcagttatcccagttgcagaaagcagaaatctgtatatatttgcggatgaattacatctgggaatgggctgccctgcaaatcggatacatacatatgtatatgagtttatatatcttgttcgtgattgtggcatcaggacaagggtagtttctgaggaaactctcctttttcaaaccgagctgtactttaccccaaggaatatagatcatgaccctcaggaaatccatttggagtgttccacctctaggaaatcagtgtggcttacaccagtttctactgagaatgaaataaaattggatcctagtccttttattgctgactttcagacaacagcagaagagttaggattattatcttctagtccaaacttgctctgagctaaaggagaaatggaaacttgaagctggtgttatgtattttgcaggaaaacagtttcattttttcatagcaaaaatatagttggtgtatatctctccttaagtctctggtttctaaaaaccctacttcagtaaaggtcctgattagttgattagtgaatgtgtatttctaaatatttgtattcagtaggggtatggctgattaatttaacattaactattaggtaattcatattatacatttaagttctttctgttctgtgtagaagattcagaaatatgtcttcaaagacaatgacttgatctaattgataagaacctccaataaatatgttctaatatttttcaggaagaataaagaatagagagagacatataaatgtgcaagaggcaaaactttgagcatagtgtaaaatttaacatattaactctcacgaaaggcaaaatccttttatgtgcagatactttaattcatgtagattttcctattaatcagtaaagttgaatcctaacaataatgccatgtgacaacctatttagattattccagaattaaattcaatttattttctagagctcaagtaaccactaccttaactgaaatttgatgttaggtttcccttgttcctccgaatggttcttccacactcaaaataattgaatggttgagttggttaagcaaagagttatcctgccacctaagagcattcattaaatgattatttattaccacctactttatactatcttcctttctttaaacatggagtctaaatatgtaatatatcaaaaaatacttctgatttggtagatttcttatatcaagggtgagaattgaactgtgccattggctattcaatagcttattgaatgtatgttttggatgccacatcctcctggaagcaaattttgccaagatactgtttattattatttttaattaaagtgatactattccattttcaattaaa

SEQ ID NO: 3153 - DNA, 1188 bp, Homo sapiens
  source 1..1188: mol_type = genomic DNA
atgagagccctgctggcgcgcctgcttctctgcgtcctggtcgtgagcgactccaaaggcagcaatgaacttcatcaagttccatataagtcaaaaacctgctatgaggggaatggtcacttttaccgaggaaaggccagcactgacaccatgggccggccctgcctgccctggaactctgccactgtccttcagcaaacgtaccatgcccacagatctgatgctcttcagctgggcctggggaaacataattactgcaggaacccagacaaccggaggcgaccctggtgctatgtgcaggtgggcctaaagctgcttgtccaagagtgcatggtgcatgactgcgcagatggaaaaaagccctcctctcctccagaagaattaaaatttcagtgtggccaaaagactctgaggccccgctttaagattattgggggagaattcaccaccatcgagaaccagccctggtttgcggccatctacaggaggcaccgggggggctctgtcacctacgtgtgtggaggcagcctcatcagcccttgctgggtgatcagcgccacacactgcttcattgattacccaaagaaggaggactacatcgtctacctgggtcgctcaaggcttaactccaacacgcaaggggagatgaagtttgaggtggaaaacctcatcctacacaaggactacagcgctgacacgcttgctcaccacaacgacattgccttgctgaagatccgttccaaggagggcaggtgtgcgcagccatcccggactatacagaccatctgcctgccctcgatgtataacgatccccagtttggcacaagctgtgagatcactggctttggaaaagagaattctaccgactatctctatccggagcagctgaaaatgactgttgtgaagctgatttcccaccgggagtgtcagcagccccactactacggctctgaagtcaccaccaaaatgctgtgtgctgctgacccacagtggaaaacagattcctgccagggagactcagggggacccctcgtctgttccctccaaggccgcatgactttgactggaattgtgagctggggccgtggatgtgccctgaaggacaagccaggcgtctacacgagagtctcacacttcttaccctggatccgcagtcacaccaaggaagagaatggcctggccctctga

SEQ ID NO: 3154 - DNA, 2211 bp, Homo sapiens
  source 1..2211: mol_type = genomic DNA
cccgggccagggtccacctgtccccgcagcgccggctcgcgccctcctgccgcagccaccgagccgccgtctagcgccccgacctcgccaccatgagagccctgctggcgcgcctgcttctctgcgtcctggtcgtgagcgactccaaaggcagcaatgaacttcatcaagttccatataagtcaaaaacctgctatgaggggaatggtcacttttaccgaggaaaggccagcactgacaccatgggccggccctgcctgccctggaactctgccactgtccttcagcaaacgtaccatgcccacagatctgatgctcttcagctgggcctggggaaacataattactgcaggaacccagacaaccggaggcgaccctggtgctatgtgcaggtgggcctaaagctgcttgtccaagagtgcatggtgcatgactgcgcagatggaaaaaagccctcctctcctccagaagaattaaaatttcagtgtggccaaaagactctgaggccccgctttaagattattgggggagaattcaccaccatcgagaaccagccctggtttgcggccatctacaggaggcaccgggggggctctgtcacctacgtgtgtggaggcagcctcatcagcccttgctgggtgatcagcgccacacactgcttcattgattacccaaagaaggaggactacatcgtctacctgggtcgctcaaggcttaactccaacacgcaaggggagatgaagtttgaggtggaaaacctcatcctacacaaggactacagcgctgacacgcttgctcaccacaacgacattgccttgctgaagatccgttccaaggagggcaggtgtgcgcagccatcccggactatacagaccatctgcctgccctcgatgtataacgatccccagtttggcacaagctgtgagatcactggctttggaaaagagaattctaccgactatctctatccggagcagctgaaaatgactgttgtgaagctgatttcccaccgggagtgtcagcagccccactactacggctctgaagtcaccaccaaaatgctgtgtgctgctgacccacagtggaaaacagattcctgccagggagactcagggggacccctcgtctgttccctccaaggccgcatgactttgactggaattgtgagctggggccgtggatgtgccctgaaggacaagccaggcgtctacacgagagtctcacacttcttaccctggatccgcagtcacaccaaggaagagaatggcctggccctctgagggtccccagggaggaaacgggcaccacccgctttcttgctggttgtcatttttgcagtagagtcatctccatcagctgtaagaagagactgggaagataggctctgcacagatggatttgcctgtgccacccaccagggcgaacgacaatagctttaccctcaggcataggcctgggtgctggctgcccagacccctctggccaggatggaggggtggtcctgactcaacatgttactgaccagcaacttgtctttttctggactgaagcctgcaggagttaaaaagggcagggcatctcctgtgcatgggtgaagggagagccagctcccccgacggtgggcatttgtgaggcccatggttgagaaatgaataatttcccaattaggaagtgtaacagctgaggtctcttgagggagcttagccaatgtgggagcagcggtttggggagcagagacactaacgacttcagggcagggctctgatattccatgaatgtatcaggaaatatatatgtgtgtgtatgtttgcacacttgtgtgtgggctgtgagtgtaagtgtgagtaagagctggtgtctgattgttaagtctaaatatttccttaaactgtgtggactgtgatgccacacagagtggtctttctggagaggttataggtcactcctggggcctcttgggtcccccacgtgacagtgcctgggaatgtattattctgcagcatgacctgtgaccagcactgtctcagtttcactttcacatagatgtccctttcttggccagttatcccttccttttagcctagttcatccaatcctcactgggtggggtgaggaccactcctgtacactgaatatttatatttcactatttttatttatatttttgtaattttaaataaaagtgatcaataaaatgtgatttttctgatg

SEQ ID NO: 3155 - DNA, 2321 bp, Homo sapiens
  source 1..2321: mol_type = genomic DNA
gcccgggccagggtccacctgtccccgcagcgccggctcgcgccctcctgccgcagccaccgagccgccgtctagcgccccgacctcgccaccatgagagccctgctggcgcgcctgcttctctgcgtcctggtcgtgagcgactccaaaggcagcaatgaacttcatcaagttccatcgaactgtgactgtctaaatggaggaacatgtgtgtccaacaagtacttctccaacattcactggtgcaactgcccaaagaaattcggagggcagcactgtgaaatagataagtcaaaaacctgctatgaggggaatggtcacttttaccgaggaaaggccagcactgacaccatgggccggccctgcctgccctggaactctgccactgtccttcagcaaacgtaccatgcccacagatctgatgctcttcagctgggcctggggaaacataattactgcaggaacccagacaaccggaggcgaccctggtgctatgtgcaggtgggcctaaagctgcttgtccaagagtgcatggtgcatgactgcgcagatggaaaaaagccctcctctcctccagaagaattaaaatttcagtgtggccaaaagactctgaggccccgctttaagattattgggggagaattcaccaccatcgagaaccagccctggtttgcggccatctacaggaggcaccgggggggctctgtcacctacgtgtgtggaggcagcctcatcagcccttgctgggtgatcagcgccacacactgcttcattgattacccaaagaaggaggactacatcgtctacctgggtcgctcaaggcttaactccaacacgcaaggggagatgaagtttgaggtggaaaacctcatcctacacaaggactacagcgctgacacgcttgctcaccacaacgacattgccttgctgaagatccgttccaaggagggcaggtgtgcgcagccatcccggactatacagaccatctgcctgccctcgatgtataacgatccccagtttggcacaagctgtgagatcactggctttggaaaagagaattctaccgactatctctatccggagcagctgaaaatgactgttgtgaagctgatttcccaccgggagtgtcagcagccccactactacggctctgaagtcaccaccaaaatgctgtgtgctgctgacccacagtggaaaacagattcctgccagggagactcagggggacccctcgtctgttccctccaaggccgcatgactttgactggaattgtgagctggggccgtggatgtgccctgaaggacaagccaggcgtctacacgagagtctcacacttcttaccctggatccgcagtcacaccaaggaagagaatggcctggccctctgagggtccccagggaggaaacgggcaccacccgctttcttgctggttgtcatttttgcagtagagtcatctccatcagctgtaagaagagactgggaagataggctctgcacagatggatttgcctgtgccacccaccagggcgaacgacaatagctttaccctcaggcataggcctgggtgctggctgcccagacccctctggccaggatggaggggtggtcctgactcaacatgttactgaccagcaacttgtctttttctggactgaagcctgcaggagttaaaaagggcagggcatctcctgtgcatgggtgaagggagagccagctcccccgacggtgggcatttgtgaggcccatggttgagaaatgaataatttcccaattaggaagtgtaacagctgaggtctcttgagggagcttagccaatgtgggagcagcggtttggggagcagagacactaacgacttcagggcagggctctgatattccatgaatgtatcaggaaatatatatgtgtgtgtatgtttgcacacttgtgtgtgggctgtgagtgtaagtgtgagtaagagctggtgtctgattgttaagtctaaatatttccttaaactgtgtggactgtgatgccacacagagtggtctttctggagaggttataggtcactcctggggcctcttgggtcccccacgtgacagtgcctgggaatgtattattctgcagcatgacctgtgaccagcactgtctcagtttcactttcacatagatgtccctttcttggccagttatcccttccttttagcctagttcatccaatcctcactgggtggggtgaggaccactcctgtacactgaatatttatatttcactatttttatttatatttttgtaattttaaataaaagtgatcaataaaatgtgatttttctgatga

SEQ ID NO: 3156 - DNA, 2658 bp, Homo sapiens
  source 1..2658: mol_type = genomic DNA
atatagagcaggcgccgcgggtcgcagcacagtgcggagaccgcagccccggagcccgggccagggtccacctgtccccgcagcgccggctcgcgccctcctgccgcagccaccgagccgccgtctagcgccccgacctcgccaccatgagagccctgctggcgcgcctgcttctctgcgtcctggtcgtgagcgactccaaagtgagtgcgctcttgctttgactgatgctgcccaaggacctctgatcagcaccaggggagaggaggggctgctcagggagctggggtcctccggattccatccacagcagggccagactctccccaggaaatgggacagggtggcagcggaggcttgagaaccacgggggttggcactggctggcaagggaggaagaggccgccgggactgccccagcctgcgggcatctggtagatgaagcttgcttgggtcaatccatttctcctggctggaaacccatggtcttccatttgagaactagatacgaacaggcgaactgtgactgtctaaatggaggaacatgtgtgtccaacaagtacttctccaacattcactggtgcaactgcccaaagaaattcggagggcagcactgtgaaatagataagtcaaaaacctgctatgaggggaatggtcacttttaccgaggaaaggccagcactgacaccatgggccggccctgcctgccctggaactctgccactgtccttcagcaaacgtaccatgcccacagatctgatgctcttcagctgggcctggggaaacataattactgcaggaacccagacaaccggaggcgaccctggtgctatgtgcaggtgggcctaaagctgcttgtccaagagtgcatggtgcatgactgcgcagatggaaaaaagccctcctctcctccagaagaattaaaatttcagtgtggccaaaagactctgaggccccgctttaagattattgggggagaattcaccaccatcgagaaccagccctggtttgcggccatctacaggaggcaccgggggggctctgtcacctacgtgtgtggaggcagcctcatcagcccttgctgggtgatcagcgccacacactgcttcattgattacccaaagaaggaggactacatcgtctacctgggtcgctcaaggcttaactccaacacgcaaggggagatgaagtttgaggtggaaaacctcatcctacacaaggactacagcgctgacacgcttgctcaccacaacgacattgccttgctgaagatccgttccaaggagggcaggtgtgcgcagccatcccggactatacagaccatctgcctgccctcgatgtataacgatccccagtttggcacaagctgtgagatcactggctttggaaaagagaattctaccgactatctctatccggagcagctgaaaatgactgttgtgaagctgatttcccaccgggagtgtcagcagccccactactacggctctgaagtcaccaccaaaatgctgtgtgctgctgacccacagtggaaaacagattcctgccagggagactcagggggacccctcgtctgttccctccaaggccgcatgactttgactggaattgtgagctggggccgtggatgtgccctgaaggacaagccaggcgtctacacgagagtctcacacttcttaccctggatccgcagtcacaccaaggaagagaatggcctggccctctgagggtccccagggaggaaacgggcaccacccgctttcttgctggttgtcatttttgcagtagagtcatctccatcagctgtaagaagagactgggaagataggctctgcacagatggatttgcctgtgccacccaccagggcgaacgacaatagctttaccctcaggcataggcctgggtgctggctgcccagacccctctggccaggatggaggggtggtcctgactcaacatgttactgaccagcaacttgtctttttctggactgaagcctgcaggagttaaaaagggcagggcatctcctgtgcatgggtgaagggagagccagctcccccgacggtgggcatttgtgaggcccatggttgagaaatgaataatttcccaattaggaagtgtaacagctgaggtctcttgagggagcttagccaatgtgggagcagcggtttggggagcagagacactaacgacttcagggcagggctctgatattccatgaatgtatcaggaaatatatatgtgtgtgtatgtttgcacacttgtgtgtgggctgtgagtgtaagtgtgagtaagagctggtgtctgattgttaagtctaaatatttccttaaactgtgtggactgtgatgccacacagagtggtctttctggagaggttataggtcactcctggggcctcttgggtcccccacgtgacagtgcctgggaatgtattattctgcagcatgacctgtgaccagcactgtctcagtttcactttcacatagatgtccctttcttggccagttatcccttccttttagcctagttcatccaatcctcactgggtggggtgaggaccactcctgtacactgaatatttatatttcactatttttatttatatttttgtaattttaaataaaagtgatcaataaaatgtgatttttctgatg

SEQ ID NO: 3157 - DNA, 1413 bp, Homo sapiens
  source 1..1413: mol_type = genomic DNA
cagggccgagccagccccttcaccaccagccggccgcgccccgggaagggaagtttgtggcggaggaggttcgtacgggaggagggggaggcgcccacgcatctggggctgactcgctctttcgcaaaacgtctgggaggagtccctggggccacaaaactgcctccttcctgaggccagaaggagagaagacgtgcagggaccccgcgcacaggagctgccctcgcgacatgggtcacccgccgctgctgccgctgctgctgctgctccacacctgcgtcccagcctcttggggcctgcggtgcatgcagtgtaagaccaacggggattgccgtgtggaagagtgcgccctgggacaggacctctgcaggaccacgatcgtgcgcttgtgggaagaaggagaagagctggagctggtggagaaaagctgtacccactcagagaagaccaacaggaccctgagctatcggactggcttgaagatcaccagccttaccgaggttgtgtgtgggttagacttgtgcaaccagggcaactctggccgggctgtcacctattcccgaagccgttacctcgaatgcatttcctgtggctcatcagacatgagctgtgagaggggccggcaccagagcctgcagtgccgcagccctgaagaacagtgcctggatgtggtgacccactggatccaggaaggtgaagaagtcctggagcttgaaaatctgccgcagaatggccgccagtgttacagctgcaaggggaacagcacccatggatgctcctctgaagagactttcctcattgactgccgaggccccatgaatcaatgtctggtagccaccggcactcacgaaccgaaaaaccaaagctatatggtaagaggctgtgcaaccgcctcaatgtgccaacatgcccacctgggtgacgccttcagcatgaaccacattgatgtctcctgctgtactaaaagtggctgtaaccacccagacctggatgtccagtaccgcagtggggctgctcctcagcctggccctgcccatctcagcctcaccatcaccctgctaatgactgccagactgtggggaggcactctcctctggacctaaacctgaaatccccctctctgccctggctggatccgggggacccctttgcccttccctcggctcccagccctacagacttgctgtgtgacctcaggccagtgtgccgacctctctgggcctcagttttcccagctatgaaaacagctatctcacaaagttgtgtgaagcagaagagaaaagctggaggaaggccgtgggccaatgggagagctcttgttattattaatattgttgccgctgttgtgttgttgttattaattaatattcatattatttattttatacttacataaagattttgtaccagtgg

SEQ ID NO: 3158 - DNA, 1414 bp, Homo sapiens
  source 1..1414: mol_type = genomic DNA
cagggccgagccagccccttcaccaccagccggccgcgccccgggaagggaagtttgtggcggaggaggttcgtacgggaggagggggaggcgcccacgcatctggggctgactcgctctttcgcaaaacgtctgggaggagtccctggggccacaaaactgcctccttcctgaggccagaaggagagaagacgtgcagggaccccgcgcacaggagctgccctcgcgacatgggtcacccgccgctgctgccgctgctgctgctgctccacacctgcgtcccagcctcttggggcctgcggtgcatgcagtgtaagaccaacggggattgccgtgtggaagagtgcgccctgggacaggacctctgcaggaccacgatcgtgcgcttgtgggaagaaggagaagagctggagctggtggagaaaagctgtacccactcagagaagaccaacaggaccctgagctatcggactggcttgaagatcaccagccttaccgaggttgtgtgtgggttagacttgtgcaaccagggcaactctggccgggctgtcacctattcccgaagccgttacctcgaatgcatttcctgtggctcatcagacatgagctgtgagaggggccggcaccagagcctgcagtgccgcagccctgaagaacagtgcctggatgtggtgacccactggatccaggaaggtgaagaagggcgtccaaaggatgaccgccacctccgtggctgtggctaccttcccggctgcccgggctccaatggtttccacaacaacgacaccttccacttcctgaaatgctgcaacaccaccaaatgcaacgagggcccaatcctggagcttgaaaatctgccgcagaatggccgccagtgttacagctgcaaggggaacagcacccatggatgctcctctgaagagactttcctcattgactgccgaggccccatgaatcaatgtctggtagccaccggcactcacgaacgctcactctggggaagctggttgccatgtaaaagtactactgccctgagaccaccatgctgtgaggaagcccaagctactcatgtataaatgccatgtggagatagagccccagatgtttcagccatctcagcccaggcaccagacaagtgggtgaagaagccaccttggacatgtagccccagcagatgtgatatagagaagaaacaggaaacttggctatattagtttcctagggctgcctgtgataaattattacaaactttataaactaacacattgtgtgcctatatcaaaacatcatggaaggacaggcacagtggctcatgcctgtagtcctagcactttgggagggtgagaaaggaagatctcttgagctcaggagttcaagatcagcctgggcaacacagtgagacctcatctccact

SEQ ID NO: 3159 - DNA, 1548 bp, Homo sapiens
  source 1..1548: mol_type = genomic DNA
cagggccgagccagccccttcaccaccagccggccgcgccccgggaagggaagtttgtggcggaggaggttcgtacgggaggagggggaggcgcccacgcatctggggctgactcgctctttcgcaaaacgtctgggaggagtccctggggccacaaaactgcctccttcctgaggccagaaggagagaagacgtgcagggaccccgcgcacaggagctgccctcgcgacatgggtcacccgccgctgctgccgctgctgctgctgctccacacctgcgtcccagcctcttggggcctgcggtgcatgcagtgtaagaccaacggggattgccgtgtggaagagtgcgccctgggacaggacctctgcaggaccacgatcgtgcgcttgtgggaagaaggagaagagctggagctggtggagaaaagctgtacccactcagagaagaccaacaggaccctgagctatcggactggcttgaagatcaccagccttaccgaggttgtgtgtgggttagacttgtgcaaccagggcaactctggccgggctgtcacctattcccgaagccgttacctcgaatgcatttcctgtggctcatcagacatgagctgtgagaggggccggcaccagagcctgcagtgccgcagccctgaagaacagtgcctggatgtggtgacccactggatccaggaaggtgaagaagggcgtccaaaggatgaccgccacctccgtggctgtggctaccttcccggctgcccgggctccaatggtttccacaacaacgacaccttccacttcctgaaatgctgcaacaccaccaaatgcaacgagggcccaatcctggagcttgaaaatctgccgcagaatggccgccagtgttacagctgcaaggggaacagcacccatggatgctcctctgaagagactttcctcattgactgccgaggccccatgaatcaatgtctggtagccaccggcactcacgaaccgaaaaaccaaagctatatggtaagaggctgtgcaaccgcctcaatgtgccaacatgcccacctgggtgacgccttcagcatgaaccacattgatgtctcctgctgtactaaaagtggctgtaaccacccagacctggatgtccagtaccgcagtggggctgctcctcagcctggccctgcccatctcagcctcaccatcaccctgctaatgactgccagactgtggggaggcactctcctctggacctaaacctgaaatccccctctctgccctggctggatccgggggacccctttgcccttccctcggctcccagccctacagacttgctgtgtgacctcaggccagtgtgccgacctctctgggcctcagttttcccagctatgaaaacagctatctcacaaagttgtgtgaagcagaagagaaaagctggaggaaggccgtgggccaatgggagagctcttgttattattaatattgttgccgctgttgtgttgttgttattaattaatattcatattatttattttatacttacataaagattttgtaccagtgg

SEQ ID NO: 3160 - DNA, 4165 bp, Homo sapiens
  source 1..4165: mol_type = genomic DNA
gcccggagagccgcatctattggcagctttgttattgatcagaaactgctcgccgccgacttggcttccagtctggctgcgggcaacccttgagttttcgcctctgtcctgtcccccgaactgacaggtgctcccagcaacttgctggggacttctcgccgctcccccgcgtccccaccccctcattcctccctcgccttcacccccacccccaccacttcgccacagctcaggatttgtttaaaccttgggaaactggttcaggtccaggttttgctttgatccttttcaaaaactggagacacagaagagggctctaggaaaaagttttggatgggattatgtggaaactaccctgcgattctctgctgccagagcaggctcggcgcttccaccccagtgcagccttcccctggcggtggtgaaagagactcgggagtcgctgcttccaaagtgcccgccgtgagtgagctctcaccccagtcagccaaatgagcctcttcgggcttctcctgctgacatctgccctggccggccagagacaggggactcaggcggaatccaacctgagtagtaaattccagttttccagcaacaaggaacagaacggagtacaagatcctcagcatgagagaattattactgtgtctactaatggaagtattcacagcccaaggtttcctcatacttatccaagaaatacggtcttggtatggagattagtagcagtagaggaaaatgtatggatacaacttacgtttgatgaaagatttgggcttgaagacccagaagatgacatatgcaagtatgattttgtagaagttgaggaacccagtgatggaactatattagggcgctggtgtggttctggtactgtaccaggaaaacagatttctaaaggaaatcaaattaggataagatttgtatctgatgaatattttccttctgaaccagggttctgcatccactacaacattgtcatgccacaattcacagaagctgtgagtccttcagtgctacccccttcagctttgccactggacctgcttaataatgctataactgcctttagtaccttggaagaccttattcgatatcttgaaccagagagatggcagttggacttagaagatctatataggccaacttggcaacttcttggcaaggcttttgtttttggaagaaaatccagagtggtggatctgaaccttctaacagaggaggtaagattatacagctgcacacctcgtaacttctcagtgtccataagggaagaactaaagagaaccgataccattttctggccaggttgtctcctggttaaacgctgtggtgggaactgtgcctgttgtctccacaattgcaatgaatgtcaatgtgtcccaagcaaagttactaaaaaataccacgaggtccttcagttgagaccaaagaccggtgtcaggggattgcacaaatcactcaccgacgtggccctggagcaccatgaggagtgtgactgtgtgtgcagagggagcacaggaggatagccgcatcaccaccagcagctcttgcccagagctgtgcagtgcagtggctgattctattagagaacgtatgcgttatctccatccttaatctcagttgtttgcttcaaggacctttcatcttcaggatttacagtgcattctgaaagaggagacatcaaacagaattaggagttgtgcaacagctcttttgagaggaggcctaaaggacaggagaaaaggtcttcaatcgtggaaagaaaattaaatgttgtattaaatagatcaccagctagtttcagagttaccatgtacgtattccactagctgggttctgtatttcagttctttcgatacggcttagggtaatgtcagtacaggaaaaaaactgtgcaagtgagcacctgattccgttgccttgcttaactctaaagctccatgtcctgggcctaaaatcgtataaaatctggatttttttttttttttttgctcatattcacatatgtaaaccagaacattctatgtactacaaacctggtttttaaaaaggaactatgttgctatgaattaaacttgtgtcgtgctgataggacagactggatttttcatatttcttattaaaatttctgccatttagaagaagagaactacattcatggtttggaagagataaacctgaaaagaagagtggccttatcttcactttatcgataagtcagtttatttgtttcattgtgtacatttttatattctccttttgacattataactgttggcttttctaatcttgttaaatatatctatttttaccaaaggtatttaatattcttttttatgacaacttagatcaactatttttagcttggtaaatttttctaaacacaattgttatagccagaggaacaaagatgatataaaatattgttgctctgacaaaaatacatgtatttcattctcgtatggtgctagagttagattaatctgcattttaaaaaactgaattggaatagaattggtaagttgcaaagactttttgaaaataattaaattatcatatcttccattcctgttattggagatgaaaataaaaagcaacttatgaaagtagacattcagatccagccattactaacctattccttttttggggaaatctgagcctagctcagaaaaacataaagcaccttgaaaaagacttggcagcttcctgataaagcgtgctgtgctgtgcagtaggaacacatcctatttattgtgatgttgtggttttattatcttaaactctgttccatacacttgtataaatacatggatatttttatgtacagaagtatgtctcttaaccagttcacttattgtactctggcaatttaaaagaaaatcagtaaaatattttgcttgtaaaatgcttaatatcgtgcctaggttatgtggtgactatttgaatcaaaaatgtattgaatcatcaaataaaagaatgtggctattttggggagaaaattatgtgtgtgtgtgctcaagatttatttcttggactctgagaaaatgaaagataaaattttctgttatgattttcatttagcaaaagcatatgtcaattcaaaagacaaaaaaagggaagatacctgtgagccttctctgcctcttgtttccaatgcctttgagcaatggttttatttttcttactggtcttaatacagatttctggtaatttaagtttcacctgacttgaaagttgtatggtttatgaaatgcttggtgataggtggtatggtagtatgaaactggaaaaaaacttgcaggtttccactcatgtcttcattgtcactggcaactactaaatggggtgagcataaattgatttggtgcatggattattgtacattgcacacttcaagatatggttcctcagttccagacatagattcctattcagggctggtatcttcagcatcctttcctcagcctttcaacttggcagagatgtctagtgtccagggccttctgtcttcagactgctcttcaggcaagcacccttttcctgtgctttgacacctgcagttctgccctgcctccaactatgtggaaaacaaagaaacaaaatgagcctatgtgttctgtcttacttccttaccttttcctggttttgtcctatccatatagaggccaactagatatatggaatatgcaacgtagtaagtagttggcagtttacaactttcattagtatagtaaagactactaagtcttagtaaatagcctgtttaactgtgtttaatccattgtttcccatctttgaacgaaatatattttcccttttttaatatttattttttgtttacttataaaatcttgacagccagaagagatcataagggtagcagtcctcagttgccagtcggtgagtggttaccatgtgaggactaaccactttataatcacttactcatagatcgtcctgtgtattttactaaacacacacacacacacacacacacataaatagcacatgaccctaatttctgagaagtacagtaagtattgactgtattgaccacacaccgttttgtgtatgatatctgtttcaagcctttgtccttgagacatgggctgttttgcccagtgatgtttactaaaataaaagcaagccttaaatgtca

SEQ ID NO: 3161 - DNA, 1354 bp, Homo sapiens
  source 1..1354: mol_type = genomic DNA
aggaaaaagttttggatgggattatgtggaaactaccctgcgattctctgctgccagagcaggctcggcgcttccaccccagtgcagccttcccctggcggtggtgaaagagactcgggagtcgctgcttccaaagtgcccgccgtgagtgagctctcaccccagtcagccaaatgagcctcttcgggcttctcctgctgacatctgccctggccggccagagacaggggactcaggcggaatccaacctgagtagtaaattccagttttccagcaacaaggaacagaacggtatgattttgtagaagttgaggaacccagtgatggaactatattagggcgctggtgtggttctggtactgtaccaggaaaacagatttctaaaggaaatcaaattaggataagatttgtatctgatgaatattttccttctgaaccagggttctgcatccactacaacattgtcatgccacaattcacagaagctgtgagtccttcagtgctacccccttcagctttgccactggacctgcttaataatgctataactgcctttagtaccttggaagaccttattcgatatcttgaaccagagagatggcagttggacttagaagatctatataggccaacttggcaacttcttggcaaggcttttgtttttggaagaaaatccagagtggtggatctgaaccttctaacagaggaggtaagattatacagctgcacacctcgtaacttctcagtgtccataagggaagaactaaagagaaccgataccattttctggccaggttgtctcctggttaaacgctgtggtgggaactgtgcctgttgtctccacaattgcaatgaatgtcaatgtgtcccaagcaaagttactaaaaaataccacgaggtccttcagttgagaccaaagaccggtgtcaggggattgcacaaatcactcaccgacgtggccctggagcaccatgaggagtgtgactgtgtgtgcagagggagcacaggaggatagccgcatcaccaccagcagctcttgcccagagctgtgcagtgcagtggctgattctattagagaacgtatgcgttatctccatccttaatctcagttgtttgcttcaaggacctttcatcttcaggatttacagtgcattctgaaagaggagacatcaaacagaattaggagttgtgcaacagctcttttgagaggaggcctaaaggacaggagaaaaggtcttcaatcgtggaaagaaaattaaatgttgtattaaatagatcaccagctagtttcagagttaccatgtacgtattccactagctgggttctgtatttcagttctttcgatacggctta

SEQ ID NO: 3162 - DNA, 1014 bp, Homo sapiens
  source 1..1014: mol_type = genomic DNA
ttacgtttgatgaaagatttgggcttgaagacccagaagatgacatatgcaagtatgattttgtagaagttgaggaacccagtgatggaactatattagggcgctggtgtggttctgggttctgcatccactacaacattgtcatgccaaacctcccgtgagttgttcctggcaggcatttgtgtctgcatgccctgtctgctgcttaggctctttaaaagatttgtgtgatacttgtttggttacttgtgtgattcataatagcagattctcgttttggcaagagaaaactctcttctatgatgcagtatacttggcttctcacaaagcaattcacagaagctgtgagtccttcagtgctacccccttcagctttgccactggacctgcttaataatgctataactgcctttagtaccttggaagaccttattcgatatcttgaaccagagagatggcagttggacttagaagatctatataggccaacttggcaacttcttggcaaggcttttgtttttggaagaaaatccagagtggtggatctgaaccttctaacagaggaggtaagattatacagctgcacacctcgtaacttctcagtgtccataagggaagaactaaagagaaccgataccattttctggccaggttgtctcctggttaaacgctgtggtgggaactgtgcctgttgtctccacaattgcaatgaatgtcaatgtgtcccaagcaaagttactaaaaaataccacgaggtccttcagttgagaccaaagaccggtgtcaggggattgcacaaatcactcaccgacgtggccctggagcaccatgaggagtgtgactgtgtgtgcagagggagcacaggaggatagccgcatcaccaccagcagctcttgcccagagctgtgcagtgcagtggctgattctattagagaacgtatgcgttatctccatccttaatctcagttgtttgcttcaaggacctttcatcttcaggatttacagtgcattctg

SEQ ID NO: 3163 - DNA, 995 bp, Homo sapiens
  source 1..995: mol_type = genomic DNA
gcccggagagccgcatctattggcagctttgttattgatcagaaactgctcgccgccgacttggcttccagtctggctgcgggcaacccttgagttttcgcctctgtcctgtcccccgaactgacaggtgctcccagcaacttgctggggacttctcgccgctcccccgcgtccccaccccctcattcctccctcgccttcacccccacccccaccacttcgccacagctcaggatttgtttaaaccttgggaaactggttcaggtccaggttttgctttgatccttttcaaaaactggagacacagaagagggctctaggaaaaagttttggatgggattatgtggaaactaccctgcgattctctgctgccagagcaggctcggcgcttccaccccagtgcagccttcccctggcggtggtgaaagagactcgggagtcgctgcttccaaagtgcccgccgtgagtgagctctcaccccagtcagccaaatgagcctcttcgggcttctcctgctgacatctgccctggccggccagagacaggggactcaggcggaatccaacctgagtagtaaattccagttttccagcaacaaggaacagaacggagtacaagatcctcagcatgagagaattattactgtgtctactaatggaagtattcacagcccaaggtttcctcatacttatccaagaaatacggtcttggtatggagattagtagcagtagaggaaaatgtatggatacaacttacgtttgatgaaagatttgggcttgaagacccagaagatgacatatgcaagtatgattttgtagaagttgaggaacccagtgatggaactatattagggcgctggtgtggttctggtactgtaccaggaaaacagatttctaaaggaaatcaaattaggataagatttgtatctgatgaatattttccttctgaaccttctaacagaggaggtaagattatacagctgcacacctcgtaa

SEQ ID NO: 3164 - DNA, 579 bp, Homo sapiens
  source 1..579: mol_type = genomic DNA
tactctgtttccacatcactttaactccatgagcatcgaagcttctggaatcaacatgtttcttatgtttcttgcaggttcaagccttgagggtcaagaaaactctttcacaatcaacagtgttgacatgaagagcctgccggactggacggtgcaaaatgggaagaacctgaccctgcagtgcttcgcggatgtcagcaccacctctcacgtcaagcctcagcaccagatgctgttctataaggatgacgtgctgttttacaacatctcctccatgaagagcacagagagttattttattcctgaagtccggatctatgactcagggacatataaatgtactgtgattgtgaacaacaaagagaaaaccactgcagagtaccaggtgttggtggaaggagtgcccagtcccagggtgacactggacaagaaagaggccatccaaggtgggatcgtgagggtcaactgttctgtcccagaggaaaaggccccaatacacttcacaattgaaaaacttgaactaaatgaaaaaatggtcaagctgaaaagagagaagaattctcgagaccagaattttgt

SEQ ID NO: 3165 - DNA, 3743 bp, Homo sapiens
  source 1..3743: mol_type = genomic DNA
ccaggccccattgttcccggtttccagccatggctgccattacctgaccagcgccacagccggtctctctgcaggcgccgggagaagtgaccagagcaatttctgcttttcacagggcgggtttctcaacggtgacttgtgggcagtgccttctgctgagcgagtcatggcccgaaggcagaactaactgtgcctgcagtcttcactctcaggatgcagccgaggtgggcccaaggggccacgatgtggcttggagtcctgctgacccttctgctctgttcaagccttgagggtcaagaaaactctttcacaatcaacagtgttgacatgaagagcctgccggactggacggtgcaaaatgggaagaacctgaccctgcagtgcttcgcggatgtcagcaccacctctcacgtcaagcctcagcaccagatgctgttctataaggatgacgtgctgttttacaacatctcctccatgaagagcacagagagttattttattcctgaagtccggatctatgactcagggacatataaatgtactgtgattgtgaacaacaaagagaaaaccactgcagagtaccaggtgttggtggaaggagtgcccagtcccagggtgacactggacaagaaagaggccatccaaggtgggatcgtgagggtcaactgttctgtcccagaggaaaaggccccaatacacttcacaattgaaaaacttgaactaaatgaaaaaatggtcaagctgaaaagagagaagaattctcgagaccagaattttgtgatactggaattccccgttgaggaacaggaccgcgttttatccttccgatgtcaagctaggatcatttctgggatccatatgcagacctcagaatctaccaagagtgaactggtcaccgtgacggaatccttctctacacccaagttccacatcagccccaccggaatgatcatggaaggagctcagctccacattaagtgcaccattcaagtgactcacctggcccaggagtttccagaaatcataattcagaaggacaaggcgattgtggcccacaacagacatggcaacaaggctgtgtactcagtcatggccatggtggagcacagtggcaactacacgtgcaaagtggagtccagccgcatatccaaggtcagcagcatcgtggtcaacataacagaactattttccaagcccgaactggaatcttccttcacacatctggaccaaggtgaaagactgaacctgtcctgctccatcccaggagcacctccagccaacttcaccatccagaaggaagatacgattgtgtcacagactcaagatttcaccaagatagcctcaaagtcggacagtgggacgtatatctgcactgcaggtattgacaaagtggtcaagaaaagcaacacagtccagatagtcgtatgtgaaatgctctcccagcccaggatttcttatgatgcccagtttgaggtcataaaaggacagaccatcgaagtccgttgcgaatcgatcagtggaactttgcctatttcttaccaacttttaaaaacaagtaaagttttggagaatagtaccaagaactcaaatgatcctgcggtattcaaagacaaccccactgaagacgtcgaataccagtgtgttgcagataattgccattcccatgccaaaatgttaagtgaggttctgagggtgaaggtgatagccccggtggatgaggtccagatttctatcctgtcaagtaaggtggtggagtctggagaggacattgtgctgcaatgtgctgtgaatgaaggatctggtcccatcacctataagttttacagagaaaaagagggcaaacccttctatcaaatgacctcaaatgccacccaggcattttggaccaagcagaaggctagcaaggaacaggagggagagtattactgcacagccttcaacagagccaaccacgcctccagtgtccccagaagcaaaatactgacagtcagagtcattcttgccccatggaagaaaggacttattgcagtggttatcatcggagtgatcattgctctcttgatcattgcggccaaatgttattttctgaggaaagccaaggccaagcagatgccagtggaaatgtccaggccagcagtaccacttctgaactccaacaacgagaaaatgtcagatcccaatatggaagctaacagtcattacggtcacaatgacgatgtcagaaaccatgcaatgaaaccaataaatgataataaagagcctctgaactcagacgtgcagtacacggaagttcaagtgtcctcagctgagtctcacaaagatctaggaaagaaggacacagagacagtgtacagtgaagtccggaaagctgtccctgatgccgtggaaagcagatactctagaacggaaggctcccttgatggaacttagacagcaaggccagatgcacatccctggaaggacatccatgttccgagaagaacagataatccctgtatttcaagacctctgtgcacttatttatgaacctgccctgctcccacagaacacagcaattcctcaggctaagctgccggttcttaaatccatcctgctaagttaatgttgggtagaaagagatacagaggggctgttgaatttcccacataccctccttccaccaagttggaacatccttggaaattggaagagcacaagaggagatccagggcaaggccattgggatattctgaaacttgaatattttgttttgtgcagagataaagaccttttccatgcaccctcatacacagaaaccaattttcttttttatactcaatcatttctagcgcatggcctggttagaggctggttttttctcttttcctttggtccttcaaaggcttgtagttttggctagtccttgttctttggaaatacacagtgctgaccagacagcctccccctgtcccctctatgacctcgccctccacaaatgggaaaaccagactacttgggagcaccgcctgtgaaataccaacctgaagacaccgttcattcaggcaacgcacaaaacagaaaatgaaggtggaacaagcacagatgttcttcaactgtttttgtctacactctttctcttttcctctaccatgctgaaggctgaaagacaggaagatggtgccatcagcaaatattattcttaattgaaaacttgaaatgtgtatgtttcttactaatttttaaaaatgtattccttgccagggcaggcaaggtggctcacgcctgtaatcccagcacttcaggaggctgaggtgggcggatcacctgaggtcaggagtttgagaccagcctgatgaaaccctgtctctactaaaaatacaagaattagccgggcgtggtggcgcatgcctgtagtatcagctactcaagaggctgaggtgagattatcgcttgaacccaggaaacggaggttgtagtgagcggagatcgcgccactgcactccagcctgagtgacagagtgagaatccatctcaaaaaaaacaaaaaacaaaattgcttgctaaagaagtggtctcctgaggtcttaagacattcctgacagtgtcttgagtgggtgggagagaggctgctgtcattgcgctgtggaatttcacagatgagaaccacgcctagccaaaatcacttttcctgtttgcctcagtgacacagctgcagggaccctcgtggatgttgtattaaataaatttgacctttgctctttgca

SEQ ID NO: 3166 - DNA, 852 bp, Homo sapiens
  source 1..852: mol_type = genomic DNA
gaggagagtggctgcccaaggtggggtttgtcttttgccgtctgagtggcccctgggatgcagggcgggtttctcaacggtgacttgtgggcagtgccttctgctgagcgagtcatggcccgaaggcagaactaactgtgcctgcagtcttcactctcaggatgcagccgaggtgggcccaaggggccacgatgtggcttggagtcctgctgacccttctgctctgttcaagccttgagggtcaagaaaactctttcacaatcaacagtgttgacatgaagagcctgccggactggacggtgcaaaatgggaagaacctgaccctgcagtgcttcgcggatgtcagcaccacctctcacgtcaagcctcagcaccagatgctgttctataaggatgacgtgctgttttacaacatctcctccatgaagagcacagagagttattttattcctgaagtccggatctatgactcagggacatataaatgtactgtgattgtgaacaacaaagagaaaaccactgcagagtaccaggtgttggtggaaggagtgcccagtcccagggtgacactggacaagaaagaggccatccaaggtgggatcgtgagggtcaactgttctgtcccagaggaaaaggccccaatacacttcacaattgaaaaacttgaactaaatgaaaaaatggtcaagctgaaaagagagaagaattctcgagaccagaattttgtgatactggaattccccgttgaggaacaggaccgcgttttatccttccgatgtcaagctaggatcatttctgggatccatatgcagacctcagaatctaccaagagtgaactggtcaccgtgacgg

SEQ ID NO: 3167 - DNA, 580 bp, Homo sapiens
  source 1..580: mol_type = genomic DNA
tttttctgtgcagttaacgagtcgctatgtttcggatctgcgttacttccccggtatttgaaggcaggagcactgcagggcgggtttctcaacggtgacttgtgggcagtgccttctgctgagcgagtcatggcccgaaggcagaactaactgtgcctgcagtcttcactctcaggatgcagccgaggtgggcccaaggggccacgatgtggcttggagtcctgctgacccttctgctctgttcaagccttgagggtcaagaaaactctttcacaatcaacagtgttgacatgaagagcctgccggactggacggtgcaaaatgggaagaacctgaccctgcagtgcttcgcggatgtcagcaccacctctcacgtcaagcctcagcaccagatgctgttctataaggatgacgtgctgttttacaacatctcctccatgaagagcacagagagttattttattcctgaagtccggatctatgactcagggacatataaatgtactgtgattgtgaacaacaaagagaaaaccactgcagagtaccaggtgttggtggaaggagtgcccagtcccagggt

SEQ ID NO: 3168 - DNA, 1308 bp, Homo sapiens
  source 1..1308: mol_type = genomic DNA
tccgcaaatatgcagaattaccggccgggtcgctcctgaagccagcgcggggagcgagcgcggcggcggccagcaccgggaacgcaccgaggaagaagcccagcccccgccctccgccccttccgtccccaccccctacccggcggcccaggaggctccccgcgctgcgggcgcgcactccctgtttctcctcctcctggctggcgctgcctgcctctccgcactcactgctcgcgccgggcgcgctccgccagctccgtgctccccgcgccaccctcctccgggccgcgctccctaagggatggtactgaatttcgccgccacaggagaccggctggagcgcccgccccgcggcctcgcctctcctccgagcagccagcgcctcgggacgcgatgaggaccttggcttgcctgctgctcctcggctgcggatacctcgcccatgttctggccgaggaagccgagatcccccgcgaggtgatcgagaggctggcccgcagtcagatccacagcatccgggacctccagcgactcctggagatagactccgtagggagtgaggattctttggacaccagcctgagagctcacggggtccatgccactaagcatgtgcccgagaagcggcccctgcccattcggaggaagagaagcatcgaggaagctgtccccgctgtctgcaagaccaggacggtcatttacgagattcctcggagtcaggtcgaccccacgtccgccaacttcctgatctggcccccgtgcgtggaggtgaaacgctgcaccggctgctgcaacacgagcagtgtcaagtgccagccctcccgcgtccaccaccgcagcgtcaaggtggccaaggtggaatacgtcaggaagaagccaaaattaaaagaagtccaggtgaggttagaggagcatttggagtgcgcctgcgcgaccacaagcctgaatccggattatcgggaagaggacacgggaaggcctagggagtcaggtaaaaaacggaaaagaaaaaggttaaaacccacctaaagcagccaaccagatgtgaggtgaggatgagccgcagccctttcctgggacatggatgtacatggcgtgttacattcctgaacctactatgtacggtgctttattgccagtgtgcggtctttgttctcctccgtgaaaaactgtgtccgagaacactcgggagaacaaagagacagtgcacatttgtttaatgtgacatcaaagcaagtattgtagcactcggtgaagcagtaagaagcttccttgtcaaaaagagagagagagaaagagagagagaaa

SEQ ID NO: 3169 - DNA, 2305 bp, Homo sapiens
  source 1..2305: mol_type = genomic DNA
ttcttggggctgatgtccgcaaatatgcagaattaccggccgggtcgctcctgaagccagcgcggggagcgagcgcggcggcggccagcaccgggaacgcaccgaggaagaagcccagcccccgccctccgccccttccgtccccaccccctacccggcggcccaggaggctccccgcgctgcgggcgcgcactccctgtttctcctcctcctggctggcgctgcctgcctctccgcactcactgctcgcgccgggcgcgctccgccagctccgtgctccccgcgccaccctcctccgggccgcgctccctaagggatggtactgaatttcgccgccacaggagaccggctggagcgcccgccccgcggcctcgcctctcctccgagcagccagcgcctcgggacgcgatgaggaccttggcttgcctgctgctcctcggctgcggatacctcgcccatgttctggccgaggaagccgagatcccccgcgaggtgatcgagaggctggcccgcagtcagatccacagcatccgggacctccagcgactcctggagatagactccgtagggagtgaggattctttggacaccagcctgagagctcacggggtccatgccactaagcatgtgcccgagaagcggcccctgcccattcggaggaagagaagcatcgaggaagctgtccccgctgtctgcaagaccaggacggtcatttacgagattcctcggagtcaggtcgaccccacgtccgccaacttcctgatctggcccccgtgcgtggaggtgaaacgctgcaccggctgctgcaacacgagcagtgtcaagtgccagccctcccgcgtccaccaccgcagcgtcaaggtggccaaggtggaatacgtcaggaagaagccaaaattaaaagaagtccaggtgaggttagaggagcatttggagtgcgcctgcgcgaccacaagcctgaatccggattatcgggaagaggacacggatgtgaggtgaggatgagccgcagccctttcctgggacatggatgtacatggcgtgttacattcctgaacctactatgtacggtgctttattgccagtgtgcggtctttgttctcctccgtgaaaaactgtgtccgagaacactcgggagaacaaagagacagtgcacatttgtttaatgtgacatcaaagcaagtattgtagcactcggtgaagcagtaagaagcttccttgtcaaaaagagagagagagaaagagagagagaaaacaaaaccacaaatgacaaaaacaaaacggactcacaaaaatatctaaactcgatgagatggagggtcgccccgtgggatggaagtgcagaggtctcagcagactggatttctgtccgggtggtcacaggtgcttttttgccgaggatgcagagcctgctttgggaacgactccagaggggtgctggtgggctctgcaggggcccgcaggaagcaggaatgtcttggaaaccgccacgcgaactttagaaaccacacctcctcgctgtagtatttaagcccatacagaaaccttcctgagagccttaagtggtttttttttttgtttttgttttgttttttttttttttgtttttttttttttttttttacaccataaagtgattattaagctttcctttttactctttggctagctttttttttttttttttttttttaattatctcttggatgacatttacaccgataacacacaggctgctgtaactgtcaggacagtgcgacggtatttttcctagcaagatgcaaactaatgagatgtattaaaataaacatggtatacctacctatgcatcatttcctaaatgtttctggctttgtgtttctcccttaccctgctttatttgttaatttaagccattttgaaagaactatgcgtcaaccaatcgtacgccgtccctgcggcacctgccccagagcccgtttgtggctgagtgacaacttgttccccgcagtgcacacctagaatgctgtgttcccacgcggcacgtgagatgcattgccgcttctgtctgtgttgttggtgtgccctggtgccgtggtggcggtcactccctctgctgccagtgtttggacagaacccaaattctttatttttggtaagatattgtgctttacctgtattaacagaaatgtgtgtgtgtggtttgtttttttgtaaaggtgaagtttgtatgtttacctaatattacctgttttgtatacctgagagcctgctatgttctttttttgttgatccaaaattaaaaaaaaaaataccaccaacaaaa

SEQ ID NO: 3170 - DNA, 564 bp, Homo sapiens
  source 1..564: mol_type = genomic DNA
cggccggagcgccggggcgggggcggggaccggctctctggccctttttggcgcagcagctctgggcgctgcccgctgccgccgctggggcccgagagaggcgagccggcgacggcggcgcttctgcggcggcctcctccctccccacccggtgccgcaggattgcagctggcactggagggtgggcaagctcgagggaggggcgcggagccccggcgcggagccgggcgcggggctttgatggatttagctgcttgcgcgagcgcgtgtgtgctccctgccgcggcggcggcgcccgggccctgccgggtccgcacgaaccccgagcgcttccgaggagaccggctggagcgcccgccccgcggcctcgcctctcctccgagcagccagcgcctcgggacgcgatgaggaccttggcttgcctgctgctcctcggctgcggatacctcgcccatgttctggccgaggaagccgagatcccccgcgaggtgatcgagaggctggcccgcagtcagatccacagcatccgggacctccagcgactcctggagatagactccgtag

SEQ ID NO: 3171 - DNA, 6576 bp, Homo sapiens
  source 1..6576: mol_type = genomic DNA
aagagcaaaaagcgaaggcgcaatctggacactgggagattcggagcgcagggagtttgagagaaacttttattttgaagagaccaaggttgagggggggcttatttcctgacagctatttacttagagcaaatgattagttttagaaggatggactataacattgaatcaattacaaaacgcggtttttgagcccattactgttggagctacagggagagaaacagaggaggagactgcaagagatcattggaggccgtgggcacgctctttactccatgtgtgggacattcattgcggaataacatcggaggagaagtttcccagagctatggggacttcccatccggcgttcctggtcttaggctgtcttctcacagggctgagcctaatcctctgccagctttcattaccctctatccttccaaatgaaaatgaaaaggttgtgcagctgaattcatccttttctctgagatgctttggggagagtgaagtgagctggcagtaccccatgtctgaagaagagagctccgatgtggaaatcagaaatgaagaaaacaacagcggcctttttgtgacggtcttggaagtgagcagtgcctcggcggcccacacagggttgtacacttgctattacaaccacactcagacagaagagaatgagcttgaaggcaggcacatttacatctatgtgccagacccagatgtagcctttgtacctctaggaatgacggattatttagtcatcgtggaggatgatgattctgccattataccttgtcgcacaactgatcccgagactcctgtaaccttacacaacagtgagggggtggtacctgcctcctacgacagcagacagggctttaatgggaccttcactgtagggccctatatctgtgaggccaccgtcaaaggaaagaagttccagaccatcccatttaatgtttatgctttaaaagcaacatcagagctggatctagaaatggaagctcttaaaaccgtgtataagtcaggggaaacgattgtggtcacctgtgctgtttttaacaatgaggtggttgaccttcaatggacttaccctggagaagtgaaaggcaaaggcatcacaatgctggaagaaatcaaagtcccatccatcaaattggtgtacactttgacggtccccgaggccacggtgaaagacagtggagattacgaatgtgctgcccgccaggctaccagggaggtcaaagaaatgaagaaagtcactatttctgtccatgagaaaggtttcattgaaatcaaacccaccttcagccagttggaagctgtcaacctgcatgaagtcaaacattttgttgtagaggtgcgggcctacccacctcccaggatatcctggctgaaaaacaatctgactctgattgaaaatctcactgagatcaccactgatgtggaaaagattcaggaaataaggtatcgaagcaaattaaagctgatccgtgctaaggaagaagacagtggccattatactattgtagctcaaaatgaagatgctgtgaagagctatacttttgaactgttaactcaagttccttcatccattctggacttggtcgatgatcaccatggctcaactgggggacagacggtgaggtgcacagctgaaggcacgccgcttcctgatattgagtggatgatatgcaaagatattaagaaatgtaataatgaaacttcctggactattttggccaacaatgtctcaaacatcatcacggagatccactcccgagacaggagtaccgtggagggccgtgtgactttcgccaaagtggaggagaccatcgccgtgcgatgcctggctaagaatctccttggagctgagaaccgagagctgaagctggtggctcccaccctgcgttctgaactcacggtggctgctgcagtcctggtgctgttggtgattgtgatcatctcacttattgtcctggttgtcatttggaaacagaaaccgaggtatgaaattcgctggagggtcattgaatcaatcagcccagatggacatgaatatatttatgtggacccgatgcagctgccttatgactcaagatgggagtttccaagagatggactagtgcttggtcgggtcttggggtctggagcgtttgggaaggtggttgaaggaacagcctatggattaagccggtcccaacctgtcatgaaagttgcagtgaagatgctaaaacccacggccagatccagtgaaaaacaagctctcatgtctgaactgaagataatgactcacctggggccacatttgaacattgtaaacttgctgggagcctgcaccaagtcaggccccatttacatcatcacagagtattgcttctatggagatttggtcaactatttgcataagaatagggatagcttcctgagccaccacccagagaagccaaagaaagagctggatatctttggattgaaccctgctgatgaaagcacacggagctatgttattttatcttttgaaaacaatggtgactacatggacatgaagcaggctgatactacacagtatgtccccatgctagaaaggaaagaggtttctaaatattccgacatccagagatcactctatgatcgtccagcctcatataagaagaaatctatgttagactcagaagtcaaaaacctcctttcagatgataactcagaaggccttactttattggatttgttgagcttcacctatcaagttgcccgaggaatggagtttttggcttcaaaaaattgtgtccaccgtgatctggctgctcgcaacgtcctcctggcacaaggaaaaattgtgaagatctgtgactttggcctggccagagacatcatgcatgattcgaactatgtgtcgaaaggcagtacctttctgcccgtgaagtggatggctcctgagagcatctttgacaacctctacaccacactgagtgatgtctggtcttatggcattctgctctgggagatcttttcccttggtggcaccccttaccccggcatgatggtggattctactttctacaataagatcaagagtgggtaccggatggccaagcctgaccacgctaccagtgaagtctacgagatcatggtgaaatgctggaacagtgagccggagaagagaccctccttttaccacctgagtgagattgtggagaatctgctgcctggacaatataaaaagagttatgaaaaaattcacctggacttcctgaagagtgaccatcctgctgtggcacgcatgcgtgtggactcagacaatgcatacattggtgtcacctacaaaaacgaggaagacaagctgaaggactgggagggtggtctggatgagcagagactgagcgctgacagtggctacatcattcctctgcctgacattgaccctgtccctgaggaggaggacctgggcaagaggaacagacacagctcgcagacctctgaagagagtgccattgagacgggttccagcagttccaccttcatcaagagagaggacgagaccattgaagacatcgacatgatggatgacatcggcatagactcttcagacctggtggaagacagcttcctgtaactggcggattcgaggggttccttccacttctggggccacctctggatcccgttcagaaaaccactttattgcaatgcagaggttgagaggaggacttggttgatgtttaaagagaagttcccagccaagggcctcggggagcgttctaaatatgaatgaatgggatattttgaaatgaactttgtcagtgttgcctcttgcaatgcctcagtagcatctcagtggtgtgtgaagtttggagatagatggataagggaataataggccacagaaggtgaactttgtgcttcaaggacattggtgagagtccaacagacacaatttatactgcgacagaacttcagcattgtaattatgtaaataactctaaccaaggctgtgtttagattgtattaactatcttctttggacttctgaagagaccactcaatccatccatgtacttccctcttgaaacctgatgtcagctgctgttgaactttttaaagaagtgcatgaaaaaccatttttgaaccttaaaaggtactggtactatagcattttgctatcttttttagtgttaaagagataaagaataataattaaccaaccttgtttaatagatttgggtcatttagaagcctgacaactcattttcatattgtaatctatgtttataatactactactgttatcagtaatgctaaatgtgtaataatgtaacatgatttccctccagagaaagcacaatttaaaacaatccttactaagtaggtgatgagtttgacagtttttgacatttatattaaataacatgtttctctataaagtatggtaatagctttagtgaattaaatttagttgagcatagagaacaaagtaaaagtagtgttgtccaggaagtcagaatttttaactgtactgaataggttccccaatccatcgtattaaaaaacaattaactgccctctgaaataatgggattagaaacaaacaaaactcttaagtcctaaaagttctcaatgtagaggcataaacctgtgctgaacataacttctcatgtatattacccaatggaaaatataatgatcagcaaaaagactggatttgcagaagttttttttttttttttcttcatgcctgatgaaagctttggcgaccccaatatatgtattttttgaatctatgaacctgaaaagggtcagaaggatgcccagacatcagcctccttctttcaccccttaccccaaagagaaagagtttgaaactcgagaccataaagatattctttagtggaggctggatgtgcattagcctggatcctcagttctcaaatgtgtgtggcagccaggatgactagatcctgggtttccatccttgagattctgaagtatgaagtctgagggaaaccagagtctgtatttttctaaactccctggctgttctgatcggccagttttcggaaacactgacttaggtttcaggaagttgccatgggaaacaaataatttgaactttggaacagggttggcattcaaccacgcaggaagcctactatttaaatccttggcttcaggttagtgacatttaatgccatctagctagcaattgcgaccttaatttaactttccagtcttagctgaggctgagaaagctaaagtttggttttgacaggttttccaaaagtaaagatgctacttcccactgtatgggggagattgaactttccccgtctcccgtcttctgcctcccactccataccccgccaaggaaaggcatgtacaaaaattatgcaattcagtgttccaagtctctgtgtaaccagctcagtgttttggtggaaaaaacattttaagttttactgataatttgaggttagatgggaggatgaattgtcacatctatccacactgtcaaacaggttggtgtgggttcattggcattctttgcaatactgcttaattgctgataccatatgaatgaaacatgggctgtgattactgcaatcactgtgctatcggcagatgatgctttggaagatgcagaagcaataataaagtacttgactacctactggtgtaatctcaatgcaagccccaactttcttatccaactttttcatagtaagtgcgaagactgagccagattggccaattaaaaacgaaaacctgactaggttctgtagagccaattagacttgaaatacgtttgtgtttctagaatcacagctcaagcattctgtttatcgctcactctcccttgtacagccttattttgttggtgctttgcattttgatattgctgtgagccttgcatgacatcatgaggccggatgaaacttctcagtccagcagtttccagtcctaacaaatgctcccacctgaatttgtatatgactgcatttgtgtgtgtgtgtgtgttttcagcaaattccagatttgtttccttttggcctcctgcaaagtctccagaagaaaatttgccaatctttcctactttctatttttatgatgacaatcaaagccggcctgagaaacactatttgtgactttttaaacgattagtgatgtccttaaaatgtggtctgccaatctgtacaaaatggtcctatttttgtgaagagggacataagataaaatgatgttatacatcaatatgtatatatgtatttctatatagacttggagaatactgccaaaacatttatgacaagctgtatcactgccttcgtttatatttttttaactgtgataatccccacaggcacattaactgttgcacttttgaatgtccaaaatttatattttagaaataataaaaagaaagatacttacatgttcccaaaacaatggtgtggtgaatgtgtgagaaaaactaacttgatagggtctaccaatacaaaatgtattacgaatgcccctgttcatgtttttgttttaaaacgtgtaaatgaagatctttatatttcaataaatgatatataatttaaagttata

SEQ ID NO: 3172 - DNA, 586 bp, Homo sapiens
  source 1..586: mol_type = genomic DNA
gacaggttttaaatgagtgttttcattcctcgcctgcggtttggcgggacagcgctgcagcccatggtgtggagcgcggctgggggaccagggggagtttcccagagctatggggacttcccatccggcgttcctggtcttaggctgtcttctcacagggctgagcctaatcctctgccagctttcattaccctctatccttccaaatgaaaatgaaaaggttgtgcagctgaattcatccttttctctgagatgctttggggagagtgaagtgagctggcagtaccccatgtctgaagaagagagctccgatgtggaaatcagaaatgaagaaaacaacagcggcctttttgtgacggtcttggaagtgagcagtgcctcggcggcccacacagggttgtacacttgctattacaaccacactcagacagaagagaatgagcttgaaggcaggcacatttacatctatgtgccagacccagatgtagcctttgtacctctaggaatgacggattatttagtcatcgtggaggatgatgattctgccattataccttgtcgcacaactgatcccgagactcctgta

SEQ ID NO: 3173 - DNA, 771 bp, Homo sapiens
  source 1..771: mol_type = genomic DNA
catttggccctgagtgaagaagtcgtcgtcgcctcgcattccagcaactgggatttgaggaatttcgaaccgcacaccaaggggccctcattgtgctccgtggcccccgcccccgcctgtcttcccgcgccccctcctcggtggaatcatttctgcattgcccgggggctctgctttcgctcagttctggccgcaggcaggaagagaggaaaggtctccaggaaggtgccgaacttcttgtgaggaagttagggacgacttggaactggggaaacttgtttgcagtttcccagagctatggggacttcccatccggcgttcctggtcttaggctgtcttctcacagggctgagcctaatcctctgccagctttcattaccctctatccttccaaatgaaaatgaaaaggttgtgcagctgaattcatccttttctctgagatgctttggggagagtgaagtgagctggcagtaccccatgtctgaagaagagagctccgatgtggaaatcagaaatgaagaaaacaacagcggcctttttgtgacggtcttggaagtgagcagtgcctcggcggcccacacagggttgtacacttgctattacaaccacactcagacagaagagaatgagcttgaaggcaggcacatttacatctatgtgccagacccagatgtagcctttgtacctctaggaatgacggattatttagtcatcgtggaggatgatgattctgccattataccttgtcgcacaactgatcccgagactcct

SEQ ID NO: 3174 - DNA, 2202 bp, Homo sapiens
  source 1..2202: mol_type = genomic DNA
ggtttttgagcccattactgttggagctacagggagagaaacagaggaggagactgcaagagatcattggaggccgtgggcacgctctttactccatgtgtgggacattcattgcggaataacatcggaggagaagtttcccagagctatggggacttcccatccggcgttcctggtcttaggctgtcttctcacagggctgagcctaatcctctgccagctttcattaccctctatccttccaaatgaaaatgaaaaggttgtgcagctgaattcatccttttctctgagatgctttggggagagtgaagtgagctggcagtaccccatgtctgaagaagagagctccgatgtggaaatcagaaatgaagaaaacaacagcggcctttttgtgacggtcttggaagtgagcagtgcctcggcggcccacacagggttgtacacttgctattacaaccacactcagacagaagagaatgagcttgaaggcaggcacatttacatctatgtgccagacccagatgtagcctttgtacctctaggaatgacggattatttagtcatcgtggaggatgatgattctgccattataccttgtcgcacaactgatcccgagactcctgtaaccttacacaacagtgagggggtggtacctgcctcctacgacagcagacagggctttaatgggaccttcactgtagggccctatatctgtgaggccaccgtcaaaggaaagaagttccagaccatcccatttaatgtttatgctttaaaaggtacttgtatcatctccttccttctttaaataagagtaacaggcaaaatcataaggtgcgtgtaggatttttttttttttttaaatcatcatcactggtgatcctaaattctgatttggggatttaggaccccagctaatacaatgtctgtggctataataataagcttaaaattactaaaggccaaagcttgattacccatgcaagatttcatgtttcatcagttgacttcaaaatactgtaaggaattcttttcttacataagcctcttactttcattcacattcctgactatggcggccctaaaaacaaacatacacccagggggttagatgcctagattaattttagtaacttaagaaaagtgatttgaagaaagtagtttagacttcaaccctttgatgtccacagttagtacgcttggggaagtataatacatgctgaggtcaacagatatttcctgaacactatattacatggaggaatgggtagcagcaagagtacactgttttaaaatcagagcacagctaattttgtgccaggcactgtgctaggttctgggaaagtactgagaataactgaggagcagagtggaagagaagaagagaagaaacaattggatagaaacaaagtgtctagagcagtgtggatcagcaaatgttggttgattaaatgaataaatttattagtcaaggagattgtggacgagtataaccataactaacccactgctgaggaatgcggtgttctgtttgattggaatttatttttattgttattattttgtaattctgtattataactatatgcctaattgttgtacaccatctcacaatcaagccttgtgagattttccaaattttatcttgatcaaactggtttgcaaattatttttcagggttttcttaaaaaaaaaaaaaaaaacccaaactttataagatcctggctatcctgtggatttttaggcccttgtatttgttcttttttatagcaacatcagagctggatctagaaatggaagctcttaaaaccgtgtataagtcaggggaaacgattgtggtcacctgtgctgtttttaacaatgaggtggttgaccttcaatggacttaccctggagaagtggtaggtaccctcaaaacgtgcaatggcttggagcagagcaacagggctcagaagacctgcatttgagctcggtctgtcactgatgggcacatcactgagtttctctagaccttagcttcccacctctgggatgaacacatttgattaaatggcctttaggactccttgatcaatgggagagtttgaaatgatagttcctggaccaggcccttcagaatacataaagagtgtgccgtaagccttctttttcagaagtcagacagaaataggaaggttctctggctacaagatatcaaccaaaaaa

SEQ ID NO: 3175 - DNA, 573 bp, Homo sapiens
  source 1..573: mol_type = genomic DNA
gaggttggagccaagatggctgaataggaacagctccggtctacagctcccagcatcagcgatgcagaagatgggtgatttctgcatttccatctgagtttcccagagctatggggacttcccatccggcgttcctggtcttaggctgtcttctcacagggctgagcctaatcctctgccagctttcattaccctctatccttccaaatgaaaatgaaaaggttgtgcagctgaattcatccttttctctgagatgctttggggagagtgaagtgagctggcagtaccccatgtctgaagaagagagctccgatgtggaaatcagaaatgaagaaaacaacagcggcctttttgtgacggtcttggaagtgagcagtgcctcggcggcccacacagggttgtacacttgctattacaaccacactcagacagaagagaatgagcttgaaggcaggcacatttacatctatgtgccagacccagatgtagcctttgtacctctaggaatgacggattatttagtcatcgtggaggatgatgattctgccattataccttgtcgcacaactgatc

SEQ ID NO: 3176 - DNA, 5717 bp, Homo sapiens
  source 1..5717: mol_type = genomic DNA
gctcctgaggctgccagcagccagcagtgactgcccgccctatctgggacccaggatcgctctgtgagcaacttggagccagagaggagatcaacaaggaggaggagagagccggcccctcagccctgctgcccagcagcagcctgtgctcgccctgcccaacgcagacagccagacccagggcggcccctctggcggctctgctcctcccgaaggatgcttggggagtgaggcgaagctgggccgctcctctcccctacagcagcccccttcctccatccctctgttctcctgagccttcaggagcctgcaccagtcctgcctgtccttctactcagctgttacccactctgggaccagcagtctttctgataactgggagagggcagtaaggaggacttcctggagggggtgactgtccagagcctggaactgtgcccacaccagaagccatcagcagcaaggacaccatgcggcttccgggtgcgatgccagctctggccctcaaaggcgagctgctgttgctgtctctcctgttacttctggaaccacagatctctcagggcctggtcgtcacacccccggggccagagcttgtcctcaatgtctccagcaccttcgttctgacctgctcgggttcagctccggtggtgtgggaacggatgtcccaggagcccccacaggaaatggccaaggcccaggatggcaccttctccagcgtgctcacactgaccaacctcactgggctagacacgggagaatacttttgcacccacaatgactcccgtggactggagaccgatgagcggaaacggctctacatctttgtgccagatcccaccgtgggcttcctccctaatgatgccgaggaactattcatctttctcacggaaataactgagatcaccattccatgccgagtaacagacccacagctggtggtgacactgcacgagaagaaaggggacgttgcactgcctgtcccctatgatcaccaacgtggcttttctggtatctttgaggacagaagctacatctgcaaaaccaccattggggacagggaggtggattctgatgcctactatgtctacagactccaggtgtcatccatcaacgtctctgtgaacgcagtgcagactgtggtccgccagggtgagaacatcaccctcatgtgcattgtgatcgggaatgaggtggtcaacttcgagtggacatacccccgcaaagaaagtgggcggctggtggagccggtgactgacttcctcttggatatgccttaccacatccgctccatcctgcacatccccagtgccgagttagaagactcggggacctacacctgcaatgtgacggagagtgtgaatgaccatcaggatgaaaaggccatcaacatcaccgtggttgagagcggctacgtgcggctcctgggagaggtgggcacactacaatttgctgagctgcatcggagccggacactgcaggtagtgttcgaggcctacccaccgcccactgtcctgtggttcaaagacaaccgcaccctgggcgactccagcgctggcgaaatcgccctgtccacgcgcaacgtgtcggagacccggtatgtgtcagagctgacactggttcgcgtgaaggtggcagaggctggccactacaccatgcgggccttccatgaggatgctgaggtccagctctccttccagctacagatcaatgtccctgtccgagtgctggagctaagtgagagccaccctgacagtggggaacagacagtccgctgtcgtggccggggcatgccccagccgaacatcatctggtctgcctgcagagacctcaaaaggtgtccacgtgagctgccgcccacgctgctggggaacagttccgaagaggagagccagctggagactaacgtgacgtactgggaggaggagcaggagtttgaggtggtgagcacactgcgtctgcagcacgtggatcggccactgtcggtgcgctgcacgctgcgcaacgctgtgggccaggacacgcaggaggtcatcgtggtgccacactccttgccctttaaggtggtggtgatctcagccatcctggccctggtggtgctcaccatcatctcccttatcatcctcatcatgctttggcagaagaagccacgttacgagatccgatggaaggtgattgagtctgtgagctctgacggccatgagtacatctacgtggaccccatgcagctgccctatgactccacgtgggagctgccgcgggaccagcttgtgctgggacgcaccctcggctctggggcctttgggcaggtggtggaggccacggctcatggcctgagccattctcaggccacgatgaaagtggccgtcaagatgcttaaatccacagcccgcagcagtgagaagcaagcccttatgtcggagctgaagatcatgagtcaccttgggccccacctgaacgtggtcaacctgttgggggcctgcaccaaaggaggacccatctatatcatcactgagtactgccgctacggagacctggtggactacctgcaccgcaacaaacacaccttcctgcagcaccactccgacaagcgccgcccgcccagcgcggagctctacagcaatgctctgcccgttgggctccccctgcccagccatgtgtccttgaccggggagagcgacggtggctacatggacatgagcaaggacgagtcggtggactatgtgcccatgctggacatgaaaggagacgtcaaatatgcagacatcgagtcctccaactacatggccccttacgataactacgttccctctgcccctgagaggacctgccgagcaactttgatcaacgagtctccagtgctaagctacatggacctcgtgggcttcagctaccaggtggccaatggcatggagtttctggcctccaagaactgcgtccacagagacctggcggctaggaacgtgctcatctgtgaaggcaagctggtcaagatctgtgactttggcctggctcgagacatcatgcgggactcgaattacatctccaaaggcagcacctttttgcctttaaagtggatggctccggagagcatcttcaacagcctctacaccaccctgagcgacgtgtggtccttcgggatcctgctctgggagatcttcaccttgggtggcaccccttacccagagctgcccatgaacgagcagttctacaatgccatcaaacggggttaccgcatggcccagcctgcccatgcctccgacgagatctatgagatcatgcagaagtgctgggaagagaagtttgagattcggccccccttctcccagctggtgctgcttctcgagagactgttgggcgaaggttacaaaaagaagtaccagcaggtggatgaggagtttctgaggagtgaccacccagccatccttcggtcccaggcccgcttgcctgggttccatggcctccgatctcccctggacaccagctccgtcctctatactgccgtgcagcccaatgagggtgacaacgactatatcatccccctgcctgaccccaaacccgaggttgctgacgagggcccactggagggttcccccagcctagccagctccaccctgaatgaagtcaacacctcctcaaccatctcctgtgacagccccctggagccccaggacgaaccagagccagagccccagcttgagctccaggtggagccggagccagagctggaacagttgccggattcggggtgccctgcgcctcgggcggaagcagaggatagcttcctgtagggggctggcccctaccctgccctgcctgaagctccccccctgccagcacccagcatctcctggcctggcctgaccgggcttcctgtcagccaggctgcccttatcagctgtccccttctggaagctttctgctcctgacgtgttgtgccccaaaccctggggctggcttaggaggcaagaaaactgcaggggccgtgaccagccctctgcctccagggaggccaactgactctgagccagggttcccccagggaactcagttttcccatatgtaaaatgggaaagttaggcttgatgacccagaatctaggattctctccctggctgacaggtggggagaccgaatccctccctgggaagattcttggagttactgaggtggtaaattaacttttttctgttcagccagctacccctcaaggaatcatagctctctcctcgcacttttatccacccaggagctagggaagagaccctagcctccctggctgctggctgagctagggcctagccttgagcagtgttgcctcatccagaagaaagccagtctcctccctatgatgccagtccctgcgttccctggcccgagctggtctggggccattaggcagcctaattaatgctggaggctgagccaagtacaggacacccccagcctgcagcccttgcccagggcacttggagcacacgcagccatagcaagtgcctgtgtccctgtccttcaggcccatcagtcctggggctttttctttatcaccctcagtcttaatccatccaccagagtctagaaggccagacgggccccgcatctgtgatgagaatgtaaatgtgccagtgtggagtggccacgtgtgtgtgccagtatatggccctggctctgcattggacctgctatgaggctttggaggaatccctcaccctctctgggcctcagtttccccttcaaaaaatgaataagtcggacttattaactctgagtgccttgccagcactaacattctagagtattccaggtggttgcacatttgtccagatgaagcaaggccatataccctaaacttccatcctgggggtcagctgggctcctgggagattccagatcacacatcacactctggggactcaggaaccatgccccttccccaggcccccagcaagtctcaagaacacagctgcacaggccttgacttagagtgacagccggtgtcctggaaagcccccagcagctgccccagggacatgggaagaccacgggacctctttcactacccacgatgacctccgggggtatcctgggcaaaagggacaaagagggcaaatgagatcacctcctgcagcccaccactccagcacctgtgccgaggtctgcgtcgaagacagaatggacagtgaggacagttatgtcttgtaaaagacaagaagcttcagatgggtaccccaagaaggatgtgagaggtgggcgctttggaggtttgcccctcacccaccagctgccccatccctgaggcagcgctccatgggggtatggttttgtcactgcccagacctagcagtgacatctcattgtccccagcccagtgggcattggaggtgccaggggagtcagggttgtagccaagacgcccccgcacggggagggttgggaagggggtgcaggaagctcaacccctctgggcaccaaccctgcattgcaggttggcaccttacttccctgggatccccagagttggtccaaggagggagagtgggttctcaatacggtaccaaagatataatcacctaggtttacaaatatttttaggactcacgttaactcacatttatacagcagaaatgctattttgtatgctgttgagtttttctatctgtgtacttttttttaagggaaagattttaatattaaacctggtgcttctcactcacaga

SEQ ID NO: 3177 - DNA, 568 bp, Homo sapiens
  source 1..568: mol_type = genomic DNA
attggaactgtcacccggaggacaggctgtcagagctggacaccatgcggcttccgggtgcgatgccagctctggccctcaaaggcgagctgctgttgctgtctctcctgttacttctggaaccacagatctctcagggcctggtcgtcacacccccggggccagagcttgtcctcaatgtctccagcaccttcgttctgacctgctcgggttcagctccggtggtgtgggaacggatgtcccaggagcccccacaggaaatggccaaggcccaggatggcaccttctccagcgtgctcacactgaccaacctcactgggctagacacgggagaatacttttgcacccacaatgactcccgtggactggagaccgatgagcggaaacggctctacatctttgtgccagatcccaccgtgggcttcctccctaatgatgccgaggaactattcatctttctcacggaaataactgagatcaccattccatgccgagtaacagacccacagctggtggtgacactgcacgagaagaaaggggacgttgcactgcctgtcccctatgatca

SEQ ID NO: 3178 - DNA, 4252 bp, Homo sapiens
  source 1..4252: mol_type = genomic DNA
gctgcatcggagccggacactgcaggtagtgttcgaggcctacccaccgcccactgtcctgtggttgacaaccgcaccctgggcgactccagcgctggcgaaatcgccctgtccacgcgcaacgtgtcggagacccggtatgtgtcagagctgacactggttcgcgtgaaggtggcagaggctggccactacaccatgcgggccttccatgaggatgctgaggtccagctctccttccagctacagatcaatgtccctgtccgagtgctggagctaagtgagagccaccctgacagtggggaacagacagtccgctgtcgtggccggggcatgccccagccgaacatcatctggtctgcctgcagagacctcaaaaggtgtccacgtgagctgccgcccacgctgctggggaacagttccgaagaggagagccagctggagactaacgtgacgtactgggaggaggagcaggagtttgaggtggtgagcacactgcgtctgcagcacgtggatcggccactgtcggtgcgctgcacgctgcgcaacgctgtgggccaggacacgcaggaggtcatcgtggtgccacactccttgccctttaaggtggtggtgatctcagccatcctggccctggtggtgctcaccatcatctcccttatcatcctcatcatgctttggcagaagaagccacgttacgagatccgatggaaggtgattgagtctgtgagctctgacggccatgagtacatctacgtggaccccatgcagctgccctatgactccacgtgggagctgccgcgggaccagcttgtgctgggacgcaccctcggctctggggcctttgggcaggtggtggaggccacggctcatggcctgagccattctcaggccacgatgaaagtggccgtcaagatgcttaaatccacagcccgcagcagtgagaagcaagcccttatgtcggagctgaagatcatgagtcaccttgggccccacctgaacgtggtcaacctgttgggggcctgcaccaaaggaggacccatctatatcatcactgagtactgccgctacggagacctggtggactacctgcaccgcaacaaacacaccttcctgcagcaccactccgacaagcgccgcccgcccagcgcggagctctacagcaatgctctgcccgttgggctccccctgcccagccatgtgtccttgaccggggagagcgacggtggctacatggacatgagcaaggacgagtcggtggactatgtgcccatgctggacatgaaaggagacgtcaaatatgcagacatcgagtcctccaactacatggccccttacgataactacgttccctctgcccctgagaggacctgccgagcaactttgatcaacgagtctccagtgctaagctacatggacctcgtgggcttcagctaccaggtggccaatggcatggagtttctggcctccaagaactgcgtccacagagacctggcggctaggaacgtgctcatctgtgaaggcaagctggtcaagatctgtgactttggcctggctcgagacatcatgcgggactcgaattacatctccaaaggcagcacctttttgcctttaaagtggatggctccggagagcatcttcaacagcctctacaccaccctgagcgacgtgtggtccttcgggatcctgctctgggagatcttcaccttgggtggcaccccttacccagagctgcccatgaacgagcagttctacaatgccatcaaacggggttaccgcatggcccagcctgcccatgcctccgacgagatctatgagatcatgcagaagtgctgggaagagaagtttgagattcggccccccttctcccagctggtgctgcttctcgagagactgttgggcgaaggttacaaaaagaagtaccagcaggtggatgaggagtttctgaggagtgaccacccagccatccttcggtcccaggcccgcttgcctgggttccatggcctccgatctcccctggacaccagctccgtcctctatactgccgtgcagcccaatgagggtgacaacgactatatcatccccctgcctgaccccaaacccgaggttgctgacgagggcccactggagggttcccccagcctagccagctccaccctgaatgaagtcaacacctcctcaaccatctcctgtgacagccccctggagccccaggacgaaccagagccagagccccagcttgagctccaggtggagccggagccagagctggaacagttgccggattcggggtgccctgcgcctcgggcggaagcagaggatagcttcctgtagggggctggcccctaccctgccctgcctgaagctccccccctgccagcacccagcatctcctggcctggcctgaccgggcttcctgtcagccaggctgcccttatcagctgtccccttctggaagctttctgctcctgacgtgttgtgccccaaaccctggggctggcttaggaggcaagaaaactgcaggggccgtgaccagccctctgcctccagggaggccaactgactctgagccagggttcccccagggaactcagttttcccatatgtaaaatgggaaagttaggcttgatgacccagaatctaggattctctccctggctgacaggtggggagaccgaatccctccctgggaagattcttggagttactgaggtggtaaattaacttttttctgttcagccagctacccctcaaggaatcatagctctctcctcgcacttttatccacccaggagctagggaagagaccctagcctccctggctgctggctgagctagggcctagccttgagcagtgttgcctcatccagaagaaagccagtctcctccctatgatgccagtccctgcgttccctggcccgagctggtctggggccattaggcagcctaattaatgctggaggctgagccaagtacaggacacccccagcctgcagcccttgcccagggcacttggagcacacgcagccatagcaagtgcctgtgtccctgtccttcaggcccatcagtcctggggctttttctttatcaccctcagtcttaatccatccaccagagtctagaaggccagacgggccccgcatctgtgatgagaatgtaaatgtgccagtgtggagtggccacgtgtgtgtgccagtatatggccctggctctgcattggacctgctatgaggctttggaggaatccctcaccctctctgggcctcagtttccccttcaaaaaatgaataagtcggacttattaactctgagtgccttgccagcactaacattctagagtattccaggtggttgcacatttgtccagatgaagcaaggccatataccctaaacttccatcctgggggtcagctgggctcctgggagattccagatcacacatcacactctggggactcaggaaccatgccccttccccaggcccccagcaagtctcaagaacacagctgcacaggccttgacttagagtgacagccggtgtcctggaaagcccccagcagctgccccagggacatgggaagaccacgggacctctttcactacccacgatgacctccgggggtatcctgggcaaaagggacaaagagggcaaatgagatcacctcctgcagcccaccactccagcacctgtgccgaggtctgcgtcgaagacagaatggacagtgaggacagttatgtcttgtaaaagacaagaagcttcagatgggtaccccaagaaggatgtgagaggtgggcgctttggaggtttgcccctcacccaccagctgccccatccctgaggcagcgctccatgggggtatggttttgtcactgcccagacctagcagtgacatctcattgtccccagcccagtgggcattggaggtgccaggggagtcagggttgtagccaagacgcccccgcacggggagggttgggaagggggtgcaggaagctcaacccctctgggcaccaaccctgcattgcaggttggcaccttacttccctgggatccccagagttggtccaaggagggagagtgggttctcaatacggtaccaaagatataatcacctaggtttacaaatatttttaggactcacgttaactcacatttatacagcagaaatgctattttgtatgctgttgagtttttctatctgtgtacttttttttaagggaaagattttaatattaaacctggtgcttctcactc

SEQ ID NO: 3179 - DNA, 1549 bp, Homo sapiens
  source 1..1549: mol_type = genomic DNA
gcgccagggaggcgtcgccctgccgcgtcggagctgcttcctgggcgccgtgggcgcggactgcgcgggctgcgcgggtgccgaggagcgcgaggcgcggggaaggcgcacctggggtggccctggcgtgcgggcggcgacatggaggacggcgtgctcaaggagggcttcctggtcaagaggggccacattgtccacaactggaaggcgcgatggttcatccttcggcagaacacgctggtgtactacaagcttgaggggggtcggagagtgacccctcccaagggccggatcctcctggatggctgcaccatcacctgcccctgcctggagtatgaaaaccgaccgctcctcattaagctgaagactcaaacatccacggagtacttcctggaggcctgttctcgagaggagcgggatgcctgggcctttgagatcaccggggctattcatgcagggcagccggggaaggtccagcagctgcacagcctgagaaactccttcaagctgcccccgcacatcagcctgcatcgcattgtggacaagatgcacgatagcaacaccggaatccgttcaagccccaacatggagcagggaagcacctataaaaagaccttcctcggctcctccctggtggactggctcatctccaacagcttcacggccagccgtctggaggcggtgaccctggcctccatgctcatggaggagaacttcctcaggcctgtgggtgtccgaagcatgggagccattcgctctggggatctggccgagcagttcctggatgactccacagccctgtacacttttgctgagagctacaaaaagaagataagccccaaggaagaaattagcctgagcactgtggagttaagtggcacggtggtgaaacaaggctacctggccaagcagggacacaagaggaaaaactggaaggtgcgtcgctttgttctaaggaaggatccagctttcctgcattactatgacccttccaaagaagagaacaggccagtgggtgggttttctcttcgtggttcactcgtgtctgctctggaagataatggcgttcccactggggttaaagggaatgtccagggaaacctcttcaaagtgattactaaggatgacacacactattacattcaggccagcagcaaggctgagcgagccgagtggattgaagctatcaaaaagctaacatgacaaggacctgagggaaccaggattcctccctcctaccagatgacacagacaagagttcctggagaatgggagtgttaagacttttgacttctttgtaagttttgtactgctttggagagtgaatgctgccaagagttcctcagattacaaacagcagtggtgccatttccttccccatcttcatgttacaaacctggaaaggctagaacagccattaggcgtcagcatcttgacttttccccagcatcacaaacagccatttcctcgggcaccaaagtaggttccctttgttggaacaattacactggccatgccataatgttgaataaaactctcttcttatgag

SEQ ID NO: 3180 - DNA, 2059 bp, Homo sapiens
  source 1..2059: mol_type = genomic DNA
gaattaggggaactcagaaatccatcccccaccccacggccctacctagaagacttaggaatgtgggtccccagcgccgccatctgagactccagagtcgaggctcctagcatcccctacgtagaacactgagaaattccgactgcgggaccccagtctccgagagaccccagattctattcctggagcctgagagcccgaagttcacgcccctgagtctgggctccgcacctccctggggaccgcgtcggggtcgcgcaggagccgggctgcctcgagccggggctggaggctccccgggaggactctgctgggccgctcagccatgcctgagggagcccaaggactgagcctctccaaacctagcccaagcctcgggtgtggccgaagaggtgaagtgtgtgactgtggcaccgtgtgtgagactcggacagctcctgcagcccccaccatggcctccccccgaggttctgggagctccacatccctgagcacagtgggctctgagggggatccagcccctgggcccactccagcctgctcagcctccaggccagagccccttccagggcctcccatccgcctacatctctctccggtggggatcccaggttcagccagaccctcaaggctggagcgtgtggcccgggagatcgtggagacagaacgggcctatgtcagggacctccgcagcatcgtggaggactacctgggccctctgctggacggcggggtcctggggctgagcgtggagcaggtgggcacgctgtttgccaacattgaggacatctacgagttcagcagcgagctcctggaggacttggagaacagcagcagcgccgggggtattgccgagtgcttcgtgcagaggagcgaggattttgacatctacacattgtactgcatgaactacccgagctccctggccctgctccgggagctgtcgttgtctccgccagcagccctgtggctgcaggagcgccaggcccagcttcgccactcgctgcccctgcagagcttcctgctgaaacctgtccagcgcattctcaagtaccatctgctgctgcaggaactagggaagcactgggcggagggcccaggcactgggggtcgcgagatggtggaggaagctattgtgtccatgacagcggttgcctggtacatcaacgacatgaagcgcaagcaggagcatgcagcgcgcctccaggaagtgcagcggcggctgggtggctggaccggaccagagctcagtgcttttggggaactggtgttggagggcgcgttccgaggaggcggagggggtggcccccggctacgagggggtgagcggctgctcttcctgttctctcggatgctgctggtggccaagcgcagggggctggagtacacctacaaaggccacatcttctgctgcaacctgagcgtgagcgagagtccccgagaccctctagggttcaaggtgtctgatctgaccattcccaagcacagacacctgctccaggccaagaaccaagaagagaagaggctgtggattcactgtctccagcgcctcttctttgagaaccaccctgcctccatccctgccaaggcaaagcaagttctccttgaaaacagcctgcattgtgcccccaaaagtaagcctgtcctagagcccctgacacccccacttgggtctcctcgacctcgagatgctagaagttttacccctgggcgaaggaacacagctccatctcctgggccctctgtgattcgccgaggccgcaggcagtctgagccggtgaaggacccttatgtcatgttcccacagaacgctaagcctggattcaagcacgctggcagcgaaggggaactctaccctccagaatctcagccaccagtttcaggctctgcaccccctgaggacctggaggatgctggacccccaacactggacccctctgggacctcaatcactgaagaaatcctggaactgctgaatcagcgaggccttcgagatccaggggaatctatgggccttcacagggcccagggggctcctgatgcccccttccacatgtga

SEQ ID NO: 3181 - DNA, 5231 bp, Homo sapiens
  source 1..5231: mol_type = genomic DNA
atgtgagccccggcgacagcgggggaggggaagccccgggcgaccgccccccgcctcacagctgggatcggactctcccgccccagatgtggcgccgccgccgtcacacgagccccgtgacacccagccgggagcccgaggggtccagaggctcggacccgggcgtccggaatttctgcaccgcatcctgagagaccccgaggtccagaccccggcgcccaggctggaggacttgagccatccaggtgcgcagcgccccctcctggagcagccgggagcccggacgtcaccccgcgagaccctggaggccgagcgccccgtatccccgtttcaagaactcaggatccaggaccgcagactccctccagggctccgatcccaagaccccgcgttggaggaacttgagatccggacttctaagcgccccaaccagtttcgggctgcagcggccatcgcttcaaggggacccaggactttgggacccccctgtgctcccacctggagggagtttcattcctgcccctagaattaggggaactcagaaatccatcccccaccccacggccctacctagaagacttaggaatgtgggtccccagcgccgccatctgagactccagagtcgaggctcctagcatcccctacgtagaacactgagaaattccgactgcgggaccccagtctccgagagaccccagattctattcctggagcctgagagcccgaagttcacgcccctgagtctgggctccgcacctccctggggaccgcgtcggggtcgcgcaggagccgggctgcctcgagccggggctggaggctccccgggaggactctgctgggccgctcagccatgcctgagggagcccaaggactgagcctctccaaacctagcccaagcctcgggtgtggccgaagaggtgaagtgtgtgactgtggcaccgtgtgtgagactcggacagctcctgcagcccccaccatggcctccccccgaggttctgggagctccacatccctgagcacagtgggctctgagggggatccagcccctgggcccactccagcctgctcagcctccaggccagagccccttccagggcctcccatccgcctacatctctctccggtggggatcccaggttcagccagaccctcaaggctggagcgtgtggcccgggagatcgtggagacagaacgggcctatgtcagggacctccgcagcatcgtggaggactacctgggccctctgctggacggcggggtcctggggctgagcgtggagcaggtgggcacgctgtttgccaacattgaggacatctacgagttcagcagcgagctcctggaggacttggagaacagcagcagcgccgggggtattgccgagtgcttcgtgcagaggagcgaggattttgacatctacacattgtactgcatgaactacccgagctccctggccctgctccgggagctgtcgttgtctccgccagcagccctgtggctgcaggagcgccaggcccagcttcgccactcgctgcccctgcagagcttcctgctgaaacctgtccagcgcattctcaagtaccatctgctgctgcaggaactagggaagcactgggcggagggcccaggcactgggggtcgcgagatggtggaggaagctattgtgtccatgacagcggttgcctggtacatcaacgacatgaagcgcaagcaggagcatgcagcgcgcctccaggaagtgcagcggcggctgggtggctggaccggaccagagctcagtgcttttggggaactggtgttggagggcgcgttccgaggaggcggagggggtggcccccggctacgagggggtgagcggctgctcttcctgttctctcggatgctgctggtggccaagcgcagggggctggagtacacctacaaaggccacatcttctgctgcaacctgagcgtgagcgagagtccccgagaccctctagggttcaaggtgtctgatctgaccattcccaagcacagacacctgctccaggccaagaaccaagaagagaagaggctgtggattcactgtctccagcgcctcttctttgagaaccaccctgcctccatccctgccaaggcaaagcaagttctccttgaaaacagcctgcattgtgcccccaaaagtaagcctgtcctagagcccctgacacccccacttgggtctcctcgacctcgagatgctagaagttttacccctgggcgaaggaacacagctccatctcctgggccctctgtgattcgccgaggccgcaggcagtctgagccggtgaaggacccttatgtcatgttcccacagaacgctaagcctggattcaagcacgctggcagcgaaggggaactctaccctccagaatctcagccaccagtttcaggctctgcaccccctgaggacctggaggatgctggacccccaacactggacccctctgggacctcaatcactgaagaaatcctggaactgctgaatcagcgaggccttcgagatccagggccgtccacccatgacattcccaagttccccggagactcccaggtgcctggcgacagcgaaaccctcacattccaagccctgcccagccgggactcttcagaagaggaggaggaggaagaggaagggctggagatggatgaacgggggccttccccactccacgtcctggaagggctcgaaagttccattgcagctgaaatgcccagcattccctgccttaccaaaattcctgacgtgcccaaccttcctgaaattcccagccgctgtgaaattcccgaaggttctcgccttcctagtctctctgacatttccgatgtttttgagatgccctgccttccagccatacctagtgtccccaacacccccagtctgtctagcactcccaccctctcctgtgactcctggctccaagggcctctgcaggaaccagctgaggctccagccaccaggagagaactgttttctgggagcaatcctgggaaactgggagagccgccttcaggaggcaaggcagggccagaggaggatgaagaaggggtatcattcacagacttccagccccaggatgtcacccaacatcagggattcccagatgagctggcattccgctcttgctcagaaatccggagcgcctggcaggcattggaacagggacagctggcccggccaggcttcccagagccactgctgatcctggaggattcggatctgggtggagacagcgggagcgggaaggcaggagccccgagttcagaaaggacggcgtcccgagtgcgagagctggcccggctttacagcgagcggatccagcagatgcagcgggcggagactcgggcatcagccaatgccccgcgccgccggcctcgggttctggcccaaccccagccatccccctgtctgccccaggagcaggcagagccagggctcctgcctgcctttggacacgtgctggtatgtgagctggccttcccactgacatgtgcccaggagtctgtccccctgggtcctgctgtctgggttcaagctgccatacctttgtcaaagcagggaggcagcccggatggccagggtctacatgtttccaatttgcctaagcaagaccttccgggcatccacgtttcagctgctacccttttgcctgagcaaggaggttcccggcatgtccaggctccagccgccacacctttgcccaagcaagaaggccccctgcacctccaggtgccggctcttacaactttctctgatcaaggccacccagaaatccaagttccagccaccactcctttgcctgagcatagaagtcacatggttataccagctccatccaccgccttttgtcctgagcagggacactgtgcggacatccacgttcccaccactccagctttgcccaaggagatttgttctgatttcacagtttcagtcaccacccctgtgcccaagcaagaaggtcacctagacagcgagagcccaaccaatatcccactgacaaagcaaggaggttccagggatgttcagggcccagaccctgtctgcagtcaacccatccagcctttgtcttggcatggaagcagcctggatccccagggcccaggcgacaccctaccacccttgccatgtcacctcccagaccttcagattccaggtacctcacctttgcctgcacatggaagccacctggaccatcggatcccagccaacgccccactgtctttgtcccaggagctcccagacactcaggttccagctaccacacctttgcccctgccacaagtcctcacagacatctgggtccaagccctcccaacttcacccaagcagggaagcctcccagacatccagggtccagcggctgcacctccacttccggagccaagccttacagatacacaggtccaaaaactcacaccttcgttggagcagaagagcctcatagatgcccatgttccagctgccacacctttacctgagagaggaggctctctagacattcagggcctctcacccaccccagttcagaccaccatggttttgtccaaaccaggaggctccttagcctctcacgttgccaggttggagtcttcagacttgacgccacctcatagtcccccaccttccagccgtcagctcctgggccccaatgcagctgccctctccagatacctggcagcctcatatatcagccagagcctggctcggcggcaggggcctgggggaggggcccccgcagcctcccggggctcctggtcctctgctcccacgtcacgggcatcttcgccgcccccccagccccagccaccacctcccccagccaggcggctcagctatgccacgacggttaacatccacgtgggcgggggtgggcggctgcggccagccaaggcccaggtccggttgaaccaccctgctctcttggcctccacacaggaatctatgggccttcacagggcccagggggctcctgatgcccccttccacatgtgagccaggacatgaggcttccctgaagcaaggatttcagccagatgccatagaccctcagaacttgacctggaagtccagacactgaacgcaggcctcaaaactgctgcggccttccaactcctggtatctgcatcggcgaatggcccttcttgccttgatccacagggatggggaagggaggaatgtcattaatgttttgttaatactgattctttcatgc

SEQ ID NO: 3182 - DNA, 2102 bp, Homo sapiens
  source 1..2102: mol_type = genomic DNA
agctggagcccaaacgttcccaggatccctaagcctccggccccagacaaacgggactcgcagcttctgcgcctcctgctccgctcactcttctttgtctcagcctttccatctttttcgccaggactctgctgggccgctcagccatgcctgagggagcccaaggactgagcctctccaaacctagcccaagcctcgggtgtggccgaagaggtgaagtgtgtgactgtggcaccgtgtgtgagactcggacagctcctgcagcccccaccatggcctccccccgaggttctgggagctccacatccctgagcacagtgggctctgagggggatccagcccctgggcccactccagcctgctcagcctccaggccagagccccttccagggcctcccatccgcctacatctctctccggtggggatcccaggttcagccagaccctcaaggctggagcgtgtggcccgggagatcgtggagacagaacgggcctatgtcagggacctccgcagcatcgtggaggactacctgggccctctgctggacggcggggtcctggggctgagcgtggagcaggtgggcacgctgtttgccaacattgaggacatctacgagttcagcagcgagctcctggaggacttggagaacagcagcagcgccgggggtattgccgagtgcttcgtgcagaggagcgaggattttgacatctacacattgtactgcatgaactacccgagctccctggccctgctccgggagctgtcgttgtctccgccagcagccctgtggctgcaggagcgccaggcccagcttcgccactcgctgcccctgcagagcttcctgctgaaacctgtccagcgcattctcaagtaccatctgctgctgcaggaactagggaagcactgggcggagggcccaggcactgggggtcgcgagatggtggaggaagctattgtgtccatgacagcggttgcctggtacatcaacgacatgaagcgcaagcaggagcatgcagcgcgcctccaggaagtgcagcggcggctgggtggctggaccggaccagagctcagtgcttttggggaactggtgttggagggcgcgttccgaggaggcggagggggtggcccccggctacgagggggtgagcggctgctcttcctgttctctcggatgctgctggtggccaagcgcagggggctggagtacacctacaaaggccacatcttctgctgcaacctgagcgtgagcgagagtccccgagaccctctagggttcaaggtgtctgatctgaccattcccaagcacagacacctgctccaggccaagaaccaagaagagaagaggctgtggattcactgtctccagcgcctcttctttgagaaccaccctgcctccatccctgccaaggcaaagcaagttctccttgaaaacagcctgcattgtgcccccaaaagtaagcctgtcctagagcccctgacacccccacttgggtctcctcgacctcgagatgctagaagttttacccctgggcgaaggaacacagctccatctcctgggccctctgtgattcgccgaggccgcaggcagtctgagccggtgaaggacccttatgtcatgttcccacagaacgctaagcctggattcaagcacgctggcagcgaaggggaactctaccctccagaatctcagccaccagtttcaggctctgcaccccctgaggacctggaggatgctggacccccaacactggacccctctgggacctcaatcactgaagaaatcctggaactgctgaatcagcgaggccttcgagatccaggggaatctatgggccttcacagggcccagggggctcctgatgcccccttccacatgtgagccaggacatgaggcttccctgaagcaaggatttcagccagatgccatagaccctcagaacttgacctggaagtccagacactgaacgcaggcctcaaaactgctgcggccttccaactcctggtatctgcatcggcgaatggcccttcttgccttgatccacagggatggggaagggaggaatgtcattaatgttttgttaatactgattctttcatgcaa

SEQ ID NO: 3183 - DNA, 7519 bp, Homo sapiens
  source 1..7519: mol_type = genomic DNA
gaattaggggaactcagaaatccatcccccaccccacggccctacctagaagacttaggaatgtgggtccccagcgccgccatctgagactccagagtcgaggctcctagcatcccctacgtagaacactgagaaattccgactgcgggaccccagtctccgagagaccccagattctattcctggagcctgagagcccgaagttcacgcccctgagtctgggctccgcacctccctggggaccgcgtcggggtcgcgcaggagccgggctgcctcgagccggggctggaggctccccgggaggactctgctgggccgctcagccatgcctgagggagcccaaggactgagcctctccaaacctagcccaagcctcgggtgtggccgaagaggtgaagtgtgtgactgtggcaccgtgtgtgagactcggacagctcctgcagcccccaccatggcctccccccgaggttctgggagctccacatccctgagcacagtgggctctgagggggatccagcccctgggcccactccagcctgctcagcctccaggccagagccccttccagggcctcccatccgcctacatctctctccggtggggatcccaggttcagccagaccctcaaggctggagcgtgtggcccgggagatcgtggagacagaacgggcctatgtcagggacctccgcagcatcgtggaggactacctgggccctctgctggacggcggggtcctggggctgagcgtggagcaggtgggcacgctgtttgccaacattgaggacatctacgagttcagcagcgagctcctggaggacttggagaacagcagcagcgccgggggtattgccgagtgcttcgtgcagaggagcgaggattttgacatctacacattgtactgcatgaactacccgagctccctggccctgctccgggagctgtcgttgtctccgccagcagccctgtggctgcaggagcgccaggcccagcttcgccactcgctgcccctgcagagcttcctgctgaaacctgtccagcgcattctcaagtaccatctgctgctgcaggaactagggaagcactgggcggagggcccaggcactgggggtcgcgagatggtggaggaagctattgtgtccatgacagcggttgcctggtacatcaacgacatgaagcgcaagcaggagcatgcagcgcgcctccaggaagtgcagcggcggctgggtggctggaccggaccagagctcagtgcttttggggaactggtgttggagggcgcgttccgaggaggcggagggggtggcccccggctacgagggggtgagcggctgctcttcctgttctctcggatgctgctggtggccaagcgcagggggctggagtacacctacaaaggccacatcttctgctgcaacctgagcgtgagcgagagtccccgagaccctctagggttcaaggtgtctgatctgaccattcccaagcacagacacctgctccaggccaagaaccaagaagagaagaggctgtggattcactgtctccagcgcctcttctttgagaaccaccctgcctccatccctgccaaggcaaagcaagttctccttgaaaacagcctgcattgtgcccccaaaagtaagcctgtcctagagcccctgacacccccacttgggtctcctcgacctcgagatgctagaagttttacccctgggcgaaggaacacagctaagcctggattcaagcacgctggcagcgaaggggaactctaccctccagaatctcagccaccagtttcaggctctgcaccccctgaggacctggaggatgctggacccccaacactggacccctctgggacctcaatcactgaagaaatcctggaactgctgaatcagcgaggccttcgagatccagggccgtccacccatgacattcccaagttccccggagactcccaggtgcctggcgacagcgaaaccctcacattccaagccctgcccagccgggactcttcagaagaggaggaggaggaagaggaagggctggagatggatgaacgggggccttccccactccacgtcctggaagggctcgaaagttccattgcagctgaaatgcccagcattccctgccttaccaaaattcctgacgtgcccaaccttcctgaaattcccagccgctgtgaaattcccgaaggttctcgccttcctagtctctctgacatttccgatgtttttgagatgccctgccttccagccatacctagtgtccccaacacccccagtctgtctagcactcccaccctctcctgtgactcctggctccaagggcctctgcaggaaccagctgaggctccagccaccaggagagaactgttttctgggagcaatcctgggaaactgggagagccgccttcaggaggcaaggcagggccagaggaggatgaagaaggggtatcattcacagacttccagccccaggatgtcacccaacatcagggattcccagatgagctggcattccgctcttgctcagaaatccggagcgcctggcaggcattggaacagggacagctggcccggccaggcttcccagagccactgctgatcctggaggattcggatctgggtggagacagcgggagcgggaaggcaggagccccgagttcagaaaggacggcgtcccgagtgcgagagctggcccggctttacagcgagcggatccagcagatgcagcgggcggagactcgggcatcagccaatgccccgcgccgccggcctcgggttctggcccaaccccagccatccccctgtctgccccaggagcaggcagagccagggctcctgcctgcctttggacacgtgctggtatgtgagctggccttcccactgacatgtgcccaggagtctgtccccctgggtcctgctgtctgggttcaagctgccatacctttgtcaaagcagggaggcagcccggatggccagggtctacatgtttccaatttgcctaagcaagaccttccgggcatccacgtttcagctgctacccttttgcctgagcaaggaggttcccggcatgtccaggctccagccgccacacctttgcccaagcaagaaggccccctgcacctccaggtgccggctcttacaactttctctgatcaaggccacccagaaatccaagttccagccaccactcctttgcctgagcatagaagtcacatggttataccagctccatccaccgccttttgtcctgagcagggacactgtgcggacatccacgttcccaccactccagctttgcccaaggagatttgttctgatttcacagtttcagtcaccacccctgtgcccaagcaagaaggtcacctagacagcgagagcccaaccaatatcccactgacaaagcaaggaggttccagggatgttcagggcccagaccctgtctgcagtcaacccatccagcctttgtcttggcatggaagcagcctggatccccagggcccaggcgacaccctaccacccttgccatgtcacctcccagaccttcagattccaggtacctcacctttgcctgcacatggaagccacctggaccatcggatcccagccaacgccccactgtctttgtcccaggagctcccagacactcaggttccagctaccacacctttgcccctgccacaagtcctcacagacatctgggtccaagccctcccaacttcacccaagcagggaagcctcccagacatccagggtccagcggctgcacctccacttccggagccaagccttacagatacacaggtccaaaaactcacaccttcgttggagcagaagagcctcatagatgcccatgttccagctgccacacctttacctgagagaggaggctctctagacattcagggcctctcacccaccccagttcagaccaccatggttttgtccaaaccaggaggctccttagcctctcacgttgccaggttggagtcttcagacttgacgccacctcatagtcccccaccttccagccgtcagctcctgggccccaatgcagctgccctctccagatacctggcagcctcatatatcagccagagcctggctcggcggcaggggcctgggggaggggcccccgcagcctcccggggctcctggtcctctgctcccacgtcacgggcatcttcgccgcccccccagccccagccaccacctcccccagccaggcggctcagctatgccacgacggttaacatccacgtgggcgggggtgggcggctgcggccagccaaggcccaggtccggttgaaccaccctgctctcttggcctccacacaggaatctatgggccttcacagggcccagggggctcctgatgcccccttccacatgtgagccaggacatgaggcttccctgaagcaaggatttcagccagatgccatagaccctcagaacttgacctggaagtccagacactgaacgcaggcctcaaaactgctgcggccttccaactcctggtatctgcatcggcgaatggcccttcttgccttgatccacagggatggggaagggaggaatgtcattaatgttttgttaatactgattctttcatgcaatgatgtgtattttcccattctggaggctgtgggagatgacaagacaatgaatgggaaggtctgacacagaacaaatcagcggttctgaaagcttggggaatctcagactcctttgagaattattggaaaatggacccactataacttggcgtgtgtgtgaactgcttgatgcccatccaggaaagccaagttaagaagctttgcttcaagtagacactagaaatccattcccttggcaatttatacagttcacgtctcccaccatccgttcatctcacccaccctgccatctctccacctatccatctggctattgctccatctagctttcccgctccatctacccatcttccaatccatcatctcacgtatctgccttgcttatccaactgtctgccttattcacccacccatccctttatcattctaaccccatctggcattccatccctccatttatccatcttcccacttacccatcttctccatccagcactccgttcatcagtccgtctctccctccatatttccatctgtccattcatccactcattttgccatccatacatattcacccagccatctcccaatccatcgacataccccatccctccctcactggactctccggggtcttagtactatgatacttcagagacaattccatgctgatacgggggagatcaattttggggctctgggataagtctgtcccacatctgtctgatttcccttggcatccttcccgtcagttcctcttgaatatcccagttcttgtacccactcacatacctcagatcccttcactcctccccgcagtttgcagcctctacaattcatccacatgctccctcccccagcaaaataattcaggtcgtggagacaaaaggcttttatgttaggttctgtctgcccccttgttccagcagtggtatgcccagtgagaggcacaatttaaacggtttctttggtgatgatattagctactttcatcaaatacttagcctcttgtgctttagcacattatttatgtaagctcccctaggattctctgaagcaccctggtgtcctggctgtgaattcaagtcccatctttacttatttggtgtgggtcctccctctgagccggttttctcatctacaaaatgaagacaacagtacttccctcctgggatcattgaaagatttagggagcatatccttccacttcccaaacatatttgaacctctgacttgcttaggagcatcattcaaatcacagatcccccagtatctagtcccaacctattgaatcaggatccccagggaaggaggagcttgggaatctgatttttttttttttttttagataaagtctcactctgtcacccaggcttgagtgcagtggcaaaatcttggctcattgcaacctccacctcctgggttcaagcaattctcatgcctcagcttcccgacatagctgggattataggcgtgcaccaccatgcccagctaatttttcgttgttgttgttgttgttttgtttttgagacagagtctcgctctgttgcccaggctggagtacagtggcacgatcttggctcactgcaagctccgcttcccgggttcacgccattctcctgcctcagcctcccgagtagctgggaccacaggtgcccgccaccacgcccggctaatttttttggtatttttagtagagacggggttttaccatgttagccaggatggtctcgatctcctgacctcgtgatcctcccgcctcggcctcccaaagtgctggcattacaggcgtgagccatcattcctggctgggaatccgaatttttttttttttttagacggagtttcgctcttgttgcccaggctggagttcaatagcatgatctcggctcactgcaacctctgcctcccaggttcaagtgattctcctgcctctagctgggattgcaggcgcccacgaccacgcccagctaatttttgtattttgtagtagagacgggatttcgccatattggccaggccatagtggtcttggactcctgacctcaggtgatccgcccacctcggcctcccaaagtgttgggtttacaggcgtgagctaccataccctgcccaggaatctgaatttttagcaatcagttagcagcaaataagctgagatttcctgggtactaagcacatactatgagcattacagccgctttatataagctcgttcactgtcctcattacattcctaatatgcaagtgagcatgttttttaatcctcagtctagaggtgaggaaactgaggcaggcacagagaggctaagggatttgcctagtcgcacagctaggaaggtgcagcactgagactcgaatccacacagcttggcttaagtctaccattaaatttgcctgtcctggccaggtgcggtggctcacgcctgtaatcccaacacttcgtgaggccaaggcaggtggatcacttgaagtgaggagttcgagaccacaccagcctggccaacatggtgaaatcccgtctttactaaaaatacaaaaaattagctgggcgtggtggtgggtgccggtaatcctagctactcaggaggctgaggcaggagaatcacttgaacctgggaggtggaggttgcagtgaaccgagattgcgccactagactccagcctgggagacgagcaaaactgtctcaaaaaaataaaatgaaatacataaataaatgtgcctatcctgtgccgggtgctgttcttgccagtggggatacatgagagaacactgccttgcccgcatgaggcttgtggcctggtactgtgcacacctcaggggattctgataattagctgagcacagttgccagcacagggcctggctcaataaatattagctgctggcttctgctc

SEQ ID NO: 3184 - DNA, 800 bp, Homo sapiens
  source 1..800: mol_type = genomic DNA
tttcgccaggttctctctccttgtccccttctttctgtcactttgtgcctcccccattagttactcccaggggcccctccctggatttacaccacgctcctaattcccagcccccatctgtgagtctgggcggcggagaggcccatggggtcctgatatccaagaaggggctctttctgcaggactctgctgggccgctcagccatgcctgagggagcccaaggactgagcctctccaaacctagcccaagcctcgggtgtggccgaagaggtgaagtgtgtgactgtggcaccgtgtgtgagactcggacagcagctcctgcagcccccaccatggcctccccccgaggttctgggagctccacatccctgagcacagtgggctctgagggggatccagcccctgggcccactccagcctgctcagcctccaggccagagccccttccagggcctcccatccgcctacatctctctccggtggggatcccaggttcagccagaccctcaaggctggagcgtgtggcccgggagatcgtggagacagaacgggcctatgtcagggacctccgcagcatcgtggaggactacctgggccctctgctggacggcggggtcctggggctgagcgtggagcaggtgggcacgctgtttgccaacattgaggacatctacgagttcagcagcgagctcctggaggacttggagaacagcagcagcgccgggggtattgccgagtgcttcgtgcagaggagcgaggattttgacatctacacattgtactgcatgaactacccgag

SEQ ID NO: 3185 - DNA, 3898 bp, Homo sapiens
  source 1..3898: mol_type = genomic DNA
gaagttcacgcccctgagtctgggctccgcacctccctggggaccgcgtcggggtcgcgcaggagccgggctgcctcgagccggggctggaggctccccgggaggactctgctgggccgctcagccatgcctgagggagcccaaggactgagcctctccaaacctagcccaagcctcgggtgtggccgaagaggtgaagtgtgtgactgtggcaccgtgtgtgagactcggacaggttcagccagaccctcaaggctggagcgtgtggcccgggagatcgtggagacagaacgggcctatgtcagggacctccgcagcatcgtggaggactacctgggccctctgctggacggcggggtcctggggctgagcgtggagcaggtgggcacgctgtttgccaacattgaggacatctacgagttcagcagcgagctcctggaggacttggagaacagcagcagcgccgggggtattgccgagtgcttcgtgcagaggagcgaggattttgacatctacacattgtactgcatgaactacccgagctccctggccctgctccgggagctgtcgttgtctccgccagcagccctgtggctgcaggagcgccaggcccagcttcgccactcgctgcccctgcagagcttcctgctgaaacctgtccagcgcattctcaagtaccatctgctgctgcaggaactagggaagcactgggcggagggcccaggcactgggggtcgcgagatggtggaggaagctattgtgtccatgacagcggttgcctggtacatcaacgacatgaagcgcaagcaggagcatgcagcgcgcctccaggaagtgcagcggcggctgggtggctggaccggaccagagctcagtgcttttggggaactggtgttggagggcgcgttccgaggaggcggagggggtggcccccggctacgagggggtgagcggctgctcttcctgttctctcggatgctgctggtggccaagcgcagggggctggagtacacctacaaaggccacatcttctgctgcaacctgagcgtgagcgagagtccccgagaccctctagggttcaaggtgtctgatctgaccattcccaagcacagacacctgctccaggccaagaaccaagaagagaagaggctgtggattcactgtctccagcgcctcttctttgagaaccaccctgcctccatccctgccaaggcaaagcaagttctccttgaaaacagcctgcattgtgcccccaaaagtaagcctgtcctagagcccctgacacccccacttgggtctcctcgacctcgagatgctagaagttttacccctgggcgaaggaacacagctccatctcctgggccctctgtgattcgccgaggccgcaggcagtctgagccggtgaaggacccttatgtcatgttcccacagaacgctaagcctggattcaagcacgctggcagcgaaggggaactctaccctccagaatctcagccaccagtttcaggctctgcaccccctgaggacctggaggatgctggacccccaacactggacccctctgggacctcaatcactgaagaaatcctggaactgctgaatcagcgaggccttcgagatccagggccgtccacccatgacattcccaagttccccggagactcccaggtgcctggcgacagcgaaaccctcacattccaagccctgcccagccgggactcttcagaagaggaggaggaggaagaggaagggctggagatggatgaacgggggccttccccactccacgtcctggaagggctcgaaagttccattgcagctgaaatgcccagcattccctgccttaccaaaattcctgacgtgcccaaccttcctgaaattcccagccgctgtgaaattcccgaaggttctcgccttcctagtctctctgacatttccgatgtttttgagatgccctgccttccagccatacctagtgtccccaacacccccagtctgtctagcactcccaccctctcctgtgactcctggctccaagggcctctgcaggaaccagctgaggctccagccaccaggagagaactgttttctgggagcaatcctgggaaactgggagagccgccttcaggaggcaaggcagggccagaggaggatgaagaaggggtatcattcacagacttccagccccaggatgtcacccaacatcagggattcccagatgagctggcattccgctcttgctcagaaatccggagcgcctggcaggcattggaacagggacagctggcccggccaggcttcccagagccactgctgatcctggaggattcggatctgggtggagacagcgggagcgggaaggcaggagccccgagttcagaaaggacggcgtcccgagtgcgagagctggcccggctttacagcgagcggatccagcagatgcagcgggcggagactcgggcatcagccaatgccccgcgccgccggcctcgggttctggcccaaccccagccatccccctgtctgccccaggagcaggcagagccagggctcctgcctgcctttggacacgtgctggtatgtgagctggccttcccactgacatgtgcccaggagtctgtccccctgggtcctgctgtctgggttcaagctgccatacctttgtcaaagcagggaggcagcccggatggccagggtctacatgtttccaatttgcctaagcaagaccttccgggcatccacgtttcagctgctacccttttgcctgagcaaggaggttcccggcatgtccaggctccagccgccacacctttgcccaagcaagaaggccccctgcacctccaggtgccggctcttacaactttctctgatcaaggccacccagaaatccaagttccagccaccactcctttgcctgagcatagaagtcacatggttataccagctccatccaccgccttttgtcctgagcagggacactgtgcggacatccacgttcccaccactccagctttgcccaaggagatttgttctgatttcacagtttcagtcaccacccctgtgcccaagcaagaaggtcacctagacagcgagagcccaaccaatatcccactgacaaagcaaggaggttccagggatgttcagggcccagaccctgtctgcagtcaacccatccagcctttgtcttggcatggaagcagcctggatccccagggcccaggcgacaccctaccacccttgccatgtcacctcccagaccttcagattccaggtacctcacctttgcctgcacatggaagccacctggaccatcggatcccagccaacgccccactgtctttgtcccaggagctcccagacactcaggttccagctaccacacctttgcccctgccacaagtcctcacagacatctgggtccaagccctcccaacttcacccaagcagggaagcctcccagacatccagggtccagcggctgcacctccacttccggagccaagccttacagatacacaggtccaaaaactcacaccttcgttggagcagaagagcctcatagatgcccatgttccagctgccacacctttacctgagagaggaggctctctagacattcagggcctctcacccaccccagttcagaccaccatggttttgtccaaaccaggaggctccttagcctctcacgttgccaggaatctatgggccttcacagggcccagggggctcctgatgcccccttccacatgtgagccaggacatgaggcttccctgaagcaaggatttcagccagatgccatagaccctcagaacttgacctggaagtccagacactgaacgcaggcctcaaaactgctgcggccttccaactcctggtatctgcatcggcgaatgg

SEQ ID NO: 3186 - DNA, 1540 bp, Homo sapiens
  source 1..1540: mol_type = genomic DNA
agcgcaccgggccgggggagcggccgcgctgggccgggcgggcgggtggcgggggtgcgctcggggacccgggccgcgtgggcgccgggatggagggcgccaaggggcggggagcgggcgtgcgtgtgtgtgcgagtgcgaatgcgagggaggccggccttgagtgaaaccggagctacaaagaaggggagagtccgggagcgggagggcgcgagggaggagcggcggcgccggggcagctccgacgccctcccgcggggaaggagcccccgcggtgccgccgaggccccgacgcggggccgcccctcggctcgccgccccgcgcccgcgcccgctgggaatgatgaagaagaacaattccgccaagcggggacctcaggatggaaaccagcagcctgcaccgcccgagaaggtcggctgggtccggaaattctgcgggaaagggattttcagggagatttggaaaaaccgctatgtggtgctgaaaggggaccagctctacatctctgagaaggaggtaaaagatgagaaaaatattcaagaggtatttgacctgagtgactatgagaagtgtgaagagctccggaagtccaagagcaggagcaagaaaaatcatagcaagtttactcttgcccactccaaacagcccggtaacacggcacccaacctgatcttcctggcagtgagtccagaagagaaggaatcgtggatcaatgccctcaactctgccatcacccgagccaagaaccgtatcttggatgaggcttccacctctacctcggatgggatgctgaccttggacttgatccaagaggaagacccttcccctgaggaaccaacctcttgtgctgagagctttcgggttgacctggacaagtctgtggcccagctggcagggagccggcggagagcggactcagaccgcatccagccctccgcagaccgggcaagcagtctctcccgaccttgggaaaaaacagacaaaggggccacctacaccccccaggcacccaagaagttgacgcccacagagaaaggccgctgcgcctccctggaggagatcctatctcagcgggatgctgcctctgcccgcaccctccagctgcgggctgaggaacccccaacccctgccctccccaacccggggcagctgtcccggatccaggacctggtagcaaggaaactggaggagactcaggagcttctggcagaggttcagggactgggagatgggaagcgaaaggccaaggacccccctcggtctccgccggattctgagtcagagcagctgctgctggagacggaacggctgctgggagaggcatcatcgaattggagccaggcaaagagggtgctgcaggaggtcagggagctgagagacctgtacagacagatggacctgcagaccccggactcccacctcagacagaccaccccgcacagtcagtaccggaagagcctgatgtgagggcagggtggggtctggaacttgtcgggttggacagactcttatctccgtgttgctggataaagctttttt

SEQ ID NO: 3187 - DNA, 2050 bp, Homo sapiens
  source 1..2050: mol_type = genomic DNA
ggggacccgggccgcgtgggcgccgggatggagggcgccaaggggcggggagcgggcgtgcgtgtgtgtgcgagtgcgaatgcgagggaggccggccttgagtgaaaccggagctacaaagaaggggagagtccgggagcgggagggcgcgagggaggagcggcggcgccggggcagctccgacgccctcccgcggggaaggagcccccgcggtgccgccgaggccccgacgcggggccgcccctcggctcgccgccccgcgcccgcgcccgctgggaatgatgaagaagaacaattccgccaagcggggacctcaggatggaaaccagcagcctgcaccgcccgagaaggtcggctgggtccggaaattctgcgggaaagggattttcagggagatttggaaaaaccgctatgtggtgctgaaaggggaccagctctacatctctgagaaggaggtaaaagatgagaaaaatattcaagaggtatttgacctgagtgactatgagaagtgtgaagagctccggaagtccaagagcaggagcaagaaaaatcatagcaagtttactcttgcccactccaaacagcccggtaacacggcacccaacctgatcttcctggcagtgagtccagaagagaaggaatcgtggatcaatgccctcaactctgccatcacccgagccaagaaccgtatcttggatgaggtcaccgttgaggaggacagctatcttgcccatcccactcgagacagggcaaaaatccagcactcccgccgccccccaacaaggggacacctaatggctgtggcttccacctctacctcggatgggatgctgaccttggacttgatccaagaggaagacccttcccctgaggaaccaacctcttgtgctgagagctttcgggttgacctggacaagtctgtggcccagctggcagggagccggcggagagcggactcagaccgcatccagccctccgcagaccgggcaagcagtctctcccgaccttgggaaaaaacagacaaaggggccacctacaccccccaggcacccaagaagttgacgcccacagagaaaggccgctgcgcctccctggaggagatcctatctcagcgggatgctgcctctgcccgcaccctccagctgcgggctgaggaacccccaacccctgccctccccaacccggggcagctgtcccggatccaggacctggtagcaaggaaactggaggagactcaggagcttctggcagaggttcagggactgggagatgggaagcgaaaggccaaggacccccctcggtctccgccggattctgagtcagagcagctgctgctggagacggaacggctgctgggagaggcatcatcgaattggagccaggcaaagagggtgctgcaggaggtcagggagctgagagacctgtacagacagatggacctgcagaccccggactcccacctcagacagaccaccccgcacagtcagtaccggaagagcctgatgtgagggcagggtggggtctggaacttgtcgggttggacagactcttatctccgtgttgctggataaagcttttttatttacctcaatcaaaaaaagaaaacaaaaatgaactcattgctcttgctgatgcctgaccccactacaacccttattgccccacctactttccatatgcccctcgtatgcccctcaggtttgaggaagtgaccccgcagcagtagcaggaagtttttacccagccagagagagagaaggcacggtaaagacacagtctgaccactccacacaccgcccgcccccaagacggcacagggagtccactgctgctcccaaggatacagtgggcttctaagcttagagcgggagggggatgaggatgttttctgttatgtcccaccccaggccttcagtttgagggtgaagtttcagctgcccaactctagttgtagggatgtggaggccagtgtcacctgtccgtgcacatggaagtgaaatttatcccagccctgaggaggatttgtggaattaaaatctccccagccaga

SEQ ID NO: 3188 - DNA, 1809 bp, Homo sapiens
  source 1..1809: mol_type = genomic DNA
aaggataatggtttggagacagagttctattcctgccagcattgacactgtgtctgaaaagccagcatcgacactgtgtctgcaaatccctcagctattctgagtctccgttttctccctgtgagatggagatcataaaatccgcctcatccttaggattattctcctgaagctacaataaggcctgaggcattgtacgctggaagaaacgtgtattaatagcaacttctgtcccaccccatcccccaacacgtcgatcccctccggagcataaaactttcccccagcatctgacctgcccaggccaccctagcacctaggagcgtgaattcctgatgcgggttgtgggtggcgcgccctcccggttcccgctctcgtttttgtttttggtcgggtaaggcgatgctgtagaggctggcgatctccagtcttcacgaatccgcacgtctctccattatccaccgcgcccgcccactgggccccggggcggccggcggccgggtctctcgggctccgcgtgtcgcccgagccgccgccggagcgagggtccctgccccctggggagcggtctccagccgcttcgaagccgccttcttccccctccggacctcaggatggaaaccagcagcctgcaccgcccgagaaggtcggctgggtccggaaattctgcgggaaagggattttcagggagatttggaaaaaccgctatgtggtgctgaaaggggaccagctctacatctctgagaaggaggtaaaagatgagaaaaatattcaagaggtatttgacctgagtgactatgagaagtgtgaagagctccggaagtccaagagcaggagcaagaaaaatcatagcaagtttactcttgcccactccaaacagcccggtaacacggcacccaacctgatcttcctggcagtgagtccagaagagaaggaatcgtggatcaatgccctcaactctgccatcacccgagccaagaaccgtatcttggatgaggcttccacctctacctcggatgggatgctgaccttggacttgatccaagaggaagacccttcccctgaggaaccaacctcttgtgctgagagctttcgggttgacctggacaagtctgtggcccagctggcagggagccggcggagagcggactcagaccgcatccagccctccgcagaccgggcaagcagtctctcccgaccttgggaaaaaacagacaaaggggccacctacaccccccaggcacccaagaagttgacgcccacagagaaaggccgctgcgcctccctggaggagatcctatctcagcgggatgctgcctctgcccgcaccctccagctgcgggctgaggaacccccaacccctgccctccccaacccggggcagctgtcccggatccaggacctggtagcaaggaaactggaggagactcaggagcttctggcagaggttcagggactgggagatgggaagcgaaaggccaaggacccccctcggtctccgccggattctgagtcagagcagctgctgctggagacggaacggctgctgggagaggcatcatcgaattggagccaggcaaagagggtgctgcaggaggtcagggagctgagagacctgtacagacagatggacctgcagaccccggactcccacctcagacagaccaccccgcacagtcagtaccggaagagcctgatgtgagggcagggtggggtctggaacttgtcgggttggacagactcttatctccgtgttgctggataaagcttttttatttacctcaatcaaaaaaagaaaacaaaaatgaa

SEQ ID NO: 3189 - DNA, 708 bp, Homo sapiens
  source 1..708: mol_type = genomic DNA
ctggcagtgagtccagaagagaaggaatcgtggatcaatgccctcaactctgccatcacccgagccaagaaccgtatcttggatgagtacatctcttcaggtcaccgttgaggaggacagctatcttgcccatcccactcgagacagggcaaaaatccagcactcccgccgccccccaacaaggggacacctaatggctgtggcttccacctctacctcggatgggatgctgaccttggacttgatccaagaggaagacccttcccctgaggaaccaacctcttgtgctgagagctttcgggttgacctggacaagtctgtggcccagctggcagggagccggcggagagcggactcagaccgcatccagccctccgcagaccgggcaagcagtctctcccgaccttgggaaaaaacagacaaaggggccacctacaccccccaggcacccaagaagttgacgcccacagagaaaggccgctgcgcctccctggaggagatcctatctcagcgggatgctgcctctgcccgcaccctccagctgcgggctgaggaacccccaacccctgccctccccaacccggggcagctgtcccggatccaggacctggtagcaaggaaactggaggagactcaggagcttctggcagaggttcagggactgggagatgggaagcgaaaggccaaggacccccctcggtctccgcc

SEQ ID NO: 3190 - DNA, 896 bp, Homo sapiens
  source 1..896: mol_type = genomic DNA
aggggagggccggccagggtaggaatgcgctgcgggcgggcggcgcaggaggcgagcggcggaacatccgggtgctgagggccgcggtgtgggtgcgcggagcagtcagggcgcaggtgggcagcgcgcacggcctgccagcccggggcgccagaatcctgcgctgcggggccgagaggggcgccgcgcccgccgcagcctggagctttccgcgaacctcggggcgcccatgacggcggcggcgacggctaccgtgctcaaggagggcgtgctggagaagcgcagcggcgggctgctgcagctgtggaagcggaagcgctgcgtcctcaccgaacgcgggctgcagctcttcgaggccaagggcacgggcggccggcccaaggagctcagcttcgcccgcatcaaggccgtggagtgcgtggagagcaccgggcgccacatctacttcacgctggtgaccgaagggggcggcgagatcgacttccgctgccccctggaagatcccggctggaacgcccagatcaccctaggcctggtcaagttcaagaaccagcaggccatccagacagtgcgggcccggcagagcctcgggaccgggaccctcgtgtcctaaaccaccgggcgcaccatctttccttcatgctacccaccacctcagtgctgaggtcaaggcagcttcgttgttccctctggcttgtgggggcacggctgtgctccatgtggcaaggtggaaggcatggacgtgtggaggaggcgctggagctgaaggaatggacgagccctgggaggagggcagaaggctacgcagggctgaggatgaagatgcagcccctggatggtcccagactctcaggacatgcccagctcaggggcttcgagccacaggcctggcctca

SEQ ID NO: 3191 - DNA, 1531 bp, Homo sapiens
  source 1..1531: mol_type = genomic DNA
gagcggcggaacatgtaagggcacatcccgcgagctgccgcccagcgcgcagacagagcccaggggagcaagagaacgggcgggcggtggggctcacggcctagggaggcgcggaggcatctggcagaggcgggtcgggctgggccagctggggtagagcggaggagcgggtgccggctgaagcggggcggtgggcgcggagcgcgctgggggcaccgacaccacctcaccggcagccgggtgctgagggccgcggtgtgggtgcgcggagcagtcagggcgcaggtgggcagcgcgcacggcctgccagcccggggcgccagaatcctgcgctgcggggccgagaggggcgccgcgcccgccgcagcctggagctttccgcgaacctcggggcgcccatgacggcggcggcgacggctaccgtgctcaaggagggcgtgctggagaagcgcagcggcgggctgctgcagctgtggaagcggaagcgctgcgtcctcaccgaacgcgggctgcagctcttcgaggccaagggcacgggcggccggcccaaggagctcagcttcgcccgcatcaaggccgtggagtgcgtggagagcaccgggcgccacatctacttcacgctggtgaccgaagggggcggcgagatcgacttccgctgccccctggaagatcccggctggaacgcccagatcaccctaggcctggtcaagttcaagaaccagcaggccatccagacagtgcgggcccggcagagcctcgggaccgggaccctcgtgtcctaaaccaccgggcgcaccatctttccttcatgctacccaccacctcagtgctgaggtcaaggcagcttcgttgttccctctggcttgtgggggcacggctgtgctccatgtggcaaggtggaaggcatggacgtgtggaggaggcgctggagctgaaggaatggacgagccctgggaggagggcagaaggctacgcagggctgaggatgaagatgcagcccctggatggtcccagactctcaggacatgcccagctcaggggcttcgagccacaggcctggcctcatatggcatgagggggagctggcataggagccccctccctgctgtggtcctgccctctgtcctgcagactgctcttagccccctggctttgtgccaggcctggaggagggcagtcccccatggggtgccgagccaacgcctcaggaatcaggaggccagcctggtaccaaaaggagtacccagggcctggtacccaggcccactccagaatggcctctggactcaccttgagaagggggagctgctgggcctaaagcccactcctgggggtctcctgctgcttaggtccttttgggacccccacccatccaggccctttctttgcacacttcttcccccacctctacgcatcttccccccactgcggtgttcggcctgaaggtggtgggggtgagggggggtttggccattagcatttcatgtctttccccaaatgaagatgccctgcaaagggcagtaaccacaca

SEQ ID NO: 3192 - DNA, 2764 bp, Homo sapiens
  source 1..2764: mol_type = genomic DNA
ggcaagacaacgaggatttgcgtagggggcgagcctctgaggccacttggctcttacggccacgcagggcgccgcagatgcagccggagcccgcttttccctctcaggacgacccctaggccgccagcagttccctaccgacgaaggcgactgtacagcgtccaccgcgttcgtgcccacttacccgccgccccactccgggccgccggctcgcagcaggaccagcccggctgctacggccgcggatacacgccctcaggcccggcgctgcgcagcttgcggaagctttcccggacagactcgctgccagcggattggctgcgagcagcgccaatctcacgttgcccccgggcgaggcgggactcagtgccgcgctctctgcacccgctctgccgcgcgcgtgcgtgctgggtgcgggtgcgggtgcggggttgggcctgcgcatcgggtgagacgctggctgcttgcggctagtggatggtaattgcctgcctcgcgctagcaggaagctgctctgttaaaagcgaaaatgaaacaattgcctgcggcaacagttcgactcctttcaagttctcagatcatcacttcggtggtcagtgttgtaaaagagcttattgaaaactccttggatgctggtgccacaagcgtagatgttaaactggagaactatggatttgataaaattgaggtgcgagataacggggagggtatcaaggctgttgatgcacctgtaatggcaatgaagtactacacctcaaaaataaatagtcatgaagatcttgaaaatttgacaacttacggttttcgtggagaagccttggggtcaatttgttgtatagctgaggttttaattacaacaagaacggctgctgataattttagcacccagtatgttttagatggcagtggccacatactttctcagaaaccttcacatcttggtcaaggtacaactgtaactgctttaagattatttaagaatctacctgtaagaaagcagttttactcaactgcaaaaaaatgtaaagatgaaataaaaaagatccaagatctcctcatgagctttggtatccttaaacctgacttaaggattgtctttgtacataacaaggcagttatttggcagaaaagcagagtatcagatcacaagatggctctcatgtcagttctggggactgctgttatgaacaatatggaatcctttcagtaccactctgaagaatctcagatttatctcagtggatttcttccaaagtgtgatgcagaccactctttcactagtctttcaacaccagaaagaagtttcatcttcataaacagtcgaccagtacatcaaaaagatatcttaaagttaatccgacatcattacaatctgaaatgcctaaaggaatctactcgtttgtatcctgttttctttctgaaaatcgatgttcctacagctgatgttgatgtaaatttaacaccagataaaagccaagtattattacaaaataaggaatctgttttaattgctcttgaaaatctgatgacgacttgttatggaccattacctagtacaaattcttatgaaaataataaaacagatgtttccgcagctgacatcgttcttagtaaaacagcagaaacagatgtgctttttaataaagtggaatcatctggaaagaattattcaaatgttgatacttcagtcattccattccaaaatgatatgcataatgatgaatctggaaaaaacactgatgattgtttaaatcaccagataagtattggtgactttggttatggtcattgtagtagtgaaatttctaacattgataaaaacactaagaatgcatttcaggacatttcaatgagtaatgtatcatgggagaactctcagacggaatatagtaaaacttgttttataagttccgttaagcacacccagtcagaaaatggcaataaagaccatatagatgagagtggggaaaatgaggaagaagcaggtcttgaaaactcttcggaaatttctgcagatgagtggagcaggggaaatatacttaaaaattcagtgggagagaatattgaacctgtgaaaattttagtgcctgaaaaaagtttaccatgtaaagtaagtaataataattatccaatccctgaacaaatgaatcttaatgaagattcatgtaacaaaaaatcaaatgtaatagataataaatctggaaaagttacagcttatgatttacttagcaatcgagtaatcaagaaacccatgtcagcaagtgctctttttgttcaagatcatcgtcctcagtttctcatagaaaatcctaagactagtttagaggatgcaacactacaaattgaagaactgtggaagacattgagtgaagaggaaaaactgaaatatgaagagaaggctactaaagacttggaacgatacaatagtcaaatgaagagagccattgaacaggagtcacaaatgtcactaaaagatggcagaaaaaagataaaacccaccagcgcatggaatttggcccagaagcacaagttaaaaacctcattatctaatcaaccaaaacttgatgaactccttcagtcccaaattgaaaaaagaaggagtcaaaatattaaaatggtacagatccccttttctatgaaaaacttaaaaataaattttaagaaacaaaacaaagttgacttagaagagaaggatgaaccttgcttgatccacaatctcaggtttcctgatgcatggctaatgacatccaaaacagagtctttt

SEQ ID NO: 3193 - DNA, 3012 bp, Homo sapiens
  source 1..3012: mol_type = genomic DNA
gtgctgggtgcgggtgcgggtgcggggttgggcctgcgcatcgggtgagacgctggctgcttgcggctagtggatggtaattgcctgcctcgcgctagcaggaagctgctctgttaaaagcgaaaatgaaacaattgcctgcggcaacagttcgactcctttcaagttctcagatcatcacttcggtggtcagtgttgtaaaagagcttattgaaaactccttggatgctggtgccacaagcgtagatgttaaactggagaactatggatttgataaaattgaggtgcgagataacggggagggtatcaaggctgttgatgcacctgtaatggcaatgaagtactacacctcaaaaataaatagtcatgaagatcttgaaaatttgacaacttacggttttcgtggagaagccttggggtcaatttgttgtatagctgaggtacaactgtaactgctttaagattatttaagaatctacctgtaagaaagcagttttactcaactgcaaaaaaatgtaaagatgaaataaaaaagatccaagatctcctcatgagctttggtatccttaaacctgacttaaggattgtctttgtacataacaaggcagttatttggcagaaaagcagagtatcagatcacaagatggctctcatgtcagttctggggactgctgttatgaacaatatggaatcctttcagtaccactctgaagaatctcagatttatctcagtggatttcttccaaagtgtgatgcagaccactctttcactagtctttcaacaccagaaagaagtttcatcttcataaacagtcgaccagtacatcaaaaagatatcttaaagttaatccgacatcattacaatctgaaatgcctaaaggaatctactcgtttgtatcctgttttctttctgaaaatcgatgttcctacagctgatgttgatgtaaatttaacaccagataaaagccaagtattattacaaaataaggaatctgttttaattgctcttgaaaatctgatgacgacttgttatggaccattacctagtacaaattcttatgaaaataataaaacagatgtttccgcagctgacatcgttcttagtaaaacagcagaaacagatgtgctttttaataaagtggaatcatctggaaagaattattcaaatgttgatacttcagtcattccattccaaaatgatatgcataatgatgaatctggaaaaaacactgatgattgtttaaatcaccagataagtattggtgactttggttatggtcattgtagtagtgaaatttctaacattgataaaaacactaagaatgcatttcaggacatttcaatgagtaatgtatcatgggagaactctcagacggaatatagtaaaacttgttttataagttccgttaagcacacccagtcagaaaatggcaataaagaccatatagatgagagtggggaaaatgaggaagaagcaggtcttgaaaactcttcggaaatttctgcagatgagtggagcaggggaaatatacttaaaaattcagtgggagagaatattgaacctgtgaaaattttagtgcctgaaaaaagtttaccatgtaaagtaagtaataataattatccaatccctgaacaaatgaatcttaatgaagattcatgtaacaaaaaatcaaatgtaatagataataaatctggaaaagttacagcttatgatttacttagcaatcgagtaatcaagaaacccatgtcagcaagtgctctttttgttcaagatcatcgtcctcagtttctcatagaaaatcctaagactagtttagaggatgcaacactacaaattgaagaactgtggaagacattgagtgaagaggaaaaactgaaatatgaagagaaggctactaaagacttggaacgatacaatagtcaaatgaagagagccattgaacaggagtcacaaatgtcactaaaagatggcagaaaaaagataaaacccaccagcgcatggaatttggcccagaagcacaagttaaaaacctcattatctaatcaaccaaaacttgatgaactccttcagtcccaaattgaaaaaagaaggagtcaaaatattaaaatggtacagatccccttttctatgaaaaacttaaaaataaattttaagaaacaaaacaaagttgacttagaagagaaggatgaaccttgcttgatccacaatctcaggtttcctgatgcatggctaatgacatccaaaacagaggtaatgttattaaatccatatagagtagaagaagccctgctatttaaaagacttcttgagaatcataaacttcctgcagagccactggaaaagccaattatgttaacagagagtctttttaatggatctcattatttagacgttttatataaaatgacagcagatgaccaaagatacagtggatcaacttacctgtctgatcctcgtcttacagcgaatggtttcaagataaaattgataccaggagtttcaattactgaaaattacttggaaatagaaggaatggctaattgtctcccattctatggagtagcagatttaaaagaaattcttaatgctatattaaacagaaatgcaaaggaagtttatgaatgtagacctcgcaaagtgataagttatttagagggagaagcagtgcgtctatccagacaattacccatgtacttatcaaaagaggacatccaagacattatctacagaatgaagcaccagtttggaaatgaaattaaagagtgtgttcatggtcgcccattttttcatcatttaacctatcttccagaaactacatgattaaatatgtttaagaagattagttaccattgaaattggttctgtcataaaacagcatgagtctggttttaaattatctttgtattatgtgtcacatggttattttttaaatgaggattcactgacttgtttttatattgaaaaaagttccacgtattgtagaaaacgtaaataaactaatatagactatt

SEQ ID NO: 3194 - DNA, 331 bp, Homo sapiens
  source 1..331: mol_type = genomic DNA
gatctattttcatctgtcattattattgccatttgtcctgttggtcaggaatgcttaacaattcttacaagttgcatttttatcttctagctgctctgttaaaagcgaaaatgaaacaattgcctgcggcaacagttcgactcctttcaagttctcagatcatcacttcggtggtcagtgttgtaaaagagcttattgaaaactccttggatgctggtgccacaagcgtagatgttaaactggagaactatggatttgataaaattgaggtgcgagataacggggagggtatcaaggctgttgatgcacctgtaatggcaatgaagtacta

SEQ ID NO: 3195 - DNA, 831 bp, Homo sapiens
  source 1..831: mol_type = genomic DNA
ggctgcttgcggctagtggatggtaattgcctgcctcgcgctagcaggaaggtagtgtggtgtgactaacgggtatttattatatcctcgatggctcgagggccccgtcccctctactcgtcctggtccgggcgcgaacgctatagggcagctaagggcgctccccgcggggcgggaagcgaagccgggcttgcgggcgcgcacacgtggaacgcgttttctgagcagctgctctgttaaaagcgaaaatgaaacaattgcctgcggcaacagttcgactcctttcaagttctcagatcatcacttcggtggtcagtgttgtaaaagagcttattgaaaactccttggatgctggtgccacaagcgtagatgttaaactggagaactatggatttgataaaattgaggtgcgagataacggggagggtatcaaggctgttgatgcacctgtaatggcaatgaagtactacacctcaaaaataaatagtcatgaagatcttgaaaatttgacaacttacggttttcgtggagaagccttggggtcaatttgttgtatagctgaggttttaattacaacaagaacggctgctgataattttagcacccagtatgttttagatggcagtggccacatactttctcagaaaccttcacatcttggtcaaggtacaactgtaactgctttaagattatttaagaatctacctgtaagaaagcagttttactcaactgcaaaaaaatgtaaagatgaaataaaaaagatccaagatctcctcatgagctttggtatccttaaacctgacttaaggattgtctttgtacataacaagg

SEQ ID NO: 3196 - DNA, 2659 bp, Homo sapiens
  source 1..2659: mol_type = genomic DNA
gtaattgcctgcctcgcgctagcaggaagctgctctgttaaaagcgaaaatgaaacaattgcctgcggcaacagttcgactcctttcaagttctcagatcatcacttcggtggtcagtgttgtaaaagagcttattgaaaactccttggatgctggtgccacaagcgtagatgttaaactggtacaactgtaactgctttaagattatttaagaatctacctgtaagaaagcagttttactcaactgcaaaaaaatgtaaagatgaaataaaaaagatccaagatctcctcatgagctttggtatccttaaacctgacttaaggattgtctttgtacataacaaggcagttatttggcagaaaagcagagtatcagatcacaagatggctctcatgtcagttctggggactgctgttatgaacaatatggaatcctttcagtaccactctgaagaatctcagatttatctcagtggatttcttccaaagtgtgatgcagaccactctttcactagtctttcaacaccagaaagaagtttcatcttcataaacagtcgaccagtacatcaaaaagatatcttaaagttaatccgacatcattacaatctgaaatgcctaaaggaatctactcgtttgtatcctgttttctttctgaaaatcgatgttcctacagctgatgttgatgtaaatttaacaccagataaaagccaagtattattacaaaataaggaatctgttttaattgctcttgaaaatctgatgacgacttgttatggaccattacctagtacaaattcttatgaaaataataaaacagatgtttccgcagctgacatcgttcttagtaaaacagcagaaacagatgtgctttttaataaagtggaatcatctggaaagaattattcaaatgttgatacttcagtcattccattccaaaatgatatgcataatgatgaatctggaaaaaacactgatgattgtttaaatcaccagataagtattggtgactttggttatggtcattgtagtagtgaaatttctaacattgataaaaacactaagaatgcatttcaggacatttcaatgagtaatgtatcatgggagaactctcagacggaatatagtaaaacttgttttataagttccgttaagcacacccagtcagaaaatggcaataaagaccatatagatgagagtggggaaaatgaggaagaagcaggtcttgaaaactcttcggaaatttctgcagatgagtggagcaggggaaatatacttaaaaattcagtgggagagaatattgaacctgtgaaaattttagtgcctgaaaaaagtttaccatgtaaagtaagtaataataattatccaatccctgaacaaatgaatcttaatgaagattcatgtaacaaaaaatcaaatgtaatagataataaatctggaaaagttacagcttatgatttacttagcaatcgagtaatcaagaaacccatgtcagcaagtgctctttttgttcaagatcatcgtcctcagtttctcatagaaaatcctaagactagtttagaggatgcaacactacaaattgaagaactgtggaagacattgagtgaagaggaaaaactgaaatatgaagagaaggctactaaagacttggaacgatacaatagtcaaatgaagagagccattgaacaggagtcacaaatgtcactaaaagatggcagaaaaaagataaaacccaccagcgcatggaatttggcccagaagcacaagttaaaaacctcattatctaatcaaccaaaacttgatgaactccttcagtcccaaattgaaaaaagaaggagtcaaaatattaaaatggtacagatccccttttctatgaaaaacttaaaaataaattttaagaaacaaaacaaagttgacttagaagagaaggatgaaccttgcttgatccacaatctcaggtttcctgatgcatggctaatgacatccaaaacagaggtaatgttattaaatccatatagagtagaagaagccctgctatttaaaagacttcttgagaatcataaacttcctgcagagccactggaaaagccaattatgttaacagagagtctttttaatggatctcattatttagacgttttatataaaatgacagcagatgaccaaagatacagtggatcaacttacctgtctgatcctcgtcttacagcgaatggtttcaagataaaattgataccaggagtttcaattactgaaaattacttggaaatagaaggaatggctaattgtctcccattctatggagtagcagatttaaaagaaattcttaatgctatattaaacagaaatgcaaaggaagtttatgaatgtagacctcgcaaagtgataagttatttagagggagaagcagtgcgtctatccagacaattacccatgtacttatcaaaagaggacatccaagacattatctacagaatgaagcaccagtttggaaatgaaattaaagagtgtgttcatggtcgcccattttttcatcatttaacctatcttccagaaactacatgattaaatatgtttaagaagattagttaccattgaaattggttctgtcataaaacagcatgagtctggttttaaattatctttgtattatgtgtcacat

SEQ ID NO: 3197 - DNA, 3225 bp, Homo sapiens
  source 1..3225: mol_type = genomic DNA
agactcgctgccagcggattggctgcgagcagcgccaatctcacgttgcccccgggcgaggcgggactcagtgccgcgctctctgcacccgctctgccgcgcgcgtgcgtgctgggtgcgggtgcgggtgcggggttgggcctgcgcatcgggtgagacgctggctgcttgcggctagtggatggtaattgcctgcctcgcgctagcaggaagctgctctgttaaaagcgaaaatgaaacaattgcctgcggcaacagttcgactcctttcaagttctcagatcatcacttcggtggtcagtgttgtaaaagagcttattgaaaactccttggatgctggtgccacaagcgtagatgttaaactggagaactatggatttgataaaattgaggtgcgagataacggggagggtatcaaggctgttgatgcacctgtaatggcaatgaagtactacacctcaaaaataaatagtcatgaagatcttgaaaatttgacaacttacggttttcgtggagaagccttggggtcaatttgttgtatagctgaggttttaattacaacaagaacggctgctgataattttagcacccagtatgttttagatggcagtggccacatactttctcagaaaccttcacatcttggtcaaggtacaactgtaactgctttaagattatttaagaatctacctgtaagaaagcagttttactcaactgcaaaaaaatgtaaagatgaaataaaaaagatccaagatctcctcatgagctttggtatccttaaacctgacttaaggattgtctttgtacataacaaggcagttatttggcagaaaagcagagtatcagatcacaagatggctctcatgtcagttctggggactgctgttatgaacaatatggaatcctttcagtaccactctgaagaatctcagatttatctcagtggatttcttccaaagtgtgatgcagaccactctttcactagtctttcaacaccagaaagaagtttcatcttcataaacagtcgaccagtacatcaaaaagatatcttaaagttaatccgacatcattacaatctgaaatgcctaaaggaatctactcgtttgtatcctgttttctttctgaaaatcgatgttcctacagctgatgttgatgtaaatttaacaccagataaaagccaagtattattacaaaataaggaatctgttttaattgctcttgaaaatctgatgacgacttgttatggaccattacctagtacaaattcttatgaaaataataaaacagatgtttccgcagctgacatcgttcttagtaaaacagcagaaacagatgtgctttttaataaagtggaatcatctggaaagaattattcaaatgttgatacttcagtcattccattccaaaatgatatgcataatgatgaatctggaaaaaacactgatgattgtttaaatcaccagataagtattggtgactttggttatggtcattgtagtagtgaaatttctaacattgataaaaacactaagaatgcatttcaggacatttcaatgagtaatgtatcatgggagaactctcagacggaatatagtaaaacttgttttataagttccgttaagcacacccagtcagaaaatggcaataaagaccatatagatgagagtggggaaaatgaggaagaagcaggtcttgaaaactcttcggaaatttctgcagatgagtggagcaggggaaatatacttaaaaattcagtgggagagaatattgaacctgtgaaaattttagtgcctgaaaaaagtttaccatgtaaagtaagtaataataattatccaatccctgaacaaatgaatcttaatgaagattcatgtaacaaaaaatcaaatgtaatagataataaatctggaaaagttacagcttatgatttacttagcaatcgagtaatcaagaaacccatgtcagcaagtgctctttttgttcaagatcatcgtcctcagtttctcatagaaaatcctaagactagtttagaggatgcaacactacaaattgaagaactgtggaagacattgagtgaagaggaaaaactgaaatatgaagagaaggctactaaagacttggaacgatacaatagtcaaatgaagagagccattgaacaggagtcacaaatgtcactaaaagatggcagaaaaaagataaaacccaccagcgcatggaatttggcccagaagcacaagttaaaaacctcattatctaatcaaccaaaacttgatgaactccttcagtcccaaattgaaaaaagaaggagtcaaaatattaaaatggtacagatccccttttctatgaaaaacttaaaaataaattttaagaaacaaaacaaagttgacttagaagagaaggatgaaccttgcttgatccacaatctcaggtttcctgatgcatggctaatgacatccaaaacagaggtaatgttattaaatccatatagagtagaagaagccctgctatttaaaagacttcttgagaatcataaacttcctgcagagccactggaaaagccaattatgttaacagagagtctttttaatggatctcattatttagacgttttatataaaatgacagcagatgaccaaagatacagtggatcaacttacctgtctgatcctcgtcttacagcgaatggtttcaagataaaattgataccaggagtttcaattactgaaaattacttggaaatagaaggaatggctaattgtctcccattctatggagtagcagatttaaaagaaattcttaatgctatattaaacagaaatgcaaaggaagtttatgaatgtagacctcgcaaagtgataagttatttagagggagaagcagtgcgtctatccagacaattacccatgtacttatcaaaagaggacatccaagacattatctacagaatgaagcaccagtttggaaatgaaattaaagagtgtgttcatggtcgcccattttttcatcatttaacctatcttccagaaactacatgattaaatatgtttaagaagattagttaccattgaaattggttctgtcataaaacagcatgagtctggttttaaattatctttgtattatgtgtcacatggttattttttaaatgaggattcactgacttgtttttatattgaaaaaagttccacgtattgtagaaaacgtaaataaactaatatagactattca

SEQ ID NO: 3198 - DNA, 560 bp, Homo sapiens
  source 1..560: mol_type = genomic DNA
gtgctgggtgcgggtgcgggtgcggggttgggcctgcgcatcgggtgagacgctggctgcttgcggctagtggatggtaattgcctgcctcgcgctagcaggaaggtagtgtggtgtgactaacgggtatttattatatcctcgatggctcgagggccccgtcccctctactcgtcctggtccgggcgcgaacgctatagggcagctaagggcgctccccgcggggcgggaagcgaagccgggcttgcgggcgcgcacacgtggaacgcgttttctgagcaggcacacctgttgtccttaactgactttccgggtcatcagcacttcttcagaagtgttccttttccctcccagcaaatatggaagactgactatcctgatattcccagacattctttgctgtgatttctgctctgttaaaagcgaaaatgaaacaattgcctgcggcaacagttcgactcctttcaagttctcagatcatcacttcggtggtcagtgttgtaaaagagcttattgaaaactccttggatgctggtgccacaagcgtagatgttaaactg

SEQ ID NO: 3199 - DNA, 2576 bp, Homo sapiens
  source 1..2576: mol_type = genomic DNA
gctgcttgcggctagtggatggtaattgcctgcctcgcgctagcaggaagctgctctgttaaaagcgaaaatgaaacaattgcctgcggcaacagttcgactcctttcaagttctcagatcatcacttcggtggtcagtgttgtaaaagagcttattgaaaactccttggatgctggtgccacaagcgtagatgttaaactggagaactatggatttgataaaattgaggtgcgagataacggggagggtatcaaggctgttgatgcacctgtaatggcaatgaagtactacacctcaaaaataaatagtcatgaagatcttgaaaatttgacaacttacggttttcgtggagaagccttggggtcaatttgttgtatagctgaggttttaattacaacaagaacggctgctgataattttagcacccagtatgttttagatggcagtggccacatactttctcagaaaccttcacatcttggtcaaggtacaactgtaactgctttaagattatttaagaatctacctgtaagaaagcagttttactcaactgcaaaaaaatgtaaagatgaaataaaaaagatccaagatctcctcatgagctttggtatccttaaacctgacttaaggattgtctttgtacataacaaggcagttatttggcagaaaagcagagtatcagatcacaagatggctctcatgtcagttctggggactgctgttatgaacaatatggaatcctttcagtaccactctgaagaatctcagatttatctcagtggatttcttccaaagtgtgatgcagaccactctttcactagtctttcaacaccagaaagaagtttcatcttcataaacagtcgaccagtacatcaaaaagatatcttaaagttaatccgacatcattacaatctgaaatgcctaaaggaatctactcgtttgtatcctgttttctttctgaaaatcgatgttcctacagctgatgttgatgtaaatttaacaccagataaaagccaagtattattacaaaataaggaatctgttttaattgctcttgaaaatctgatgacgacttgttatggaccattacctagtacaaattcttatgaaaataataaaacagatgtttccgcagctgacatcgttcttagtaaaacagcagaaacagatgtgctttttaataaagtggaatcatctggaaagaattattcaaatgttgatacttcagtcattccattccaaaatgatatgcataatgatgaatctggaaaaaacactgatgattgtttaaatcaccagataagtattggtgactttggttatggtcattgtagtagtgaaatttctaacattgataaaaacactaagaatgcatttcaggacatttcaatgagtaatgtatcatgggagaactctcagacggaatatagtaaaacttgttttataagttccgttaagcacacccagtcagaaaatggcaataaagaccatatagatgagagtggggaaaatgaggaagaagcaggtcttgaaaactcttcggaaatttctgcagatgagtggagcaggggaaatatacttaaaaattcagtgggagagaatattgaacctgtgaaaattttagtgcctgaaaaaagtttaccatgtaaagtaagtaataataattatccaatccctgaacaaatgaatcttaatgaagattcatgtaacaaaaaatcaaatgtaatagataataaatctggaaaagttacagcttatgatttacttagcaatcgagtaatcaagaaacccatgtcagcaagtgctctttttgttcaagatcatcgtcctcagtttctcatagaaaatcctaagactagtttagaggatgcaacactacaaattgaagaactgtggaagacattgagtgaagaggaaaaactgaatctttttaatggatctcattatttagacgttttatataaaatgacagcagatgaccaaagatacagtggatcaacttacctgtctgatcctcgtcttacagcgaatggtttcaagataaaattgataccaggagtttcaattactgaaaattacttggaaatagaaggaatggctaattgtctcccattctatggagtagcagatttaaaagaaattcttaatgctatattaaacagaaatgcaaaggaagtttatgaatgtagacctcgcaaagtgataagttatttagagggagaagcagtgcgtctatccagacaattacccatgtacttatcaaaagaggacatccaagacattatctacagaatgaagcaccagtttggaaatgaaattaaagagtgtgttcatggtcgcccattttttcatcatttaacctatcttccagaaactacatgattaaatatgtttaagaagattagttaccattgaaattggttctgtcataaaacagcatgagtctggttttaaattatctttgtattatgtgtcacatggttattttttaaatgaggattcactgacttgtttttatattgaaaaaagttccacgtattgtagaaaacgtaaataaactaatatagactattca

SEQ ID NO: 3200 - DNA, 2795 bp, Homo sapiens
  source 1..2795: mol_type = genomic DNA
ggtgcgggtgcggggttgggcctgcgcatcgggtgagacgctggctgcttgcggctagtggatggtaattgcctgcctcgcgctagcaggaagctgctctgttaaaagcgaaaatgaaacaattgcctgcggcaacagttcgactcctttcaagttctcagatcatcacttcggtggtcagtgttgtaaaagagcttattgaaaactccttggatgctggtgccacaagcgtagatgttaaactggagaactatggatttgataaaattgaggtgcgagataacggggagggtatcaaggctgttgatgcacctgtaatggcaatgaagtactacacctcaaaaataaatagtcatgaagatcttgaaaatttgacaacttacggttttcgtggagaagccttggggtcaatttgttgtatagctgaggttttaattacaacaagaacggctgctgataattttagcacccagtatgttttagatggcagtggccacatactttctcagaaaccttcacatcttggtcaaggtacaactgtaactgctttaagattatttaagaatctacctgtaagaaagcagttttactcaactgcaaaaaaatgtaaagatgaaataaaaaagatccaagatctcctcatgagctttggtatccttaaacctgacttaaggattgtctttgtacataacaagatttatctcagtggatttcttccaaagtgtgatgcagaccactctttcactagtctttcaacaccagaaagaagtttcatcttcataaacagtcgaccagtacatcaaaaagatatcttaaagttaatccgacatcattacaatctgaaatgcctaaaggaatctactcgtttgtatcctgttttctttctgaaaatcgatgttcctacagctgatgttgatgtaaatttaacaccagataaaagccaagtattattacaaaataaggaatctgttttaattgctcttgaaaatctgatgacgacttgttatggaccattacctagtacaaattcttatgaaaataataaaacagatgtttccgcagctgacatcgttcttagtaaaacagcagaaacagatgtgctttttaataaagtggaatcatctggaaagaattattcaaatgttgatacttcagtcattccattccaaaatgatatgcataatgatgaatctggaaaaaacactgatgattgtttaaatcaccagataagtattggtgactttggttatggtcattgtagtagtgaaatttctaacattgataaaaacactaagaatgcatttcaggacatttcaatgagtaatgtatcatgggagaactctcagacggaatatagtaaaacttgttttataagttccgttaagcacacccagtcagaaaatggcaataaagaccatatagatgagagtggggaaaatgaggaagaagcaggtcttgaaaactcttcggaaatttctgcagatgagtggagcaggggaaatatacttaaaaattcagtgggagagaatattgaacctgtgaaaattttagtgcctgaaaaaagtttaccatgtaaagtaagtaataataattatccaatccctgaacaaatgaatcttaatgaagattcatgtaacaaaaaatcaaatgtaatagataataaatctggaaaagttacagcttatgatttacttagcaatcgagtaatcaagaaacccatgtcagcaagtgctctttttgttcaagatcatcgtcctcagtttctcatagaaaatcctaagactagtttagaggatgcaacactacaaattgaagaactgtggaagacattgagtgaagaggaaaaactgaaatatgaagagaaggctactaaagacttggaacgatacaatagtcaaatgaagagagccattgaacaggagtcacaaatgtcactaaaagatggcagaaaaaagataaaacccaccagcgcatggaatttggcccagaagcacaagttaaaaacctcattatctaatcaaccaaaacttgatgaactccttcagtcccaaattgaaaaaagaaggagtcaaaatattaaaatggtacagatccccttttctatgaaaaacttaaaaataaattttaagaaacaaaacaaagttgacttagaagagaaggatgaaccttgcttgatccacaatctcaggtttcctgatgcatggctaatgacatccaaaacagaggtaatgttattaaatccatatagagtagaagaagccctgctatttaaaagacttcttgagaatcataaacttcctgcagagccactggaaaagccaattatgttaacagagagtctttttaatggatctcattatttagacgttttatataaaatgacagcagatgaccaaagatacagtggatcaacttacctgtctgatcctcgtcttacagcgaatggtttcaagataaaattgataccaggagtttcaattactgaaaattacttggaaatagaaggaatggctaattgtctcccattctatggagtagcagatttaaaagaaattcttaatgctatattaaacagaaatgcaaaggaagtttatgaatgtagacctcgcaaagtgataagttatttagagggagaagcagtgcgtctatccagacaattacccatgtacttatcaaaagaggacatccaagacattatctacagaatgaagcaccagtttggaaatgaaattaaagagtgtgttcatggtcgcccattttttcatcatttaacctatcttccagaaactacatga

SEQ ID NO: 3201 - DNA, 2855 bp, Homo sapiens
  source 1..2855: mol_type = genomic DNA
ggagcacaacgtcgaaagcagccaatgggagttcaggaggcggagcgcctgtgggagccctggagggaactttcccagtccccgaggcggatcgggtgttgcatccatggagcgagctgagagctcgagtacagaacctgctaaggccatcaaacctattgatcggaagtcagtccatcagatttgctctgggcaggtggtactgagtctaagcactgcggtaaaggagttagtagaaaacagtctggatgctggtgccactaatattgatctaaagcttaaggactatggagtggatcttattgaagtttcagacaatggatgtggggtagaagaagaaaacttcgaaggcttaactctgaaacatcacacatctaagattcaagagtttgccgacctaactcaggttgaaacttttggctttcggggggaagctctgagctcactttgtgcactgagcgatgtcaccatttctacctgccacgcatcggcgaaggttggaactcgactgatgtttgatcacaatgggaaaattatccagaaaaccccctacccccgccccagagggaccacagtcagcgtgcagcagttattttccacactacctgtgcgccataaggaatttcaaaggaatattaagaaggagtatgccaaaatggtccaggtcttacatgcatactgtatcatttcagcaggcatccgtgtaagttgcaccaatcagcttggacaaggaaaacgacagcctgtggtatgcacaggtggaagccccagcataaaggaaaatatcggctctgtgtttgggcagaagcagttgcaaagcctcattccttttgttcagctgccccctagtgactccgtgtgtgaagagtacggtttgagctgttccgatgctctgcataatcttttttacatctcaggtttcatttcacaatgcacgcatggagttggaaggagttcaacagacagacagtttttctttatcaaccggcggccttgtgacccagcaaaggtctgcagactcgtgaatgaggtctaccacatgtataatcgacaccagtatccatttgttgttcttaacatttctgttgattcagaatgcgttgatatcaatgttactccagataaaaggcaaattttgctacaagaggaaaagcttttgttggcagttttaaagacctctttgataggaatgtttgatagtgatgtcaacaagctaaatgtcagtcagcagccactgctggatgttgaaggtaacttaataaaaatgcatgcagcggatttggaaaagcccatggtagaaaagcaggatcaatccccttcattaaggactggagaagaaaaaaaagacgtgtccatttccagactgcgagaggccttttctcttcgtcacacaacagagaacaagcctcacagcccaaagactccagaaccaagaaggagccctctaggacagaaaaggggtatgctgtcttctagcacttcaggtgccatctctgacaaaggcgtcctgagacctcagaaagaggcagtgagttccagtcacggacccagtgaccctacggacagagcggaggtggagaaggactcggggcacggcagcacttccgtggattctgaggggttcagcatcccagacacgggcagtcactgcagcagcgagtatgcggccagctccccaggggacaggggctcgcaggaacatgtggactctcaggagaaagcgcctaaaactgacgactctttttcagatgtggactgccattcaaaccaggaagataccggatgtaaatttcgagttttgcctcagccaactaatctcgcaaccccaaacacaaagcgttttaaaaaagaagaaattctttccagttctgacatttgtcaaaagttagtaaatactcaggacatgtcagcctctcaggttgatgtagctgtgaaaattaataagaaagttgtgcccctggacttttctatgagttctttagctaaacgaataaagcagttacatcatgaagcacagcaaagtgaaggggaacagaattacaggaagtttagggcaaagatttgtcctggagaaaatcaagcagccgaagatgaactaagaaaagagataagtaaaacgatgtttgcagaaatggaaatcattggtcagtttaacctgggatttataataaccaaactgaatgaggatatcttcatagtggaccagcatgccacggacgagaagtataacttcgagatgctgcagcagcacaccgtgctccaggggcagaggctcatagcacctcagactctcaacttaactgctgttaatgaagctgttctgatagaaaatctggaaatatttagaaagaatggctttgattttgttatcgatgaaaatgctccagtcactgaaagggctaaactgatttccttgccaactagtaaaaactggaccttcggaccccaggacgtcgatgaactgatcttcatgctgagcgacagccctggggtcatgtgccggccttcccgagtcaagcagatgtttgcctccagagcctgccggaagtcggtgatgattgggactgctcttaacacaagcgagatgaagaaactgatcacccacatgggggagatggaccacccctggaactgtccccatggaaggccaaccatgagacacatcgccaacctgggtgtcatttctcagaactgaccgtagtcactgtatggaataattggttttatcgcagatttttatgttttgaaagacagagtcttcactaaccttttttgttttaaaatgaacctgctacttaaaaaaaatacacatcacacccatttaaaagtgatcttgagaaccttttcaaaccaga

SEQ ID NO: 3202 - DNA, 1386 bp, Homo sapiens
  source 1..1386: mol_type = genomic DNA
atggagcgagctgagagctcgagtacagaacctgctaaggccatcaaacctattgatcggaagtcagtccatcagatttgctctgggcaggtggtactgagtctaagcactgcggtaaaggagttagtagaaaacagtctggatgctggtgccactaatattgatctaaagcttaaggactatggagtggatcttattgaagtttcagacaatggatgtggggtagaagaagaaaacttcgaaggcttaactctgaaacatcacacatctaagattcaagagtttgccgacctaactcaggttgaaacttttggctttcggggggaagctctgagctcactttgtgcactgagcgatgtcaccatttctacctgccacgcatcggcgaaggttggaactcgactgatgtttgatcacaatgggaaaattatccagaaaaccccctacccccgccccagagggaccacagtcagcgtgcagcagttattttccacactacctgtgcgccataaggaatttcaaaggaatattaagaaggagtatgccaaaatggtccaggtcttacatgcatactgtatcatttcagcaggcatccgtgtaagttgcaccaatcagcttggacaaggaaaacgacagcctgtggtatgcacaggtggaagccccagcataaaggaaaatatcggctctgtgtttgggcagaagcagttgcaaagcctcattccttttgttcagctgccccctagtgactccgtgtgtgaagagtacggtttgagctgttccgatgctctgcataatcttttttataaaacgatgtttgcagaaatggaaatcattggtcagtttaacctgggatttataataaccaaactgaatgaggatatcttcatagtggaccagcatgccacggacgagaagtataacttcgagatgctgcagcagcacaccgtgctccaggggcagaggctcatagcacctcagactctcaacttaactgctgttaatgaagctgttctgatagaaaatctggaaatatttagaaagaatggctttgattttgttatcgatgaaaatgctccagtcactgaaagggctaaactgatttccttgccaactagtaaaaactggaccttcggaccccaggacgtcgatgaactgatcttcatgctgagcgacagccctggggtcatgtgccggccttcccgagtcaagcagatgtttgcctccagagcctgccggaagtcggtgatgattgggactgctcttaacacaagcgagatgaagaaactgatcacccacatgggggagatggaccacccctggaactgtccccatggaaggccaaccatgagacacatcgccaacctgggtgtcatttctcagaactga

SEQ ID NO: 3203 - DNA, 2678 bp, Homo sapiens
  source 1..2678: mol_type = genomic DNA
gagttcaggaggcggagcgcctgtgggagccctggagggaactttcccagtccccgaggcggatcgggtgttgcatccatggagcgagctgagagctcgagatctaagcttaaggactatggagtggatcttattgaagtttcagacaatggatgtggggtagaagaagaaaacttcgaaggcttaactctgaaacatcacacatctaagattcaagagtttgccgacctaactcaggttgaaacttttggctttcggggggaagctctgagctcactttgtgcactgagcgatgtcaccatttctacctgccacgcatcggcgaaggttggaactcgactgatgtttgatcacaatgggaaaattatccagaaaaccccctacccccgccccagagggaccacagtcagcgtgcagcagttattttccacactacctgtgcgccataaggaatttcaaaggaatattaagaaggagtatgccaaaatggtccaggtcttacatgcatactgtatcatttcagcaggcatccgtgtaagttgcaccaatcagcttggacaaggaaaacgacagcctgtggtatgcacaggtggaagccccagcataaaggaaaatatcggctctgtgtttgggcagaagcagttgcaaagcctcattccttttgttcagctgccccctagtgactccgtgtgtgaagagtacggtttgagctgttccgatgctctgcataatcttttttacatctcaggtttcatttcacaatgcacgcatggagttggaaggagttcaacagacagacagtttttctttatcaaccggcggccttgtgacccagcaaaggtctgcagactcgtgaatgaggtctaccacatgtataatcgacaccagtatccatttgttgttcttaacatttctgttgattcagaatgcgttgatatcaatgttactccagataaaaggcaaattttgctacaagaggaaaagcttttgttggcagttttaaagacctctttgataggaatgtttgatagtgatgtcaacaagctaaatgtcagtcagcagccactgctggatgttgaaggtaacttaataaaaatgcatgcagcggatttggaaaagcccatggtagaaaagcaggatcaatccccttcattaaggactggagaagaaaaaaaagacgtgtccatttccagactgcgagaggccttttctcttcgtcacacaacagagaacaagcctcacagcccaaagactccagaaccaagaaggagccctctaggacagaaaaggggtatgctgtcttctagcacttcaggtgccatctctgacaaaggcgtcctgagacctcagaaagaggcagtgagttccagtcacggacccagtgaccctacggacagagcggaggtggagaaggactcggggcacggcagcacttccgtggattctgaggggttcagcatcccagacacgggcagtcactgcagcagcgagtatgcggccagctccccaggggacaggggctcgcaggaacatgtggactctcaggagaaagcgcctaaaactgacgactctttttcagatgtggactgccattcaaaccaggaagataccggatgtaaatttcgagttttgcctcagccaactaatctcgcaaccccaaacacaaagcgttttaaaaaagaagaaattctttccagttctgacatttgtcaaaagttagtaaatactcaggacatgtcagcctctcaggttgatgtagctgtgaaaattaataagaaagttgtgcccctggacttttctatgagttctttagctaaacgaataaagcagttacatcatgaagcacagcaaagtgaaggggaacagaattacaggaagtttagggcaaagatttgtcctggagaaaatcaagcagccgaagatgaactaagaaaagagataagtaaaacgatgtttgcagaaatggaaatcattggtcagtttaacctgggatttataataaccaaactgaatgaggatatcttcatagtggaccagcatgccacggacgagaagtataacttcgagatgctgcagcagcacaccgtgctccaggggcagaggctcatagcacctcagactctcaacttaactgctgttaatgaagctgttctgatagaaaatctggaaatatttagaaagaatggctttgattttgttatcgatgaaaatgctccagtcactgaaagggctaaactgatttccttgccaactagtaaaaactggaccttcggaccccaggacgtcgatgaactgatcttcatgctgagcgacagccctggggtcatgtgccggccttcccgagtcaagcagatgtttgcctccagagcctgccggaagtcggtgatgattgggactgctcttaacacaagcgagatgaagaaactgatcacccacatgggggagatggaccacccctggaactgtccccatggaaggccaaccatgagacacatcgccaacctgggtgtcatttctcagaactgaccgtagtcactgtatggaataattggttttatcgcagatttttatgttttgaaagacagagtcttcactaaccttttttgttttaaaatgaacctgctacttaaaaaaaatacacatcacacccatttaaaagtgatcttgagaaccttttc

SEQ ID NO: 3204 - DNA, 1719 bp, Homo sapiens
  source 1..1719: mol_type = genomic DNA
atggagcgagctgagagctcgagtacagaacctgctaaggccatcaaacctattgatcggaagtcagtccatcagatttgctctgggcaggtggtactgagtctaagcactgcggtaaaggagttagtagaaaacagtctggatgctggtgccactaatattgatctaaagcttaaggactatggagtggatcttattgaagtttcagacaatggatgtggggtagaagaagaaaacttcgaaggcttaactctgaaacatcacacatctaagattcaagagtttgccgacctaactcaggttgaaacttttggctttcggggggaagctctgagctcactttgtgcactgagcgatgtcaccatttctacctgccacgcatcggcgaaggttggaactcgactgatgtttgatcacaatgggaaaattatccagaaaaccccctacccccgccccagagggaccacagtcagcgtgcagcagttattttccacactacctgtgcgccataaggaatttcaaaggaatattaagaaggagtatgccaaaatggtccaggtcttacatgcatactgtatcatttcagcaggcatccgtgtaagttgcaccaatcagcttggacaaggaaaacgacagcctgtggtatgcacaggtggaagccccagcataaaggaaaatatcggctctgtgtttgggcagaagcagttgcaaagcctcattccttttgttcagctgccccctagtgactccgtgtgtgaagagtacggtttgagctgttccgatgctctgcataatcttttttacatctcaggtttcatttcacaatgcacgcatggagttggaaggagttcaacagacagacagtttttctttatcaaccggcggccttgtgacccagcaaaggtctgcagactcgtgaatgaggtctaccacatgtataatcgacaccagtatccatttgttgttcttaacatttctgttgattcagaatgcgttgatatcaatgttactccagataaaaggcaaattttgctacaagaggaaaagcttttgttggcagttttaaagacctctttgataggaatgtttgatagtgatgtcaacaagctaaatgtcagtcagcagccactgctggatgttgaaggtaacttaataaaaatgcatgcagcggatttggaaaagcccatggtagaaaagcaggatcaatccccttcattaaggactggagaagaaaaaaaagacgtgtccatttccagactgcgagaggccttttctcttcgtcacacaacagagaacaagcctcacagcccaaagactccagaaccaagaaggagccctctaggacagaaaaggggtatgctgtcttctagcacttcaggtgccatctctgacaaaggcgtcctgagacctcagaaagaggcagtgagttccagtcacggacccagtgaccctacggacagagcggaggtggagaaggactcggggcacggcagcacttccgtggattctgaggggttcagcatcccagacacgggcagtcactgcagcagcgagtatgcggccagctccccaggggacaggggctcgcaggaacatgtggactctcaggagaaagcgcctaaaactgacgactctttttcagatgtggactgccattcaaaccaggaagataccggattaaaaactggaccttcggaccccaggacgtcgatgaactga

SEQ ID NO: 3205 - DNA, 2271 bp, Homo sapiens
  source 1..2271: mol_type = genomic DNA
atgtggggtagaagaagaaaacttcgaaggcttaacgatgtcaccatttctacctgccacgcatcggcgaaggttggaactcgactgatgtttgatcacaatgggaaaattatccagaaaaccccctacccccgccccagagggaccacagtcagcgtgcagcagttattttccacactacctgtgcgccataaggaatttcaaaggaatattaagaaggagtatgccaaaatggtccaggtcttacatgcatactgtatcatttcagcaggcatccgtgtaagttgcaccaatcagcttggacaaggaaaacgacagcctgtggtatgcacaggtggaagccccagcataaaggaaaatatcggctctgtgtttgggcagaagcagttgcaaagcctcattccttttgttcagctgccccctagtgactccgtgtgtgaagagtacggtttgagctgttccgatgctctgcataatcttttttacatctcaggtttcatttcacaatgcacgcatggagttggaaggagttcaacagacagacagtttttctttatcaaccggcggccttgtgacccagcaaaggtctgcagactcgtgaatgaggtctaccacatgtataatcgacaccagtatccatttgttgttcttaacatttctgttgattcagaatgcgttgatatcaatgttactccagataaaaggcaaattttgctacaagaggaaaagcttttgttggcagttttaaagacctctttgataggaatgtttgatagtgatgtcaacaagctaaatgtcagtcagcagccactgctggatgttgaaggtaacttaataaaaatgcatgcagcggatttggaaaagcccatggtagaaaagcaggatcaatccccttcattaaggactggagaagaaaaaaaagacgtgtccatttccagactgcgagaggccttttctcttcgtcacacaacagagaacaagcctcacagcccaaagactccagaaccaagaaggagccctctaggacagaaaaggggtatgctgtcttctagcacttcaggtgccatctctgacaaaggcgtcctgagacctcagaaagaggcagtgagttccagtcacggacccagtgaccctacggacagagcggaggtggagaaggactcggggcacggcagcacttccgtggattctgaggggttcagcatcccagacacgggcagtcactgcagcagcgagtatgcggccagctccccaggggacaggggctcgcaggaacatgtggactctcaggagaaagcgcctaaaactgacgactctttttcagatgtggactgccattcaaaccaggaagataccggatgtaaatttcgagttttgcctcagccaactaatctcgcaaccccaaacacaaagcgttttaaaaaagaagaaattctttccagttctgacatttgtcaaaagttagtaaatactcaggacatgtcagcctctcaggttgatgtagctgtgaaaattaataagaaagttgtgcccctggacttttctatgagttctttagctaaacgaataaagcagttacatcatgaagcacagcaaagtgaaggggaacagaattacaggaagtttagggcaaagatttgtcctggagaaaatcaagcagccgaagatgaactaagaaaagagataagtaaaacgatgtttgcagaaatggaaatcattggtcagtttaacctgggatttataataaccaaactgaatgaggatatcttcatagtggaccagcatgccacggacgagaagtataacttcgagatgctgcagcagcacaccgtgctccaggggcagaggctcatagcacctcagactctcaacttaactgctgttaatgaagctgttctgatagaaaatctggaaatatttagaaagaatggctttgattttgttatcgatgaaaatgctccagtcactgaaagggctaaactgatttccttgccaactagtaaaaactggaccttcggaccccaggacgtcgatgaactgatcttcatgctgagcgacagccctggggtcatgtgccggccttcccgagtcaagcagatgtttgcctccagagcctgccggaagtcggtgatgattgggactgctcttaacacaagcgagatgaagaaactgatcacccacatgggggagatggaccacccctggaactgtccccatggaaggccaaccatgagacacatcgccaacctgggtgtcatttctcagaactga

SEQ ID NO: 3206 - DNA, 2227 bp, Homo sapiens
  source 1..2227: mol_type = genomic DNA
agtggcgcgcaggcttttgtaacgttcccagcgccgcgtttgaattcggggaggagcggagcggtgcggaggctctgctcggatcgaggtctgcagcgcagcttcgggagcatgagtgctgcagtgactgcagggaagctggcacgggcaccggccgaccctgggaaagccggggtccccggagttgcagctcccggagctccggcggcggctccaccggcgaaagagatcccggaggtcctagtggacccacgcagccggcggcgctatgtgcggggccgctttttgggcaagggcggctttgccaagtgcttcgagatctcggacgcggacaccaaggaggtgttcgcgggcaagattgtgcctaagtctctgctgctcaagccgcaccagagggagaagatgtccatggaaatatccattcaccgcagcctcgcccaccagcacgtcgtaggattccacggctttttcgaggacaacgacttcgtgttcgtggtgttggagctctgccgccggaggtctctcctggagctgcacaagaggaggaaagccctgactgagcctgaggcccgatactacctacggcaaattgtgcttggctgccagtacctgcaccgaaaccgagttattcatcgagacctcaagctgggcaaccttttcctgaatgaagatctggaggtgaaaataggggattttggactggcaaccaaagtcgaatatgacggggagaggaagaagaccctgtgtgggactcctaattacatagctcccgaggtgctgagcaagaaagggcacagtttcgaggtggatgtgtggtccattgggtgtatcatgtataccttgttagtgggcaaaccaccttttgagacttcttgcctaaaagagacctacctccggatcaagaagaatgaatacagtattcccaagcacatcaaccccgtggccgcctccctcatccagaagatgcttcagacagatcccactgcccgcccaaccattaacgagctgcttaatgacgagttctttacttctggctatatccctgcccgtctccccatcacctgcctgaccattccaccaaggttttcgattgctcccagcagcctggaccccagcaaccggaagcccctcacagtcctcaataaaggcttggagaaccccctgcctgagcgtccccgggaaaaagaagaaccagtggttcgagagacaggtgaggtggtcgactgccacctcagtgacatgctgcagcagctgcacagtgtcaatgcctccaagccctcggagcgtgggctggtcaggcaagaggaggctgaggatcctgcctgcatccccatcttctgggtcagcaagtgggtggactattcggacaagtacggccttgggtatcagctctgtgataacagcgtgggggtgctcttcaatgactcaacacgcctcatcctctacaatgatggtgacagcctgcagtacatagagcgtgacggcactgagtcctacctcaccgtgagttcccatcccaactccttgatgaagaagatcaccctccttaaatatttccgcaattacatgagcgagcacttgctgaaggcaggtgccaacatcacgccgcgcgaaggtgatgagctcgcccggctgccctacctacggacctggttccgcacccgcagcgccatcatcctgcacctcagcaacggcagcgtgcagatcaacttcttccaggatcacaccaagctcatcttgtgcccactgatggcagccgtgacctacatcgacgagaagcgggacttccgcacataccgcctgagtctcctggaggagtacggctgctgcaaggagctggccagccggctccgctacgcccgcactatggtggacaagctgctgagctcacgctcggccagcaaccgtctcaaggcctcctaatagctgccctcccctccggactggtgccctcctcactcccacctgcatctggggcccatactggttggctcccgcggtgccatgtctgcagtgtgccccccagccccggtggctgggcagagctgcatcatccttgcaggtgggggttgctgtataagttatttttgtacatgttcgggtgtgggttctacagccttgtccccctccccctcaaccccaccatatgaattgtacagaatatttctattgaattcggaactgtcctttccttggctttatgcacattaaacagatgtgaatattc

SEQ ID NO: 3207 - DNA, 894 bp, Homo sapiens
  source 1..894: mol_type = genomic DNA
agcatgagtgctgcagtgactgcagggaagctggcacgggcaccggccgaccctgggaaagccggggtccccggagttgcagctcccggagctccggcggcggctccaccggcgaaagagatcccggaggtcctagtggacccacgcagccggcggcgctatgtgcggggccgctttttgggcaagggcggctttgccaagtgcttcgagatctcggacgcggacaccaaggaggtgttcgcgggcaagattgtgcctaagtctctgctgctcaagccgcaccagagggagaagatgtccatggaaatatccattcaccgcagcctcgcccaccagcacgtcgtaggattccacggctttttcgaggacaacgacttcgtgttcgtggtgttggagctctgccgccggaggtctctcctggagctgcacaagaggaggaaagccctgactgagcctgaggcccgatactacctacggcaaattgtgcttggctgccagtacctgcaccgaaaccgagttattcatcgagacctcaagctgggcaaccttttcctgaatgaagatctggaggtgaaaataggggattttggactggcaaccaaagtcgaatatgacggggagaggaagaagaccctgtgtgggactcctaattacatagctcccgcggtgccatgtctgcagtgtgccccccagccccggtggctgggcagagctgcatcatccttgcaggtgggggttgctgtataagttatttttgtacatgttcgggtgtgggttctacagccttgtccccctccccctcaaccccaccatatgaattgtacagaatatttctattgaattcggaactgtcctttccttggctttatgcacattaaacagatgtgaatattc

SEQ ID NO: 3208 - DNA, 1893 bp, Homo sapiens
  source 1..1893: mol_type = genomic DNA
ctctgctcggatcgaggtctgcagcgcagcttcgggagcatgagtgctgcagtgactgcagggagaagatgtccatggaaatatccattcaccgcagcctcgcccaccagcacgtcgtaggattccacggctttttcgaggacaacgacttcgtgttcgtggtgttggagctctgccgccggaggtctctcctggagctgcacaagaggaggaaagccctgactgagcctgaggcccgatactacctacggcaaattgtgcttggctgccagtacctgcaccgaaaccgagttattcatcgagacctcaagctgggcaaccttttcctgaatgaagatctggaggtgaaaataggggattttggactggcaaccaaagtcgaatatgacggggagaggaagaagaccctgtgtgggactcctaattacatagctcccgaggtgctgagcaagaaagggcacagtttcgaggtggatgtgtggtccattgggtgtatcatgtataccttgttagtgggcaaaccaccttttgagacttcttgcctaaaagagacctacctccggatcaagaagaatgaatacagtattcccaagcacatcaaccccgtggccgcctccctcatccagaagatgcttcagacagatcccactgcccgcccaaccattaacgagctgcttaatgacgagttctttacttctggctatatccctgcccgtctccccatcacctgcctgaccattccaccaaggttttcgattgctcccagcagcctggaccccagcaaccggaagcccctcacagtcctcaataaaggcttggagaaccccctgcctgagcgtccccgggaaaaagaagaaccagtggttcgagagacaggtgaggtggtcgactgccacctcagtgacatgctgcagcagctgcacagtgtcaatgcctccaagccctcggagcgtgggctggtcaggcaagaggaggctgaggatcctgcctgcatccccatcttctgggtcagcaagtgggtggactattcggacaagtacggccttgggtatcagctctgtgataacagcgtgggggtgctcttcaatgactcaacacgcctcatcctctacaatgatggtgacagcctgcagtacatagagcgtgacggcactgagtcctacctcaccgtgagttcccatcccaactccttgatgaagaagatcaccctccttaaatatttccgcaattacatgagcgagcacttgctgaaggcaggtgccaacatcacgccgcgcgaaggtgatgagctcgcccggctgccctacctacggacctggttccgcacccgcagcgccatcatcctgcacctcagcaacggcagcgtgcagatcaacttcttccaggatcacaccaagctcatcttgtgcccactgatggcagccgtgacctacatcgacgagaagcgggacttccgcacataccgcctgagtctcctggaggagtacggctgctgcaaggagctggccagccggctccgctacgcccgcactatggtggacaagctgctgagctcacgctcggccagcaaccgtctcaaggcctcctaatagctgccctcccctccggactggtgccctcctcactcccacctgcatctggggcccatactggttggctcccgcggtgccatgtctgcagtgtgccccccagccccggtggctgggcagagctgcatcatccttgcaggtgggggttgctgtataagttatttttgtacatgttcgggtgtgggttctacagccttgtccccctccccctcaaccccaccatatgaattgtacagaatatttctattgaattcggaactgtcctttccttggctttatgcacattaaacagatgtgaatattc

SEQ ID NO: 3209 - DNA, 2492 bp, Homo sapiens
  source 1..2492: mol_type = genomic DNA
tgggggaggagcttctgggtgatgtaaggccgggaatgggagtggcctctcctcgactcgctgctaggaagggggcgggactctcggtgaccagacgccggggagggggcaggcgttcattgataaaacgctgggctcccctgggcgccagcgcagcgtagcaaatccaggcagcgccacgcgcggccggggccgggcggaaccgagaagccgggaccgcgctgcgacgcgccggccgcatggagcctgccgccggtttcctgtctccgcgccccttccagcgtgcggccgccgcgcccgctcccccggccgggcccgggccgcctccgagtgccttgcgcggacctgagctggagatgctggccgggctaccgacgtcagaccccgggcgcctcatcacggacccgcgcagcggccgcacctacctcaaaggccgcttgttgggcaaggggggcttcgcccgctgctacgaggccactgacacagagactggcagcgcctacgctgtcaaagtcatcccgcagagccgcgtcgccaagccgcatcagcgcgagaagatcctaaatgagattgagctgcaccgagacctgcagcaccgccacatcgtgcgtttttcgcaccactttgaggacgctgacaacatctacattttcttggagctctgcagccgaaagtccctggcccacatctggaaggcccggcacaccctgttggagccagaagtgcgctactacctgcggcagatcctttctggcctcaagtacttgcaccagcgcggcatcttgcaccgggacctcaagttgggaaattttttcatcactgagaacatggaactgaaggtgggggattttgggctggcagcccggttggagcctccggagcagaggaagaagaccatctgtggcacccccaactatgtggctccagaagtgctgctgagacagggccacggccctgaggcggatgtatggtcactgggctgtgtcatgtacacgctgctctgcgggagccctccctttgagacggctgacctgaaggagacgtaccgctgcatcaagcaggttcactacacgctgcctgccagcctctcactgcctgcccggcagctcctggccgccatccttcgggcctcaccccgagaccgcccctctattgaccagatcctgcgccatgacttctttaccaagggctacacccccgatcgactccctatcagcagctgcgtgacagtcccagacctgacaccccccaacccagctaggagtctgtttgccaaagttaccaagagcctctttggcagaaagaagaagagtaagaatcatgcccaggagagggatgaggtctccggtttggtgagcggcctcatgcgcacatccgttggccatcaggatgccaggccagaggctccagcagcttctggcccagcccctgtcagcctggtagagacagcacctgaagacagctcaccccgtgggacactggcaagcagtggagatggatttgaagaaggtctgactgtggccacagtagtggagtcagccctttgtgctctgagaaattgtatagccttcatgcccccagcggaacagaacccggcccccctggcccagccagagcctctggtgtgggtcagcaagtgggttgactactccaataagttcggctttgggtatcaactgtccagccgccgtgtggctgtgctcttcaacgatggcacacatatggccctgtcggccaacagaaagactgtgcactacaatcccaccagcacaaagcacttctccttctccgtgggtgctgtgccccgggccctgcagcctcagctgggtatcctgcggtacttcgcctcctacatggagcagcacctcatgaagggtggagatctgcccagtgtggaagaggtagaggtacctgctccgcccttgctgctgcagtgggtcaagacggatcaggctctcctcatgctgtttagtgatggcactgtccaggtgaacttctacggggaccacaccaagctgattctcagtggctgggagcccctccttgtgacttttgtggcccgaaatcgtagtgcttgtacttacctcgcttcccaccttcggcagctgggctgctctccagacctgcggcagcgactccgctatgctctgcgcctgctccgggaccgcagcccagcctaggacccaagccctgaggcctgaggcctgtgcctgtcaggctctggcccttgcctttgtggccttcccccttcctttggtgcctcactgggggctttgggccgaatcccccagggaatcagggaccagctttactggagttgggggcggcttgtcttcgctggctcctaccccatctccaagataagcctgagccttagctcccagctagggggcgttatttatggaccacttttatttattgtcagacacttatttattgggatgtgagccccaggggggcctcctcctaggataataaacaattttgcagaa

SEQ ID NO: 3210 - DNA, 2174 bp, Homo sapiens
  source 1..2174: mol_type = genomic DNA
tccaggcagcgccacgcgcggccggggccgggcggaaccgagaagccgggaccgcgctgcgacgcgccggccgcatggagcctgccgccggtttcctgtctccgcacctacctcaaaggccgcttgttgggcaaggggggcttcgcccgctgctacgaggccactgacacagagactggcagcgcctacgctgtcaaagtcatcccgcagagccgcgtcgccaagccgcatcagcgcgagaagatcctaaatgagattgagctgcaccgagacctgcagcaccgccacatcgtgcgtttttcgcaccactttgaggacgctgacaacatctacattttcttggagctctgcagccgaaagtccctggcccacatctggaaggcccggcacaccctgttggagccagaagtgcgctactacctgcggcagatcctttctggcctcaagtacttgcaccagcgcggcatcttgcaccgggacctcaagttgggaaattttttcatcactgagaacatggaactgaaggtgggggattttgggctggcagcccggttggagcctccggagcagaggaagaagaccatctgtggcacccccaactatgtggctccagaagtgctgctgagacagggccacggccctgaggcggatgtatggtcactgggctgtgtcatgtacacgctgctctgcgggagccctccctttgagacggctgacctgaaggagacgtaccgctgcatcaagcaggttcactacacgctgcctgccagcctctcactgcctgcccggcagctcctggccgccatccttcgggcctcaccccgagaccgcccctctattgaccagatcctgcgccatgacttctttaccaagggctacacccccgatcgactccctatcagcagctgcgtgacagtcccagacctgacaccccccaacccagctaggagtctgtttgccaaagttaccaagagcctctttggcagaaagaagaagagtaagaatcatgcccaggagagggatgaggtctccggtttggtgagcggcctcatgcgcacatccgttggccatcaggatgccaggccagaggctccagcagcttctggcccagcccctgtcagcctggtagagacagcacctgaagacagctcaccccgtgggacactggcaagcagtggagatggatttgaagaaggtctgactgtggccacagtagtggagtcagccctttgtgctctgagaaattgtatagccttcatgcccccagcggaacagaacccggcccccctggcccagccagagcctctggtgtgggtcagcaagtgggttgactactccaataagttcggctttgggtatcaactgtccagccgccgtgtggctgtgctcttcaacgatggcacacatatggccctgtcggccaacagaaagactgtgcactacaatcccaccagcacaaagcacttctccttctccgtgggtgctgtgccccgggccctgcagcctcagctgggtatcctgcggtacttcgcctcctacatggagcagcacctcatgaagggtggagatctgcccagtgtggaagaggtagaggtacctgctccgcccttgctgctgcagtgggtcaagacggatcaggctctcctcatgctgtttagtgatggcactgtccaggtgaacttctacggggaccacaccaagctgattctcagtggctgggagcccctccttgtgacttttgtggcccgaaatcgtagtgcttgtacttacctcgcttcccaccttcggcagctgggctgctctccagacctgcggcagcgactccgctatgctctgcgcctgctccgggaccgcagcccagcctaggacccaagccctgaggcctgaggcctgtgcctgtcaggctctggcccttgcctttgtggccttcccccttcctttggtgcctcactgggggctttgggccgaatcccccagggaatcagggaccagctttactggagttgggggcggcttgtcttcgctggctcctaccccatctccaagataagcctgagccttagctcccagctagggggcgttatttatggaccacttttatttattgtcagacacttatttattgggatgtgagccccaggggggcctcctcctaggataataaacaattttgc

SEQ ID NO: 3211 - DNA, 3841 bp, Homo sapiens
  source 1..3841: mol_type = genomic DNA
agcctatccggagcgatccatctcgttacgtcaccaccagcctagctcggacggcaagcggcgggagattttcaaaatgggagcccagaggcaccgcccaggcctcggaaggtgtcagggagaactttccgtggtttcagcgtcgtcgcctggagcggcggtttagagagccgagcctgatgggcgccaaggccggctggctgcttggagcgctgcctcgaagggactgcgtgaaggaagctaatccggagaacccaggccagagcctggaaatatggcgacctgcatcggggagaagatcgaggattttaaagttggaaatctgcttggtaaaggatcatttgctggtgtctacagagctgagtccattcacactggtttggaagttgcaatcaaaatgatagataagaaagccatgtacaaagcaggaatggtacagagagtccaaaatgaggtgaaaatacattgccaattgaaacatccttctatcttggagctttataactattttgaagatagcaattatgtgtatctggtattagaaatgtgccataatggagaaatgaacaggtatctaaagaatagagtgaaacccttctcagaaaatgaagctcgacacttcatgcaccagatcatcacagggatgttgtatcttcattctcatggtatactacaccgggacctcacactttctaacctcctactgactcgtaatatgaacatcaagattgctgattttgggctggcaactcaactgaaaatgccacatgaaaagcactatacattatgtggaactcctaactacatttcaccagaaattgccactcgaagtgcacatggccttgaatctgatgtttggtccctgggctgtatgttttatacattacttatcgggagaccacccttcgacactgacacagtcaagaacacattaaataaagtagtattggcagattatgaaatgccatcttttttgtcaatagaggccaaggaccttattcaccagttacttcgtagaaatccagcagatcgtttaagtctgtcttcagtattggaccatccttttatgtcccgaaattcttcaacaaaaagtaaagatttaggaactgtggaagactcaattgatagtgggcatgccacaatttctactgcaattacagcttcttccagtaccagtataagtggtagtttatttgacaaaagaagacttttgattggtcagccactcccaaataaaatgactgtatttccaaagaataaaagttcaactgatttttcttcttcaggagatggaaacagtttttatactcagtggggaaatcaagaaaccagtaatagtggaaggggaagagtaattcaagatgcagaagaaaggccacattctcgataccttcgtagagcttattcctctgatagatctggcacttctaatagtcagtctcaagcaaaaacatatacaatggaacgatgtcactcagcagaaatgctttcagtgtccaaaagatcaggaggaggtgaaaatgaagagaggtactcacccacagacaacaatgccaacatttttaacttctttaaagaaaagacatccagtagttctggatcttttgaaagacctgataacaatcaagcactctccaatcatctttgtccaggaaaaactccttttccatttgcagacccgacacctcagactgaaaccgtacaacagtggtttgggaatctgcaaataaatgctcatttaagaaaaactactgaatatgacagcatcagcccaaaccgggacttccagggccatccagatttgcagaaggacacatcaaaaaatgcctggactgatacaaaagtcaaaaagaactctgatgcttctgataatgcacattctgtaaaacagcaaaataccatgaaatatatgactgcacttcacagtaaacctgagataatccaacaagaatgtgtttttggctcagatcctctttctgaacagagcaagactaggggtatggagccaccatggggttatcagaatcgtacattaagaagcattacatctccgttggttgctcacaggttaaaaccaatcagacagaaaaccaaaaaggctgtggtgagcatacttgattcagaggaggtgtgtgtggagcttgtaaaggagtatgcatctcaagaatatgtgaaagaagttcttcagatatctagtgatggaaatacgatcactatttattatccaaatggtggtagaggttttcctcttgctgatagaccaccctcacctactgacaacatcagtaggtacagctttgacaatttaccagaaaaatactggcgaaaatatcaatatgcttccaggtttgtacagcttgtaagatctaaatctcccaaaatcacttattttacaagatatgctaaatgcattttgatggagaattctcctggtgctgattttgaggtttggttttatgatggggtaaaaatacacaaaacagaagatttcattcaggtgattgaaaagacagggaagtcttacactttaaaaagtgaaagtgaagttaatagcttgaaagaggagataaaaatgtatatggaccatgctaatgagggtcatcgtatttgtttagcactggaatccataatttcagaagaggaaaggaaaactaggagtgctccctttttcccaataatcataggaagaaaacctggtagtactagttcacctaaggccttatcacctcctccttctgtggattcaaattacccaacgagagagagagcatctttcaacagaatggtcatgcatagtgctgcttctccaacacaggcaccaatccttaatccctctatggttacaaatgaaggacttggtcttacaactacagcttctggaacagacatctcttctaatagtctaaaagattgtcttcctaaatcagcacaacttttgaaatctgtttttgtgaaaaatgttggttgggctacacagttaactagtggagctgtgtgggttcagtttaatgatgggtcccagttggttgtgcaggcaggagtgtcttctatcagttatacctcaccaaatggtcaaacaactaggtatggagaaaatgaaaaattaccagactacatcaaacagaaattacagtgtctgtcttccatccttttgatgttttctaatccgactcctaattttcattgattaaaactcctttcagacatataagtttaataaataacttttttgttgactttcaagtaaagtgattttttttaatttaacataaagtcttcagaaagcctttctatgaaagaattttaacctataatgtaaaggatgtattctgagagaacaaagcagaatgaaacttgagtcacttactaaatatagtggatataaaatagaacacctgactttgctcttagaccataacccccgaacttactatgttcatatatttgtattgaacaatcttttaaaagcaaaaatgtaaatgatgtgtagtttatttgtgcttttattgttttccctgcgtctcagacatgttgagaatcatggacaaaacctgctggaattttggaatttttgaagatgtaaataatgtgtatttatgttataagtaacatatgtaaacatgtatatttgttttatatttatttttgtaacaccagtgtctgatgaaacatttttgcaaatgcattttataaaaaaataaatatagtgataagttacattatcttttgattcatttaattaaatacttatttttaaataacttaccagtaaactcactttttaaattttgttgcctgttgaggagccaattaaattttaaatattaattttgcaaatgtt

SEQ ID NO: 3212 - DNA, 3123 bp, Homo sapiens
  source 1..3123: mol_type = genomic DNA
gattttcaaaatgggagcccagaggcaccgcccaggcctcggaaggtgtcagggagaactttccgtggtttcagcgtcgtcgcctggagcggcggtttagagagccgagcctgatgggcgccaaggccggctggctgcttggagcgctgcctcgaagggactgcgtgaaggaagctaatccggagaacccaggccagagcctggaaatatggcgacctgcatcggggagaagatcgaggattttaaagttggaaatctgcttggtaaaggatcatttgctggtgtctacagagctgagtccattcacactggtttggaagttgcaatcaaaatgctttataactattttgaagatagcaattatgtgtatctggtattagaaatgtgccataatggagaaatgaacaggtatctaaagaatagagtgaaacccttctcagaaaatgaagctcgacacttcatgcaccagatcatcacagggatgttgtatcttcattctcatggtatactacaccgggacctcacactttctaacctcctactgactcgtaatatgaacatcaagattgctgattttgggctggcaactcaactgaaaatgccacatgaaaagcactatacattatgtggaactcctaactacatttcaccagaaattgccactcgaagtgcacatggccttgaatctgatgtttggtccctgggctgtatgttttatacattacttatcgggagaccacccttcgacactgacacagtcaagaacacattaaataaagtagtattggcagattatgaaatgccatcttttttgtcaatagaggccaaggaccttattcaccagttacttcgtagaaatccagcagatcgtttaagtctgtcttcagtattggaccatccttttatgtcccgaaattcttcaacaaaaagtaaagatttaggaactgtggaagactcaattgatagtgggcatgccacaatttctactgcaattacagcttcttccagtaccagtataagtggtagtttatttgacaaaagaagacttttgattggtcagccactcccaaataaaatgactgtatttccaaagaataaaagttcaactgatttttcttcttcaggagatggaaacagtttttatactcagtggggaaatcaagaaaccagtaatagtggaaggggaagagtaattcaagatgcagaagaaaggccacattctcgataccttcgtagagcttattcctctgatagatctggcacttctaatagtcagtctcaagcaaaaacatatacaatggaacgatgtcactcagcagaaatgctttcagtgtccaaaagatcaggaggaggtgaaaatgaagagaggtactcacccacagacaacaatgccaacatttttaacttctttaaagaaaagacatccagtagttctggatcttttgaaagacctgataacaatcaagcactctccaatcatctttgtccaggaaaaactccttttccatttgcagacccgacacctcagactgaaaccgtacaacagtggtttgggaatctgcaaataaatgctcatttaagaaaaactactgaatatgacagcatcagcccaaaccgggacttccagggccatccagatttgcagaaggacacatcaaaaaatgcctggactgatacaaaagtcaaaaagaactctgatgcttctgataatgcacattctgtaaaacagcaaaataccatgaaatatatgactgcacttcacagtaaacctgagataatccaacaagaatgtgtttttggctcagatcctctttctgaacagagcaagactaggggtatggagccaccatggggttatcagaatcgtacattaagaagcattacatctccgttggttgctcacaggttaaaaccaatcagacagaaaaccaaaaaggctgtggtgagcatacttgattcagaggaggtgtgtgtggagcttgtaaaggagtatgcatctcaagaatatgtgaaagaagttcttcagatatctagtgatggaaatacgatcactatttattatccaaatggtggtagaggttttcctcttgctgatagaccaccctcacctactgacaacatcagtaggtacagctttgacaatttaccagaaaaatactggcgaaaatatcaatatgcttccaggtttgtacagcttgtaagatctaaatctcccaaaatcacttattttacaagatatgctaaatgcattttgatggagaattctcctggtgctgattttgaggtttggttttatgatggggtaaaaatacacaaaacagaagatttcattcaggtgattgaaaagacagggaagtcttacactttaaaaagtgaaagtgaagttaatagcttgaaagaggagataaaaatgtatatggaccatgctaatgagggtcatcgtatttgtttagcactggaatccataatttcagaagaggaaaggaaaactaggagtgctccctttttcccaataatcataggaagaaaacctggtagtactagttcacctaaggccttatcacctcctccttctgtggattcaaattacccaacgagagagagagcatctttcaacagaatggtcatgcatagtgctgcttctccaacacaggcaccaatccttaatccctctatggttacaaatgaaggacttggtcttacaactacagcttctggaacagacatctcttctaatagtctaaaagattgtcttcctaaatcagcacaacttttgaaatctgtttttgtgaaaaatgttggttgggctacacagttaactagtggagctgtgtgggttcagtttaatgatgggtcccagttggttgtgcaggcaggagtgtcttctatcagttatacctcaccaaatggtcaaacaactaggtatggagaaaatgaaaaattaccagactacatcaaacagaaattacagtgtctgtcttccatccttttgatgttttctaatccgactcctaattttcattgattaaaactcctttcagacatataagtttaataaataacttttttgttgactttcaagtaaagtgattttttttaatttaacataaagtcttcagaaag

SEQ ID NO: 3213 - DNA, 3060 bp, Homo sapiens
  source 1..3060: mol_type = genomic DNA
gggaaggggagcgaacgaagctaacggctgcggggcgggcaccgaggtgcttagggagggtcccaacggcccagacccctgctgtttaggggcggagcggcccgcccctcaagagacaagagtagggaaggcgggacaggattttaaagttggaaatctgcttggtaaaggatcatttgctggtgtctacagagctgagtccattcacactggtttggaagttgcaatcaaaatgatagataagaaagccatgtacaaagcaggaatggtacagagagtccaaaatgaggtgaaaatacattgccaattgaaacatccttctatcttggagctttataactattttgaagatagcaattatgtgtatctggtattagaaatgtgccataatggagaaatgaacaggtatctaaagaatagagtgaaacccttctcagaaaatgaagctcgacacttcatgcaccagatcatcacagggatgttgtatcttcattctcatggtatactacaccgggacctcacactttctaacctcctactgactcgtaatatgaacatcaagattgctgattttgggctggcaactcaactgaaaatgccacatgaaaagcactatacattatgtggaactcctaactacatttcaccagaaattgccactcgaagtgcacatggccttgaatctgatgtttggtccctgggctgtatgttttatacattacttatcgggagaccacccttcgacactgacacagtcaagaacacattaaataaagtagtattggcagattatgaaatgccatcttttttgtcaatagaggccaaggaccttattcaccagttacttcgtagaaatccagcagatcgtttaagtctgtcttcagtattggaccatccttttatgtcccgaaattcttcaacaaaaagtaaagatttaggaactgtggaagactcaattgatagtgggcatgccacaatttctactgcaattacagcttcttccagtaccagtataagtggtagtttatttgacaaaagaagacttttgattggtcagccactcccaaataaaatgactgtatttccaaagaataaaagttcaactgatttttcttcttcaggagatggaaacagtttttatactcagtggggaaatcaagaaaccagtaatagtggaaggggaagagtaattcaagatgcagaagaaaggccacattctcgataccttcgtagagcttattcctctgatagatctggcacttctaatagtcagtctcaagcaaaaacatatacaatggaacgatgtcactcagcagaaatgctttcagtgtccaaaagatcaggaggaggtgaaaatgaagagaggtactcacccacagacaacaatgccaacatttttaacttctttaaagaaaagacatccagtagttctggatcttttgaaagacctgataacaatcaagcactctccaatcatctttgtccaggaaaaactccttttccatttgcagacccgacacctcagactgaaaccgtacaacagtggtttgggaatctgcaaataaatgctcatttaagaaaaactactgaatatgacagcatcagcccaaaccgggacttccagggccatccagatttgcagaaggacacatcaaaaaatgcctggactgatacaaaagtcaaaaagaactctgatgcttctgataatgcacattctgtaaaacagcaaaataccatgaaatatatgactgcacttcacagtaaacctgagataatccaacaagaatgtgtttttggctcagatcctctttctgaacagagcaagactaggggtatggagccaccatggggttatcagaatcgtacattaagaagcattacatctccgttggttgctcacaggttaaaaccaatcagacagaaaaccaaaaaggctgtggtgagcatacttgattcagaggaggtgtgtgtggagcttgtaaaggagtatgcatctcaagaatatgtgaaagaagttcttcagatatctagtgatggaaatacgatcactatttattatccaaatggtggtagaggttttcctcttgctgatagaccaccctcacctactgacaacatcagtaggtacagctttgacaatttaccagaaaaatactggcgaaaatatcaatatgcttccaggtttgtacagcttgtaagatctaaatctcccaaaatcacttattttacaagatatgctaaatgcattttgatggagaattctcctggtgctgattttgaggtttggttttatgatggggtaaaaatacacaaaacagaagatttcattcaggtgattgaaaagacagggaagtcttacactttaaaaagtgaaagtgaagttaatagcttgaaagaggagataaaaatgtatatggaccatgctaatgagggtcatcgtatttgtttagcactggaatccataatttcagaagaggaaaggaaaactaggagtgctccctttttcccaataatcataggaagaaaacctggtagtactagttcacctaaggccttatcacctcctccttctgtggattcaaattacccaacgagagagagagcatctttcaacagaatggtcatgcatagtgctgcttctccaacacaggcaccaatccttaatccctctatggttacaaatgaaggacttggtcttacaactacagcttctggaacagacatctcttctaatagtctaaaagattgtcttcctaaatcagcacaacttttgaaatctgtttttgtgaaaaatgttggttgggctacacagttaactagtggagctgtgtgggttcagtttaatgatgggtcccagttggttgtgcaggcaggagtgtcttctatcagttatacctcaccaaatggtcaaacaactaggtatggagaaaatgaaaaattaccagactacatcaaacagaaattacagtgtctgtcttccatccttttgatgttttctaatccgactcctaattttcattgattaaaactcctttcagacatataagtttaataaataac

SEQ ID NO: 3214 - DNA, 1886 bp, Homo sapiens
  source 1..1886: mol_type = genomic DNA
ggttgatgacgtcagcgttcgaattccatggcggcgcggcggcgacggagcaccggcggcggcagggcgagagcattaaatgaaagcaaaagagttaataatggcaacacggctccagaagactcttcccctgccaagaaaactcgtagatgccagagacaggagtcgaaaaagatgcctgtggctggaggaaaagctaataaggacaggacagaagacaagcaagatggtatgccaggaaggtcatgggccagcaaaagggtctctgaatctgtgaaggccttgctgttaaagggcaaagctcctgtggacccagagtgtacagccaaggtggggaaggctcatgtgtattgtgaaggaaatgatgtctatgatgtcatgctaaatcagaccaatctccagttcaacaacaacaagtactatctgattcagctattagaagatgatgcccagaggaacttcagtgtttggatgagatggggccgagttgggaaaatgggacagcacagcctggtggcttgttcaggcaatctcaacaaggccaaggaaatctttcagaagaaattccttgacaaaacgaaaaacaattgggaagatcgagaaaagtttgagaaggtgcctggaaaatatgatatgctacagatggactatgccaccaatactcaggatgaagaggaaacaaagaaagaggaatctcttaaatctcccttgaagccagagtcacagctagatcttcgggtacaggagttaataaagttgatctgtaatgttcaggccatggaagaaatgatgatggaaatgaagtataataccaagaaagccccacttgggaagctgacagtggcacaaatcaaggcaggttaccagtctcttaagaagattgaggattgtattcgggctggccagcatggacgagctctcatggaagcatgcaatgaattctacaccaggattccgcatgactttggactccgtactcctccactaatccggacacagaaggaactgtcagaaaaaatacaattactagaggctttgggagacattgaaattgctattaagctggtgaaaacagagctacaaagcccagaacacccattggaccaacactatagaaacctacattgtgccttgcgcccccttgaccatgaaagttatgagttcaaagtgatttcccagtacctacaatctacccatgctcccacacacagcgactataccatgaccttgctggatttgtttgaagtggagaaggatggtgagaaagaagccttcagagaggaccttcataacaggatgcttctatggcatggttccaggatgagtaactgggtgggaatcttgagccatgggcttcgaattgccccacctgaagctcccatcacaggttacatgtttgggaaaggaatctactttgctgacatgtcttccaagagtgccaattactgctttgcctctcgcctaaagaatacaggactgctgctcttatcagaggtagctctaggtcagtgtaatgaactactagaggccaatcctaaggccgaaggattgcttcaaggtaaacatagcaccaaggggctgggcaagatggctcccagttctgcccacttcgtcaccctgaatgggagtacagtgccattaggaccagcaagtgacacaggaattctgaatccagatggttataccctcaactacaatgaatatattgtatataaccccaaccaggtccgtatgcggtaccttttaaaggttcagtttaatttccttcagctgtggtgaatgttgatattaaataaaccagagatctgatcttcaagcaagaaaataagcagtgttgtacttgtgaattttgtgatattttatgtaataaaaactgtacaggtcta

SEQ ID NO: 3215 - DNA, 1881 bp, Homo sapiens
  source 1..1881: mol_type = genomic DNA
ctagtgacactgggcccgcgattccttggagcgggttgatgacgtcagcgttcgaattccatggcggcgcggcggcgacggagcaccggcggcggcagggcgagagcattaaatgaaagcaaaagagttaataatggcaacacggctccagaagactcttcccctgccaagaaaactcgtagatgccagagacaggagtcgaaaaagatgcctgtggctggaggaaaagctaataaggacaggacagaagacaagcaagatgaatctgtgaaggccttgctgttaaagggcaaagctcctgtggacccagagtgtacagccaaggtggggaaggctcatgtgtattgtgaaggaaatgatgtctatgatgtcatgctaaatcagaccaatctccagttcaacaacaacaagtactatctgattcagctattagaagatgatgcccagaggaacttcagtgtttggatgagatggggccgagttgggaaaatgggacagcacagcctggtggcttgttcaggcaatctcaacaaggccaaggaaatctttcagaagaaattccttgacaaaacgaaaaacaattgggaagatcgagaaaagtttgagaaggtgcctggaaaatatgatatgctacagatggactatgccaccaatactcaggatgaagaggaaacaaagaaagaggaatctcttaaatctcccttgaagccagagtcacagctagatcttcgggtacaggagttaataaagttgatctgtaatgttcaggccatggaagaaatgatgatggaaatgaagtataataccaagaaagccccacttgggaagctgacagtggcacaaatcaaggcaggttaccagtctcttaagaagattgaggattgtattcgggctggccagcatggacgagctctcatggaagcatgcaatgaattctacaccaggattccgcatgactttggactccgtactcctccactaatccggacacagaaggaactgtcagaaaaaatacaattactagaggctttgggagacattgaaattgctattaagctggtgaaaacagagctacaaagcccagaacacccattggaccaacactatagaaacctacattgtgccttgcgcccccttgaccatgaaagttatgagttcaaagtgatttcccagtacctacaatctacccatgctcccacacacagcgactataccatgaccttgctggatttgtttgaagtggagaaggatggtgagaaagaagccttcagagaggaccttcataacaggatgcttctatggcatggttccaggatgagtaactgggtgggaatcttgagccatgggcttcgaattgccccacctgaagctcccatcacaggttacatgtttgggaaaggaatctactttgctgacatgtcttccaagagtgccaattactgctttgcctctcgcctaaagaatacaggactgctgctcttatcagaggtagctctaggtcagtgtaatgaactactagaggccaatcctaaggccgaaggattgcttcaaggtaaacatagcaccaaggggctgggcaagatggctcccagttctgcccacttcgtcaccctgaatgggagtacagtgccattaggaccagcaagtgacacaggaattctgaatccagatggttataccctcaactacaatgaatatattgtatataaccccaaccaggtccgtatgcggtaccttttaaaggttcagtttaatttccttcagctgtggtgaatgttgatattaaataaaccagagatctgatcttcaagcaagaaaataagcagtgttgtacttgtgaattttgtgatattttatgtaataaaaactgtacaggtctac

SEQ ID NO: 3216 - DNA, 2336 bp, Homo sapiens
  source 1..2336: mol_type = genomic DNA
ggtcaccgcgcgaccggcagatgcgtgctgcaggccccggccacatgagcagcgctacggacgcgactgccccggccttggatatgccagatcgagtgtccacccgtccgtgggactggtcgcctgactcggcctgccccagcctctgcttcaccccactggtggccaaatagccgatgtctaatcccccacacaagctcatccccggcctctggcgattgttgggaattctctccctaattcacgcctgaggctcatggagagttgctagacctgggactgccctgggaggcgcacacaaccaggccgggtggcagccaggacctctcccatgtccctgcttttcttggccatggctccaaagccgaagccctgggtacagactgagggccctgagaagaagaagggccggcaggcaggaagggaggaggaccccttccgctccaccgctgaggccctcaaggccatacccgcagagaagcgcataatccgcgtggatccaacatgtccactcagcagcaaccccgggacccaggtgtatgaggactacaactgcaccctgaaccagaccaacatcgagaacaacaacaacaagttctacatcatccagctgctccaagacagcaaccgcttcttcacctgctggaaccactggggccgtgtgggagaggtcggccagtcaaagatcaaccacttcacaaggctagaagatgcaaagaaggactttgagaagaaatttcgggaaaagaccaagaacaactgggcagagcgggaccactttgtgtctcacccgggcaagtacacacttatcgaagtacaggcagaggatgaggcccaggaagctgtggtgaaggtggacagaggcccagtgaggactgtgactaagcgggtgcagccctgctccctggacccagccacgcagaagctcatcactaacatcttcagcaaggagatgttcaagaacaccatggccctcatggacctggatgtgaagaagatgcccctgggaaagctgagcaagcaacagattgcacggggtttcgaggccttggaggcgctggaggaggccctgaaaggccccacggatggtggccaaagcctggaggagctgtcctcacacttttacaccgtcatcccgcacaacttcggccacagccagcccccgcccatcaattcccctgagcttctgcaggccaagaaggacatgctgctggtgctggcggacatcgagctggcccaggccctgcaggcagtctctgagcaggagaagacggtggaggaggtgccacaccccctggaccgagactaccagcttctcaagtgccagctgcagctgctagactctggagcacctgagtacaaggtgatacagacctacttagaacagactggcagcaaccacaggtgccctacacttcaacacatctggaaagtaaaccaagaaggggaggaagacagattccaggcccactccaaactgggtaatcggaagctgctgtggcatggcaccaacatggccgtggtggccgccatcctcactagtgggctccgcatcatgccacattctggtgggcgtgttggcaagggcatctactttgcctcagagaacagcaagtcagctggatatgttattggcatgaagtgtggggcccaccatgtcggctacatgttcctgggtgaggtggccctgggcagagagcaccatatcaacacggacaaccccagcttgaagagcccacctcctggcttcgacagtgtcattgcccgaggccacaccgagcctgatccgacccaggacactgagttggagctggatggccagcaagtggtggtgccccagggccagcctgtgccctgcccagagttcagcagctccacattctcccagagcgagtacctcatctaccaggagagccagtgtcgcctgcgctacctgctggaggtccacctctgagtgcccgccctgtcccccggggtcctgcaaggctggactgtgatcttcaatcatcctgcccatctctggtacccctatatcactcctttttttcaagaatacaatacgttgttgttaactatagtcaccatgctgtacaagatccctgaacttatgcctcctaactgaaattttgtattctttgacacatctgcccagtccctctcctcccagcccatggtaaccagcatttgactctttacttgtataagggcagcttttataggttccacatgtaagtgagatcatgcagtgtttgtctttctgtgcctggcttatttcactcagcataatgtgcaccgggttcacccatgttttcataaatgacaagatttcctccttt

SEQ ID NO: 3217 - DNA, 2472 bp, Homo sapiens
  source 1..2472: mol_type = genomic DNA
gtatccgggcccaaggtcaccgcgcgaccggcagatgcgtgctgcaggccccggccacatgagcagcgctacggacgcgactgccccggccttggatatgccagatcgagtgtccacccgtccgtgggactggtcgcctgactcggcctgccccagcctctgcttcaccccactggtggccaaatagccgatgtctaatcccccacacaagctcatccccggcctctggcgattgttgggaattctctccctaattcacgcctgaggctcatggagagttgctagacctgggactgccctgggaggcgcacacaaccaggccgggtggcagccaggacctctcccatgtccctgcttttcttggctcggtgactcggcccggcaaccatgccagggctgaactagctgacacagggggaggagccccgaagtggaagagagagagcctcctttcactttccctacccctcaggacacacaggacagccatggctccaaagccgaagccctgggtacagactgagggccctgagaagaagaagggccggcaggcaggaagggaggaggaccccttccgctccaccgctgaggccctcaaggccatacccgcagagaagcgcataatccgcgtggatccaacatgtccactcagcagcaaccccgggacccaggtgtatgaggactacaactgcaccctgaaccagaccaacatcgagaacaacaacaacaagttctacatcatccagctgctccaagacagcaaccgcttcttcacctgctggaaccactggggccgtgtgggagaggtcggccagtcaaagatcaaccacttcacaaggctagaagatgcaaagaaggactttgagaagaaatttcgggaaaagaccaagaacaactgggcagagcgggaccactttgtgtctcacccgggcaagtacacacttatcgaagtacaggcagaggatgaggcccaggaagctgtggtgaaggtggacagaggcccagtgaggactgtgactaagcgggtgcagccctgctccctggacccagccacgcagaagctcatcactaacatcttcagcaaggagatgttcaagaacaccatggccctcatggacctggatgtgaagaagatgcccctgggaaagctgagcaagcaacagattgcacggggtttcgaggccttggaggcgctggaggaggccctgaaaggccccacggatggtggccaaagcctggaggagctgtcctcacacttttacaccgtcatcccgcacaacttcggccacagccagcccccgcccatcaattcccctgagcttctgcaggccaagaaggacatgctgctggtgctggcggacatcgagctggcccaggccctgcaggcagtctctgagcaggagaagacggtggaggaggtgccacaccccctggaccgagactaccagcttctcaagtgccagctgcagctgctagactctggagcacctgagtacaaggtgatacagacctacttagaacagactggcagcaaccacaggtgccctacacttcaacacatctggaaagtaaaccaagaaggggaggaagacagattccaggcccactccaaactgggtaatcggaagctgctgtggcatggcaccaacatggccgtggtggccgccatcctcactagtgggctccgcatcatgccacattctggtgggcgtgttggcaagggcatctactttgcctcagagaacagcaagtcagctggatatgttattggcatgaagtgtggggcccaccatgtcggctacatgttcctgggtgaggtggccctgggcagagagcaccatatcaacacggacaaccccagcttgaagagcccacctcctggcttcgacagtgtcattgcccgaggccacaccgagcctgatccgacccaggacactgagttggagctggatggccagcaagtggtggtgccccagggccagcctgtgccctgcccagagttcagcagctccacattctcccagagcgagtacctcatctaccaggagagccagtgtcgcctgcgctacctgctggaggtccacctctgagtgcccgccctgtcccccggggtcctgcaaggctggactgtgatcttcaatcatcctgcccatctctggtacccctatatcactcctttttttcaagaatacaatacgttgttgttaactatagtcaccatgctgtacaagatccctgaacttatgcctcctaactgaaattttgtattctttgacacatctgcccagtccctctcctcccagcccatggtaaccagcatttgactctttacttgtataagggcagcttttataggttccacatgtaagtgagatcatgcagtgtttgtctttctgtgcctggcttatttcactcagcataatgtgcaccgggttcacccatgttttcataaatgacaagatttcctccttt

SEQ ID NO: 3218 - DNA, 2360 bp, Homo sapiens
  source 1..2360: mol_type = genomic DNA
gtatccgggcccaaggtcaccgcgcgaccggcagatgcgtgctgcaggccccggccacatgagcagcgctacggacgcgactgccccggccttggatatgccagatcgagtgtccacccgtccgtgggactggtcgcctgactcggcctgccccagcctctgcttcaccccactggtggccaaatagccgatgtctaatcccccacacaagctcatccccggcctctggcgattgttgggaattctctccctaattcacgcctgaggctcatggagagttgctagacctgggactgccctgggaggcgcacacaaccaggccgggtggcagccaggacctctcccatgtccctgcttttcttgggacagccatggctccaaagccgaagccctgggtacagactgagggccctgagaagaagaagggccggcaggcaggaagggaggaggaccccttccgctccaccgctgaggccctcaaggccatacccgcagagaagcgcataatccgcgtggatccaacatgtccactcagcagcaaccccgggacccaggtgtatgaggactacaactgcaccctgaaccagaccaacatcgagaacaacaacaacaagttctacatcatccagctgctccaagacagcaaccgcttcttcacctgctggaaccactggggccgtgtgggagaggtcggccagtcaaagatcaaccacttcacaaggctagaagatgcaaagaaggactttgagaagaaatttcgggaaaagaccaagaacaactgggcagagcgggaccactttgtgtctcacccgggcaagtacacacttatcgaagtacaggcagaggatgaggcccaggaagctgtggtgaaggtggacagaggcccagtgaggactgtgactaagcgggtgcagccctgctccctggacccagccacgcagaagctcatcactaacatcttcagcaaggagatgttcaagaacaccatggccctcatggacctggatgtgaagaagatgcccctgggaaagctgagcaagcaacagattgcacggggtttcgaggccttggaggcgctggaggaggccctgaaaggccccacggatggtggccaaagcctggaggagctgtcctcacacttttacaccgtcatcccgcacaacttcggccacagccagcccccgcccatcaattcccctgagcttctgcaggccaagaaggacatgctgctggtgctggcggacatcgagctggcccaggccctgcaggcagtctctgagcaggagaagacggtggaggaggtgccacaccccctggaccgagactaccagcttctcaagtgccagctgcagctgctagactctggagcacctgagtacaaggtgatacagacctacttagaacagactggcagcaaccacaggtgccctacacttcaacacatctggaaagtaaaccaagaaggggaggaagacagattccaggcccactccaaactgggtaatcggaagctgctgtggcatggcaccaacatggccgtggtggccgccatcctcactagtgggctccgcatcatgccacattctggtgggcgtgttggcaagggcatctactttgcctcagagaacagcaagtcagctggatatgttattggcatgaagtgtggggcccaccatgtcggctacatgttcctgggtgaggtggccctgggcagagagcaccatatcaacacggacaaccccagcttgaagagcccacctcctggcttcgacagtgtcattgcccgaggccacaccgagcctgatccgacccaggacactgagttggagctggatggccagcaagtggtggtgccccagggccagcctgtgccctgcccagagttcagcagctccacattctcccagagcgagtacctcatctaccaggagagccagtgtcgcctgcgctacctgctggaggtccacctctgagtgcccgccctgtcccccggggtcctgcaaggctggactgtgatcttcaatcatcctgcccatctctggtacccctatatcactcctttttttcaagaatacaatacgttgttgttaactatagtcaccatgctgtacaagatccctgaacttatgcctcctaactgaaattttgtattctttgacacatctgcccagtccctctcctcccagcccatggtaaccagcatttgactctttacttgtataagggcagcttttataggttccacatgtaagtgagatcatgcagtgtttgtctttctgtgcctggcttatttcactcagcataatgtgcaccgggttcacccatgttttcataaatgacaagatttcctccttttttaa

SEQ ID NO: 3219 - DNA, 1040 bp, Homo sapiens
  source 1..1040: mol_type = genomic DNA
ggagaccatggaggcctaagggcctctctgtgccccaggacagccatggctccaaagccgaagccctgggtacagactgagggccctgagaagaagaagggccggcaggcaggaagggaggaggaccccttccgctccaccgctgaggccctcaaggccatacccgcagagaagcgcataatccgcgtggatccaacatgtccactcagcagcaaccccgggacccaggtgtatgaggactacaactgcaccctgaaccagaccaacatcgagaacaacaacaacaagttctacatcatccagctgctccaagacagcaaccgcttcttcacctgctggaaccactggggccgtgtgggagaggtcggccagtcaaagatcaaccacttcacaaggctagaagatgcaaagaaggactttgagaagaaatttcgggaaaagaccaagaacaactgggcagagcgggaccactttgtgtctcacccgggcaagtacacacttatcgaagtacaggcagaggatgaggcccaggaagctgtggtgaaggtggacagaggcccagtgaggactgtgactaagcgggtgcagccctgctccctggacccagccacgcagaagctcatcactaacatcttcagcaaggagatgttcaagaacaccatggccctcatggacctggatgtgaagaagatgcccctgggaaagctgagcaagcaacagattgcacggggtttcgaggccttggaggcgctggaggaggccctgaaaggccccacggatggtggccaaagcctggaggagctgtcctcacacttttacaccgtcatcccgcacaacttcggccacagccagcccccgcccatcaattcccctgagcttctgcaggccaagaaggacatgctgctggtgctggcggacatcgagctggcccaggccctgcaggcagtctctgagcaggagaagacggtggaggaggtgccacaccccctggaccgagactaccagcttctcaagtgccagctgcagctgctagactctgg

SEQ ID NO: 3220 - DNA, 5474 bp, Homo sapiens
  source 1..5474: mol_type = genomic DNA
cgcccgcccagccccgggggcagggagagcctagattacggaagtaccgcgagcaaggagcgcggaatcggggagcgtccggagctagctggatcctctaggcaggatggtgatgggaatctttgcaaattgtatcttctgtttgaaagtgaagtacttacctcagcagcagaagaaaaagctacaaactgacattaaggaaaatggcggaaagttttccttttcgttaaatcctcagtgcacacatataatcttagataatgctgatgttctgagtcagtaccaactgaattctatccaaaagaaccacgttcatattgcaaacccagattttatatggaaatctatcagggaaaagagactcttggatgtaaagaattatgatccttataagcccctggacatcacaccacctcctgatcagaaggcgagcagttctgaagtgaaaacagaaggtctatgcccggacagtgccacagaggaggaagacactgtggaactcactgagtttggtatgcagaatgttgaaattcctcatcttcctcaagattttgaagttgcaaaatataacaccttggagaaagtgggaatggagggaggccaggaagctgtggtggtggagcttcagtgttcgcgggactccagggactgtcctttcctgatatcctcacacttcctcctggatgatggcatggagactagaagacagtttgctataaagaaaacctctgaagatgcaagtgaatactttgaaaattacattgaagaactgaagaaacaaggatttctactaagagaacatttcacacctgaagcaacccaattagcatctgaacaattgcaagcattgcttttggaggaagtcatgaattcaagcactctgagccaagaggtgagcgatttagtagagatgatttgggcagaggccctgggccacctggaacacatgcttctcaagccagtgaacaggattagcctcaacgatgtgagcaaggcagaggggattctccttctagtaaaggcagcactgaaaaatggagaaacagcagagcaattgcaaaagatgatgacagagttttacagactgatacctcacaaaggcacaatgcccaaagaagtgaacctgggactattggctaagaaagcagacctctgccagctaataagagacatggttaatgtctgtgaaactaatttgtccaaacccaacccaccatccctggccaaataccgagctttgaggtgcaaaattgagcatgttgaacagaatactgaagaatttctcagggttagaaaagaggttttgcagaatcatcacagtaagagcccagtggatgtcttgcagatatttagagttggcagagtgaatgaaaccacagagtttttgagcaaacttggtaatgtgaggcccttgttgcatggttctcctgtacaaaacatcgtgggaatcttgtgtcgagggttgcttttacccaaagtagtggaagatcgtggtgtgcaaagaacagacgtcggaaaccttggaagtgggatttatttcagtgattcgctcagtacaagtatcaagtactcacacccgggagagacagatggcaccagactcctgctcatttgtgacgtagccctcggaaagtgtatggacttacatgagaaggacttttccttaactgaagcaccaccaggctacgacagtgtgcatggagtttcgcaaacagcctctgtcaccacagactttgaggatgatgaatttgttgtctataaaaccaatcaggttaaaatgaaatatattattaaattttccatgcctggagatcagataaaggactttcatcctagtgatcatactgaattagaggaatacagacctgagttttcaaatttttcaaaggttgaagattaccagttaccagatgccaaaacttccagcagcaccaaggccggcctccaggatgcctctgggaacttggttcctctggaggatgtccacatcaaagggagaatcatagacactgtagcccaggtcattgtttttcagacatacacaaataaaagtcacgtgcccattgaggcaaaatatatctttcctttggatgacaaggccgctgtgtgtggcttcgaagccttcatcaatgggaagcacatagttggagagattaaagagaaggaagaagcccagcaagagtacctagaagccgtgacccagggccatggcgcttacctgatgagtcaggatgctccggacgtttttactgtaagtgttggaaacttaccccctaaggctaaggttcttataaaaattacctacatcacagaactcagcatcctgggcactgttggtgtctttttcatgcccgccaccgtagcaccctggcaacaggacaaggctttgaatgaaaaccttcaggatacagtagagaagatttgtataaaagaaataggaacaaagcaaagcttctctttgactatgtctattgagatgccgtatgtgattgaattcattttcagtgatacacatgaactgaaacaaaagcgcacagactgcaaagctgtcattagcaccatggaaggcagctccttagacagcagtggattttctctccacatcggtttgtctgctgcctatctcccaagaatgtgggttgaaaaacatccagaaaaagaaagcgaggcttgcatgcttgtctttcaacccgatctcgatgtcgacctccctgacctagccagtgagagcgaagtgattatttgtcttgactgctccagttccatggagggtgtgacattcttgcaagccaagcaaatcgccttgcatgcgctgtccttggtgggtgagaagcagaaagtaaatattatccagttcggcacaggttacaaggagctattttcgtatcctaagcatatcacaagcaataccatggcagcagagttcatcatgtctgccacacctaccatggggaacacagacttctggaaaacactccgatatcttagcttattgtaccctgctcgagggtcacggaacatcctcctggtgtctgatgggcacctccaggatgagagcctgacattacagctcgtgaagaggagccgcccgcacaccaggttattcgcctgcggtatcggttctacagcaaatcgtcacgtcttaaggattttgtcccagtgtggtgccggagtatttgaatattttaatgcaaaatccaagcatagttggagaaaacagatagaagaccaaatgaccaggctatgttctccgagttgccactctgtctccgtcaaatggcagcaactcaatccagatgtgcccgaggccctgcaggccccagcccaggtgccgtccttgtttctcaatgatcgactccttgtctatggattcattcctcactgcacacaggcaactctgtgtgcactaattcaagagaaagaatttcgtacaatggtgtcgactactgagcttcagaagacaactggaactatgatccacaagctggcagcccgagctctaatcagagattatgaagatggcattcttcacgaaaatgaaaccagtcatgagatgaaaaaacaaaccttgaaatctctgattattaaactcagtaaagaaaactctctcataacacaatttacaagctttgtggcagttgagaaaagggatgagaatgagtcgccttttcctgatattccaaaagtttctgaacttattgccaaagaagatgtagacttcctgccctacatgagctggcagggggagccccaagaagccgtcaggaaccagtctcttttagcatcctctgagtggccagaattacgtttatccaaacgaaaacataggaaaattccattttccaaaagaaaaatggaattatctcagccagaagtttctgaagattttgaagaggatggcttaggtgtactaccagctttcacatcaaatttggaacgtggaggtgtggaaaagctattggatttaagttggacagagtcatgtaaaccaacagcaactgaaccactatttaagaaagtcagtccatgggaaacatctacttctagcttttttcctattttggctccggccgttggttcctatcttcccccgactgcccgcgctcacagtcctgcttccttgtcttttgcctcatatcgtcaggtagctagtttcggttcagctgctcctcccagacagtttgatgcatctcaattcagccaaggccctgtgcctggcacttgtgctgactggatcccacagtcggcgtcttgtcccacaggacctccccagaacccaccttcttcaccctattgtggcattgttttttcagggagctcattaagctctgcacagtctgctccactgcaacatcctggaggctttactaccaggccttctgctggcaccttccctgagctggattctccccagcttcatttctctcttcctacagaccctgatcccatcagaggttttgggtcttatcatccctctgcttcctctccttttcattttcaaccttccgcagcctctttgactgccaaccttaggctgccaatggcctctgctttacctgaggctctttgcagtcagtcccggactaccccagtagatctctgtcttctagaagaatcagtaggcagtctcgaaggaagtcgatgtcctgtctttgcttttcaaagttctgacacagaaagtgatgagctatcagaagtacttcaagacagctgctttttacaaataaaatgtgatacaaaagatgacagtatcctgtgctttctggaagtaaaagaagaggatgaaatagtgtgcatacaacactggcaggatgctgtgccttggacagaactcctcagtctacagacagaggatggcttctggaaacttacaccagaactgggacttatattaaatcttaatacaaatggtttgcacagctttcttaaacaaaaaggcattcaatctctaggtgtaaaaggaagagaatgtctcctggacctaattgccacaatgctggtactacagtttattcgcaccaggttggaaaaagagggaatagtgttcaaatcactgatgaaaatggatgacgcttctatttccaggaatattccctgggcttttgaggcaataaagcaagcaagtgaatgggtaagaagaactgaaggacagtacccatctatctgcccacggcttgaactggggaacgactgggactctgccaccaagcagttgctgggactccagcccataagcactgtgtcccctcttcatagagtcctccattacagtcaaggctaagtcaaatgaaactgaattttaaactttttgcatgcttctatgtagaaaataatcaaatgataatagatacttataatgaaacttcattaaggtttcattcagtgtagcaattactgtctttaaaaattaagtggaagaagaattactttaatcaactaacaagcaataataaaatgaaacttaaaatatttca

SEQ ID NO: 3221 - DNA, 3485 bp, Homo sapiens
  source 1..3485: mol_type = genomic DNA
cgtagtgcggtccgggtaggagagagcagggggccacgctggctccatctacgcacgtttcggaaaccgggcccggaggggaccacgcccgctcacccgtgcccggcgtcccccggagctggggctagaggagccgggccggccgcagcgggaagaggccacaggcggccgcgcacgtggggggtggttagcgcggaggaacccggaagccctttgcaccgcccaccgccgcggtgacgggttaacgctcctcctggtggaggcaggggcgggcggggcggaaggcggggacgcctcagccaacacccccgaggaccgcccgcgagccgtcctccccacccccacggacgcgacgcagcgcgggctccgcttccccggccgcggcgcctgcgcaaaagccccgccccttcgcccgagccccacccccacaccgcagcctccaccgccgccacctctcccttcctctctgctctttcctcctgttttctcttccctcctccccctggcctccgcgtctcctcctactccggcgctgacgctcgcgtaggggccctggcgtcagacgcgcgggggcggggcgagtgcggcgcggggtataagtagagggtgcaggaggcggtgcttccccttctccccggcggttagtgctgagagtgcggagtgtgtgctccgggctcggaacacacatttattattaaaaaatccaaaaaaaatctaaaaaaatcttttaaaaaaccccaaaaaaatttacaaaaaatccgcgtctcccccgccggagacttttattttttttcttcctcttttataaaataacccggtgaagcagccgagaccgacccgcccgcccgcggccccgcagcagctccaagaaggaaccaagagaccgaggccttcccgctgcccggacccgacaccgccaccctcgctccccgccggcagccggcagccagcggcagtggatcgaccccgttctgcggccgttgagtagttttcaattccggttgatttttgtccctctgcgcttgctccccgctcccctccccccggctccggcccccagccccggcactcgctctcctcctctcacggaaaggtcgcggcctgtggccctgcgggcagccgtgccgagatgaaccccagtgcccccagctaccccatggcctcgctctacgtgggggacctccaccccgacgtgaccgaggcgatgctctacgagaagttcagcccggccgggcccatcctctccatccgggtctgcagggacatgatcacccgccgctccttgggctacgcgtatgtgaacttccagcagccggcggacgcggagcgtgctttggacaccatgaattttgatgttataaagggcaagccagtacgcatcatgtggtctcagcgtgatccatcacttcgcaaaagtggagtaggcaacatattcattaaaaatctggacaaatccattgataataaagcactgtatgatacattttctgcttttggtaacatcctttcatgtaaggtggtttgtgatgaaaatggttccaagggctatggatttgtacactttgagacgcaggaagcagctgaaagagctattgaaaaaatgaatggaatgctcctaaatgatcgcaaagtatttgttggacgatttaagtctcgtaaagaacgagaagctgaacttggagctagggcaaaagaattcaccaatgtttacatcaagaattttggagaagacatggatgatgagcgccttaaggatctctttggcaagtttgggcctgccttaagtgtgaaagtaatgactgatgaaagtggaaaatccaaaggatttggatttgtaagctttgaaaggcatgaagatgcacagaaagctgtggatgagatgaacggaaaggagctcaatggaaaacaaatttatgttggtcgagctcagaaaaaggtggaacggcagacggaacttaagcgcaaatttgaacagatgaaacaagataggatcaccagataccagggtgttaatctttatgtgaaaaatcttgatgatggtattgatgatgaacgtctccggaaagagttttctccatttggtacaatcactagtgcaaaggttatgatggagggtggtcgcagcaaagggtttggttttgtatgtttctcctccccagaagaagccactaaagcagttacagaaatgaacggtagaattgtggccacaaagccattgtatgtagctttagctcagcgcaaagaagagcgccaggctcacctcactaaccagtatatgcagagaatggcaagtgtacgagctgttcccaaccctgtaatcaacccctaccagccagcacctccttcaggttacttcatggcagctatcccacagactcagaaccgtgctgcatactatcctcctagccaaattgctcaactaagaccaagtcctcgctggactgctcagggtgccagacctcatccattccaaaatatgcccggtgctatccgcccagctgctcctagaccaccatttagtactatgagaccagcttcttcacaggttccacgagtcatgtcaacacagcgtgttgctaacacatcaacacagacaatgggtccacgtcctgcagctgcagccgctgcagctactcctgctgtccgcaccgttccacagtataaatatgctgcaggagttcgcaatcctcagcaacatcttaatgcacagccacaagttacaatgcaacagcctgctgttcatgtacaaggtcaggaacctttgactgcttccatgttggcatctgcccctcctcaagagcaaaagcaaatgttgggtgaacggctgtttcctcttattcaagccatgcaccctactcttgctggtaaaatcactggcatgttgttggagattgataattcagaacttcttcatatgctcgagtctccagagtcactccgttctaaggttgatgaagctgtagctgtactacaagcccaccaagctaaagaggctgcccagaaagcagttaacagtgccaccggtgttccaactgtttaaaattgatcagggaccatgaaaagaaacttgtgcttcaccgaagaaaaatatctaaacatcgaaaaacttaaatattatggaaaaaaaacattgcaaaatataaaataaataaaaaaaggaaaggaaactttgaaccttatgtaccgagcaaatgccaggtctagcaaacataatgctagtcctagattacttattgatttaaaaacaaaaaaacacaaaaaaatagtaaaatataaaaacaaattaatgttttatagaccctgggaaaaagaattttcagcaaagtacaaaaatttaaagcattcctttctttaattttgtaattctttactgtggaatagctcagaatgtcagttctgttttaagtaacagaattgataactgagcaaggaaacgtaatttggattataaaattcttgctttaataaaaattccttaaacagtg

SEQ ID NO: 3222 - DNA, 2593 bp, Homo sapiens
  source 1..2593: mol_type = genomic DNA
cccttctccccggcggttagtgctgagagtgcggagtgtgtgctccgggctcggaacacacatttattattaaaaaatccaaaaaaaatctaaaaaaatcttttaaaaaaccccaaaaaaatttacaaaaaatccgcgtctcccccgccggagacttttattttttttcttcctcttttataaaataacccggtgaagcagccgagaccgacccgcccgcccgcggccccgcagcagctccaagaaggaaccaagagaccgaggccttcccgctgcccggacccgacaccgccaccctcgctccccgccggcagccggcagccagcggcagtggatcgaccccgttctgcggccgttgagtagttttcaattccggttgatttttgtccctctgcgcttgctccccgctcccctccccccggctccggcccccagccccggcactcgctctcctcctctcacggaaaggtcgcggcctgtggccctgcgggcagccgtgccgagatgaaccccagtgcccccagctaccccatggcctcgctctacgtgggggacctccaccccgacgtgaccgaggcgatgctctacgagaagttcagcccggccgggcccatcctctccatccgggtctgcagggacatgatcacccgccgctccttgggctacgcgtatgtgaacttccagcagccggcggacgcggagcgtgctttggacaccatgaattttgatgttataaagggcaagccagtacgcatcatgtggtctcagcgtgatccatcacttcgcaaaagtggagtaggcaacatattcattaaaaatctggacaaatccattgataataaagcactgtatgatacattttctgcttttggtaacatcctttcatgtaaggtggtttgtgatgaaaatggttccaagggctatggatttgtacactttgagacgcaggaagcagctgaaagagctattgaaaaaatgaatggaatgctcctaaatgatcgcaaagtatttgttggacgatttaagtctcgtaaagaacgagaagctgaacttggagctagggcaaaagaattcaccaatgtttacatcaagaattttggagaagacatggatgatgagcgccttaaggatctctttggcaagtttgggcctgccttaagtgtgaaagtaatgactgatgaaagtggaaaatccaaaggatttggatttgtaagctttgaaaggcatgaagatgcacagaaagctgtggatgagatgaacggaaaggagctcaatggaaaacaaatttatgttggtcgagctcagaaaaaggtggaacggcagacggaacttaagcgcaaatttgaacagatgaaacaagataggatcaccagataccagggtgttaatctttatgtgaaaaatcttgatgatggtattgatgatgaacgtctccggaaagagttttctccatttggtacaatcactagtgcaaaggttatgatggagggtggtcgcagcaaagggtttggttttgtatgtttctcctccccagaagaagccactaaagcagttacagaaatgaacggtagaattgtggccacaaagccattgtatgtagctttagctcagcgcaaagaagagcgccaggctcacctcactaaccagtatatgcagagaatggcaagtgtacgagctgttcccaaccctgtaatcaacccctaccagccagcacctccttcaggttacttcatggcagctatcccacagactcagaaccgtgctgcatactatcctcctagccaaattgctcaactaagaccaagtcctcgctggactgctcagggtgccagacctcatcctgctgttcatgtacaaggtcaggaacctttgactgcttccatgttggcatctgcccctcctcaagagcaaaagcaaatgttgggtgaacggctgtttcctcttattcaagccatgcaccctactcttgctggtaaaatcactggcatgttgttggagattgataattcagaacttcttcatatgctcgagtctccagagtcactccgttctaaggttgatgaagctgtagctgtactacaagcccaccaagctaaagaggctgcccagaaagcagttaacagtgccaccggtgttccaactgtttaaaattgatcagggaccatgaaaagaaacttgtgcttcaccgaagaaaaatatctaaacatcgaaaaacttaaatattatggaaaaaaaacattgcaaaatataaaataaataaaaaaaggaaaggaaactttgaaccttatgtaccgagcaaatgccaggtctagcaaacataatgctagtcctagattacttattgatttaaaaacaaaaaaacacaaaaaaatagtaaaatataaaaacaaattaatgttttatagaccctgggaaaaagaattttcagcaaagtacaaaaatttaaagcattcctttctttaattttgtaattctttactgtggaatagctcagaatgtcagttctgttttaagtaacagaattgataactgagcaaggaaacgtaatttggattataaaattcttgctttaataaaaattccttaaacagtg

SEQ ID NO: 3223 - DNA, 608 bp, Homo sapiens
  source 1..608: mol_type = genomic DNA
atatgctcgagtctccagagtcactccgttctaaggttgatgaagctgtagctgtactacaagcccaccaagctaaagaggctgcccagaaagcagttaacagtgccaccggtgttccaactgtttaaaaaacaaggacattctcctccataaccatgacaccgccatgaaaacgatcagcaccgtcgaatcctcacgccccactcaagttccttgattgcttcaataatgtcctccgtagcaaaaggatctagttcaaaatcgggagttacatttcattgtcatgcctaaaacgtaagaattgctcattcactttggagcagttcttcagtctatccttgattttcatgaccttgacacttttgaacattatagaccagttattcaatagaatatctttcaatctgggtttgtccgatacctctttattattagattgaaatgatacattttggtggaactatcacagaattgacattgcattcttctcattacatcctgtctggtggcctgtgattctgttttatctcattaccaatggcgtttgttttgagcatttgattaagttgttatctgccactataaagttgctatttttctctttataa

SEQ ID NO: 3224 - DNA, 453 bp, Homo sapiens
  source 1..453: mol_type = genomic DNA
cccttctccccggcggttagtgctgagagtgcggaccgagaccgacccgcccgcccgcggccccgcagcagctccaagaaggaaccaagagaccgaggccttcccgctgcccggacccgacaccgccaccctcgctccccgccggcagccggcagccagcggcagtggatcgaccccgttctgcggccgttgagtagttttcaattccggttgatttttgtccctctgcgcttgctccccgctcccctccccccggctccggcccccagccccggcactcgctctcctcctctcacggaaaggtcgcggcctgtggccctgcgggcagccgtgccgagatgaaccccagtgcccccagctaccccatggcctcgctctacgtgggggacctccaccccgacgtgaccgaggcgatgctctacgagaagttcagcccggccgggcccatcctct

SEQ ID NO: 3225 - DNA, 754 bp, Homo sapiens
  source 1..754: mol_type = genomic DNA
gcttccccttctccccggcggttagtgctgagagtgcggagtgtgtgctccgggctcggaacacacatttattattaaaaaatccaaaaaaaatctaaaaaaatcttttaaaaaaccccaaaaaaatttacaaaaaatccgcgtctcccccgccggagacttttattttttttcttcctcttttataaaataacccggtgaagcagccgagaccgacccgcccgcccgcggccccgcagcagctccaagaaggaaccaagagaccgaggccttcccgctgcccggacccgacaccgccaccctcgctccccgccggcagccggcagccagcggcagtggatcgaccccgttctgcggccgttgagtcgcggcctgtggccctgcgggcagccgtgccgagatgaaccccagtgcccccagctaccccatggcctcgctctacgtgggggacctccaccccgacgtgaccgaggcgatgctctacgagaagttcagcccggccgggcccatcctctccatccgggtctgcagggacatgatcacccgccgctccttgggctacgcgtatgtgaacttccagcagccggcggacgcggagcgtgctttggacaccatgaattttgatgttataaagggcaagccagtacgcatcatgtggtctcagcgtgatccatcacttcgcaaaagtggagtaggcaacatattcattaaaaatctggacaaatccattgataataaagcactgtatgataca

SEQ ID NO: 3226 - DNA, 493 bp, Homo sapiens
  source 1..493: mol_type = genomic DNA
ttctgcggccgacgcgcgtggcggcggtgccggctgggactcgtagtgcggtccggcagccgagaccgacccgcccgcccgcggccccgcagcagctccaagaaggaaccaagagaccgaggccttcccgctgcccggacccgacaccgccaccctcgctccccgccggcagccggcagccagcggcagtggatcgaccccgttctgcggccgttgagtagttttcaattccggttgatttttgtccctctgcgcttgctccccgctcccctccccccggctccggcccccagccccggcactcgctctcctcctctcacggaaaggtcgcggcctgtggccctgcgggcagccgtgccgagatgaaccccagtgcccccagctaccccatggcctcgctctacgtgggggacctccaccccgacgtgaccgaggcgatgctctacgagaagttcagcccggccgggcccatcctctccatccgggtctgcag

SEQ ID NO: 3227 - DNA, 971 bp, Homo sapiens
  source 1..971: mol_type = genomic DNA
cagcttcttcacaggttccacgagtcatgtcaacacagcgtgttgctaacacatcaacacagacaatgggtccacgtcctgcagctgcagccgctgcagctactcctgctgtccgcaccgttccacagtataaatatgctgcaggagttcgcaatcctcagcaacatcttaatgcacagccacaagttacaatgcaacagcctgctgttcatgtacaaggtcaggaacctttgactgcttccatgttggcatctgcccctcctcaagagcaaaagcaaatgttgggtgaacggctgtttcctcttattcaagccatgcaccctactcttgctggtaaaatcactggcatgttgttggagattgataattcagaacttcttcatatgctcgagtctccagagtcactccgttctaaggttgatgaagctgtagctgtactacaagcccaccaagctaaagaggctgcccagaaagcagttaacagtgccaccggtgttccaactgtttaaagtgagcttttccctctgattgatcagggaccatgaaaagaaacttgtgcttcaccgaagaaaaatatctaaacatcgaaaaacttaaatattatggaaaaaaaacattgcaaaatataaaataaataaaaaaaggaaaggaaactttgaaccttatgtaccgagcaaatgccaggtctagcaaacataatgctagtcctagattacttattgatttaaaaacaaaaaaacacaaaaaaatagtaaaatataaaaacaaattaatgttttatagaccctgggaaaaagaattttcagcaaagtacaaaaatttaaagcattcctttctttaattttgtaattctttactgtggaatagctcagaatgtcagttctgttttaagtaacagaattgataactgagcaaggaaacgtaatttggattataaaattcttgctttaataaaaattccttaaacagtg

SEQ ID NO: 3228 - DNA, 492 bp, Homo sapiens
  source 1..492: mol_type = genomic DNA
gttggtgtcagcgagcgccgcggccgttggggactccagctcccagcaggcaccgcttctgcggccgacgcgcgtggcggcggtgccggctgggactcgtagtgcggtccggcagccgagaccgacccgcccgcccgcggccccgcagcagctccaagaaggaaccaagagaccgaggccttcccgctgcccggacccgacaccgccaccctcgctccccgccggcagccggcagccagcggcagtggatcgaccccgttctgcggccgttgagtcgcggcctgtggccctgcgggcagccgtgccgagatgaaccccagtgcccccagctaccccatggcctcgctctacgtgggggacctccaccccgacgtgaccgaggcgatgctctacgagaagttcagcccggccgggcccatcctctccatccgggtctgcagggacatgatcacccgccgctccttgggctacgcgtatgtgaacttccagcag

SEQ ID NO: 3229 - DNA, 628 bp, Homo sapiens
  source 1..628: mol_type = genomic DNA
gcggccgacgcgcgtggcggcggtgccggctgggactcgtagtgcggtccggccgagaccgacccgcccgcccgcggccccgcagcagctccaagaaggaaccaagagaccgaggccttcccgctgcccggacccgacaccgccaccctcgctccccgccggcagccggcagccagcggcagtggatcgaccccgttctgcggccgtcgcggcctgtggccctgcgggcagccgtgccgagatgaaccccagtgcccccagctaccccatggcctcgctctacgtgggggacctccaccccgacgtgaccgaggcgatgctctacgagaagttcagcccggccgggcccatcctctccatccgggtctgcagggacatgatcacccgccgctccttgggctacgcgtatgtgaacttccagcagccggcggacgcggagcgtgctttggacaccatgaattttgatgttataaagggcaagccagtacgcatcatgtggtctcagcgtgatccatcacttcgcaaaagtggagtaggcaacatattcattaaaaatctggacaaatccattgataataaagcactgtatgatacattttctgcttttggtaacatcctttcatgtaag

SEQ ID NO: 3230 - DNA, 736 bp, Homo sapiens
  source 1..736: mol_type = genomic DNA
atccgcccagctgctcctagaccaccatttagtactatgagaccagcttcttcacaggttccacgagtcatgtcaacacagcgtgttgctaacacatcaacacagacaatgggtccacgtcctgcagctgcagccgctgcagctactcctgctgtccgcaccgttccacagtataaatatgctgcaggagttcgcaatcctcagcaacatcttaatgcacagccacaagttacaatgcaacagcctgctgttcatgtacaaggtcaggaacctttgactgcttccatgttggcatctgcccctcctcaagagcaaaagcaaatgttgggtgaacggctgtttcctcttattcaagccatgcaccctactcttgctggtaaaatcactggcatgttgttggagattgataattcagaacttcttcatatgctcgagtctccagagtcactccgttctaaggttgatgaagctgtagctgtactacaagcccaccaagctaaagaggctgcccagaaagcagttaacagtgccaccggtgttccaactgtttaaagtgagcttttccctctggtttgttgttttaagcttgttttcttcatcttttataaagtttgttgagcatattttgaaatgtacatagcaaaagatcattttacagttcatttaaatgtattgctaatttttcaaggaaaagtggaactaactatagaggaattaaaggaattttacccgttaa

SEQ ID NO: 3231 - DNA, 593 bp, Homo sapiens
  source 1..593: mol_type = genomic DNA
aggcaccgcttctgcggccgacgcgcgtggcggcggtgccggctgggactcgtagtgcggtccggccgagaccgacccgcccgcccgcggccccgcagcagctccaagaaggaaccaagagaccgaggccttcccgctgcccggacccgacaccgccaccctcgctccccgccggcagccggcagccagcggcagtggatcgaccccgttctgcggccgttgagtagttttcaattccggttgatttttgtccctctgcgcttgctccccgctcccctccccccggctccggcccccagccccggcactcgctctcctcctctcacggaaaggtcgcggcctgtggccctgcgggcagccgtgccgagatgaaccccagtgcccccagctaccccatggcctcgctctacgtgggggacctccaccccgacgtgaccgaggcgatgctctacgagaagttcagcccggccgggcccatcctctccatccgggtctgcagggacatgatcacccgccgctccttgggctacgcgtatgtgaacttccagcagccggcggacgcggagcgtgctttggacaccatgaattttgat

SEQ ID NO: 3232 - DNA, 1329 bp, Homo sapiens
  source 1..1329: mol_type = genomic DNA
aacaagcgccgtgcgccccgccccccatcgggggcaaccattgttccgccggtcgcgccggagctgggttgctcctgctcccgtctccaagtcctggtacctccttcaagctgggagagggctctagtccctggttctgaacactctggggttctcgggtgcaggccgccatgagcaaacggaaggcgccgcaggagactctcaacgggggaatcaccgacatgctcacagaactcgcaaactttgagaagaacgtgagccaagctatccacaagtacaatgcttacagaaaagcagcatctgttatagcaaaatacccacacaaaataaagagtggagctgaagctaagaaattgcctggagtaggaacaaaaattgctgaaaagattgatgagtttttagcaactggaaaattacgtaaactggaaaagattcggcaggatgatacgagttcatccatcaatttcctgactcgagttagtggcattggtccatctgctgcaaggaagtttgtagatgaaggaattaaaacactagaagatctcagaaaaaatgaagataaattgaaccatcatcagcgaattgggctgaaatattttggggactttgaaaaaagaattcctcgtgaagagatgttacaaatgcaagatattgtactaaatgaagttaaaaaagtggattctgaatacattgctacagtctgtggcagtttcagaagaggtgcagagtccagtggtgacatggatgttctcctgacccatcccagcttcacttcagaatcaaccaaacagccaaaactgttacatcaggttgtggagcagttacaaaaggttcattttatcacagataccctgtcaaagggtgagacaaagttcatgggtgtttgccagcttcccagtaaaaatgatgaaaaagaatatccacacagaagaattgatatcaggttgatacccaaagatcagtattactgtggtgttctctatttcactgggagtgatattttcaataagaatatgagggctcatgccctagaaaagggtttcacaatcaatgagtacaccatccgtcccttgggagtcactggagttgcaggagaacccctgccagtggatagtgaaaaagacatctttgattacatccagtggaaataccgggaacccaaggaccggagcgaatgaggcctgtatcctccctggcagacacaacccaataggagtcttaatttatttcttaacctttgctatgtaagggtctttggtgtttttaaatgattgtttcttcttcatgcttttgcttgcaatgtagtcaataaaacctcatgtactatta

SEQ ID NO: 3233 - DNA, 744 bp, Homo sapiens
  source 1..744: mol_type = genomic DNA
ttggggactttgaaaaaagaattcctcgtgaagagatgttacaaatgcaagatattgtactaaatgaagttaaaaaagtggattctgaatacattgctacagtctgtggcagtttcagaagaggtgcagagtccagtggtgacatggatgttctcctgacccatcccagcttcacttcagaatcaaccaaacagccaaaactgttacatcaggttgtggagcagttacaaaaggttcattttatcacagataccctgtcaaagggtgagacaaagttcatgggtgtttgccagcttcccagtaaaaatgatgaaaaagaatatccacacagaagaattgatatcaggttgatacccaaagatcagtattactgtggtgttctctatttcactgggagtgatattttcaataagaatatgagggctcatgccctagaaaagggtttcacaatcaatgagtacaccatccgtcccttgggagtcactgtccttcaggcaacgagagaggatttaatgcataacatgctcctaggccctcagttgaaggccatcaaggagttgcaggagaacccctgccagtggatagtgaaaaagacatctttgattacatccagtggaaataccgggaacccaaggaccggagcgaatgaggcctgtatcctccctggcagacacaacccaataggagtcttaatttatttcttaacctttgctatgtaagggtctttggtgtttttaaatgatt

SEQ ID NO: 3234 - DNA, 983 bp, Homo sapiens
  source 1..983: mol_type = genomic DNA
tcgggggcaaccattgttccgccggtcgcgccggagctgggttgctcctgctcccgtctccaagtcctggtacctccttcaagctgggagagggctctagtccctggttctgaacactctggggttctcgggtgcaggccgccatgagcaaacggaaggcgccgcaggagactctcaacgggggaatcaccgacatgctcacagaactcgcaaactttgagaagaacgtgagccaagctatccacaagtacaatgcttacagaaaagcagcatctgttatagcaaaatacccacacaaaataaagagtggagctgaagctaagaaattgcctggagtaggaacaaaaattgctgaaaagattgatgagtttttagcaactggaaaattacgtaaactggaaaagattcggcaggatgatacgagttcatccatcaatttcctgactcgagttagtggcattggtccatctgctgcaaggaagtttgtagatgaaggaattaaaacactagaaggctcacagctggattcatgcccagtaaagggacacctgaatggaactgagtcacttttagacttaatatgggatgttatgacaattcttaagttaaaaaatgcagatctcagaaaaaatgaagataaattgaaccatcatcagcgaattgggctgaaatattttggggactttgaaaaaagaattcctcgtgaagagatgttacaaatgcaagatattgtactaaatgaagttaaaaaagtggattctgaatacattgctacagtctgtggcagtttcagaagaggtgcagagtccagtggtgacatggatgttctcctgacccatcccagcttcacttcagaatcaaccaaacagccaaaactgttacatcaggttgtggagcagttacaaaaggttcattttatcacagataccctgtcaaagggtgagacaaagttcatgggtgtttgccagcttcccagtaaaaat

SEQ ID NO: 3235 - DNA, 863 bp, Homo sapiens
  source 1..863: mol_type = genomic DNA
tgaaaagattgatgagtttttagcaactggaaaattacgtaaactggaaaagattcggcaggatgatacgagttcatccatcaatttcctgactcgagttagtggcattggtccatctgctgcaaggaagtttgtagatgaaggaattaaaacactagaagatctcagaaaaaatgaagataaattgaaccatcatcagcgaattgggctgaaatattttggggactttgaaaaaagaattcctcgtgaagagatgttacaaatgcaagatattgtactaaatgaagttaaaaaagtggattctgaatacattgctacagtctgtggcagtttcagaagaggtgcagagtccagtggtgacatggatgttctcctgacccatcccagcttcacttcagaatcaaccaaacagggtgtttgccagcttcccagtaaaaatgatgaaaaagaatatccacacagaagaattgatatcaggttgatacccaaagatcagtattactgtggtgttctctatttcactgggagtgatattttcaataagaatatgagggctcatgccctagaaaagggtttcacaatcaatgagtacaccatccgtcccttgggagtcactggagttgcaggagaacccctgccagtggatagtgaaaaagacatctttgattacatccagtggaaataccgggaacccaaggaccggagcgaatgaggcctgtatcctccctggcagacacaacccaataggagtcttaatttatttcttaacctttgctatgtaagggtctttggtgtttttaaatgattgtttcttcttcatgcttttgcttgcaatgtagtcaataaaacctcatgtactatta

SEQ ID NO: 3236 - DNA, 1048 bp, Homo sapiens
  source 1..1048: mol_type = genomic DNA
attgttccgccggtcgcgccggagctgggttgctcctgctcccgtctccaagtcctggtacctccttcaagctgggagagggctctagtccctggttctgaacactctggggttctcgggtgcaggccgccatgagcaaacggaaggcgccgcaggagactctcaacgggggaatcaccgacatgctcacagaaaagcagcatctgttatagcaaaatacccacacaaaataaagagtggagctgaagctaagaaattgatctcagaaaaaatgaagataaattgaaccatcatcagcgaattgggctgaaatattttggggactttgaaaaaagaattcctcgtgaagagatgttacaaatgcaagatattgtactaaatgaagttaaaaaagtggattctgaatacattgctacagtctgtggcagtttcagaagaggtgcagagtccagtggtgacatggatgttctcctgacccatcccagcttcacttcagaatcaaccaaacagccaaaactgttacatcaggttgtggagcagttacaaaaggttcattttatcacagataccctgtcaaagggtgagacaaagttcatgggtgtttgccagcttcccagtaaaaatgatgaaaaagaatatccacacagaagaattgatatcaggttgatacccaaagatcagtattactgtggtgttctctatttcactgggagtgatattttcaataagaatatgagggctcatgccctagaaaagggtttcacaatcaatgagtacaccatccgtcccttgggagtcactggagttgcaggagaacccctgccagtggatagtgaaaaagacatctttgattacatccagtggaaataccgggaacccaaggaccggagcgaatgaggcctgtatcctccctggcagacacaacccaataggagtcttaatttatttcttaacctttgctatgtaagggtctttggtgtttttaaatgattgtttcttcttcatgcttttgcttgcaatgtagtcaataaaacctcatgtactatta

SEQ ID NO: 3237 - DNA, 2670 bp, Homo sapiens
  source 1..2670: mol_type = genomic DNA
ctgctggtaagtggtctattcctgcccacccccgggtgactagcttggccagtagtcgaccccacccggggaccgactctgggggttggagagactcttggggccggggtcgggcactccagctttcttctagccccgagctgggattccctggcctgcgccagctgcgtacacggcgagtacaccgcacctgcccgggacttcacccgcagctgcgagactcctccattcccggagggctccccacacctgctgcggccgtgccccatctccccgcagctgcggcgctgagcacccccatgtcgagaggctgagaccaggacagcagccctgaccaacgctccaataggccgggatccagccatacttcaatggatcccaggggtatcttgaaggcatttcccaagcggcagaaaattcatgctgatgcatcatcaaaagtacttgcaaagattcctaggagggaagagggagaagaagcagaagagtggctgagctcccttcgggcccatgttgtgcgcactggcattggacgagcccgggcagaactctttgagaagcagattgttcagcatggcggccagctatgccctgcccagggcccaggtgtcactcacattgtggtggatgaaggcatggactatgagcgagccctccgccttctcagactaccccagctgcccccgggtgctcagctggtgaagtcagcctggctgagcttgtgccttcaggagaggaggctggtggatgtagctggattcagcatcttcatccccagtaggtacttggaccatccacagcccagcaaggcagagcaggatgcttctattcctcctggcacccatgaggccctgcttcagacagccctttctcctcctcctcctcccaccaggcctgtgtctcctccccaaaaggcaaaagaggcaccaaacacccaagcccagcccatctctgatgatgaagccagtgatggggaagaaacccaggttagtgcagctgatctggaagccctcatcagtggccactaccccacctcccttgagggagattgtgagcctagcccagcccctgctgtcctggataagtgggtctgtgcacagccctcaagccagaaggcgaccaatcacaacctccatatcacagagaagctggaagttctggccaaagcctacagtgttcagggagacaagtggagggccctgggctatgccaaggccatcaatgccctcaagagcttccataagcctgtcacctcgtaccaggaggcctgcagtatccctgggattgggaagcggatggctgagaaaatcatagagatcctggagagcgggcatttgcggaagctggaccatatcagtgagagcgtgcctgtcttggagctcttctccaacatctggggagctgggaccaagactgcccagatgtggtaccaacagggcttccgaagtctggaagacatccgcagccaggcctccctgacaacccagcaggccatcggcctgaagcattacagtgacttcctggaacgtatgcccagggaggaggctacagagattgagcagacagtccagaaagcagcccaggcctttaactctgggctgctgtgtgtggcatgtggttcataccgacggggaaaggcgacctgtggtgatgtcgacgtgctcatcactcacccagatggccggtcccaccggggtatcttcagccgcctccttgacagtcttcggcaggaagggttcctcacagatgacttggtgagccaagaggagaatggtcagcaacagaagtacttgggggtgtgccggctcccagggccagggcggcggcaccggcgcctggacatcatcgtggtgccctatagcgagtttgcctgtgccctgctctacttcaccggctctgcacacttcaaccgctccatgcgagccctggccaaaaccaagggcatgagtctgtcagaacatgccctcagcactgctgtggtccggaacacccatggctgcaaggtggggcctggccgagtgctgcccactcccactgagaaggatgtcttcaggctcttaggcctcccctaccgagaacctgctgagcgggactggtgacccatggctgggggtgctgaggagagccgagttggactggctacccctcctggccacccagtactccctccagcctcagctggctgaacctcgccgctccaaccaccagcttcctcagcgagcagggcccagggctctgggcctgaagcaagagccagcccggctcccagtgtctgcccggctcccagtgtctgcccagccctctcccagacaggagcaggctgccaccccttctacctcaccactgcccctcgaagaattttgcaaatggccccttgccccattttaagcaggagcaggtggctggtttgaagccccaggtatcccccttccctgctatgggaaaggccaagctgctgggtggggacagaagctgcaggggagagggaagcagccgtgctgtcaacatcatccggcaccctctggggtaggagaacagccattccacatgtgttccctctatccgtcctgcttcctgggcagctggtggtgctgggaatggggtgccccagccttggtgaggacagtgttgggaggcccaggggcccagtaaagtgcatttgacattgaa

SEQ ID NO: 3238 - DNA, 2289 bp, Homo sapiens
  source 1..2289: mol_type = genomic DNA
ggttggagagactcttggggccggggtcgggcactccagctttcttctagccccgagctgggattccctggcctgcgccagctgcgtacacggcgagtacaccgcacctgcccgggacttcacccgcagctgcgagactcctccattcccggagggctccccacacctgctgcggccgtgccccatctccccgcagctgcggcgctgagcacccccatgtcgagaggctgagaccaggacaggtgcagggcgttcccactcacccccgaaagtcctcctccttcctctgcgagtctgtgttggaggtagagaaatagtatgtggggtttatgtgcaggtcctccccaggctccgctccatcccctaaagctccatttcctagcccagcatcccatttggtaaagcccttcgaagtgggccgcagcagggctgtgctgaatctttagcgcaacccctctgaggaatggtgtcgtttcctactcctcaaaagtacccccgatggcaccagccttcccctcatttcccgtaatactccaacttcgaaaggctggggagtgtgaagctaggctaaaccactgaagtttaaccgggtttgaagagaccccctcccccgacccgcttccccaaactgggctgctacccccaaagcctggtcaggaaagaccctacctccataggcaaaggggttggagggcctcaattctggatttccacgtgcagcagccctgaccaacgctccaataggccgggatccagccatacttcaatggatcccaggggtatcttgaaggcatttcccaagcggcagaaaattcatgctgatgcatcatcaaaagtacttgcaaagattcctaggagggaagagggagaagaagcagaaggaggcctgcagtatccctgggattgggaagcggatggctgagaaaatcatagagatcctggagagcgggcatttgcggaagctggaccatatcagtgagagcgtgcctgtcttggagctcttctccaacatctggggagctgggaccaagactgcccagatgtggtaccaacagggcttccgaagtctggaagacatccgcagccaggcctccctgacaacccagcaggccatcggcctgaagcattacagtgacttcctggaacgtatgcccagggaggaggctacagagattgagcagacagtccagaaagcagcccaggcctttaactctgggctgctgtgtgtggcatgtggttcataccgacggggaaaggcgacctgtggtgatgtcgacgtgctcatcactcacccagatggccggtcccaccggggtatcttcagccgcctccttgacagtcttcggcaggaagggttcctcacagatgacttggtgagccaagaggagaatggtcagcaacagaagtacttgggggtgtgccggctcccagggccagggcggcggcaccggcgcctggacatcatcgtggtgccctatagcgagtttgcctgtgccctgctctacttcaccggctctgcacacttcaaccgctccatgcgagccctggccaaaaccaagggcatgagtctgtcagaacatgccctcagcactgctgtggtccggaacacccatggctgcaaggtggggcctggccgagtgctgcccactcccactgagaaggatgtcttcaggctcttaggcctcccctaccgagaacctgctgagcgggactggtgacccatggctgggggtgctgaggagagccgagttggactggctacccctcctggccacccagtactccctccagcctcagctggctgaacctcgccgctccaaccaccagcttcctcagcgagcagggcccagggctctgggcctgaagcaagagccagcccggctcccagtgtctgcccggctcccagtgtctgcccagccctctcccagacaggagcaggctgccaccccttctacctcaccactgcccctcgaagaattttgcaaatggccccttgccccattttaagcaggagcaggtggctggtttgaagccccaggtatcccccttccctgctatgggaaaggccaagctgctgggtggggacagaagctgcaggggagagggaagcagccgtgctgtcaacatcatccggcaccctctggggtaggagaacagccattccacatgtgttccctctatccgtcctgcttcctgggcagctggtggtgctgggaatggggtgccccagccttggtgaggacagtgttgggaggcccaggggcccagtaaagtgcatttgacattgaa

SEQ ID NO: 3239 - DNA, 2278 bp, Homo sapiens
  source 1..2278: mol_type = genomic DNA
attctggccatttgccctccttccccccttcgtccgctctcattggctctgctgcagccctgaccaacgctccaataggccgggatccagccatacttcaatggatcccaggggtatcttgaaggcatttcccaagcggcagaaaattcatgctgatgcatcatcaaaagtacttgcaaagattcctaggagggaagagggagaagaagcagaagagtggctgagctcccttcgggcccatgttgtgcgcactggcattggacgagcccgggcagaactctttgagaagcagattgttcagcatggcggccagctatgccctgcccagggcccaggtgtcactcacattgtggtggatgaaggcatggactatgagcgagccctccgccttctcagactaccccagctgcccccgggtgctcagctggtgaagtcagcctggctgagcttgtgccttcaggagaggaggctggtggatgtagctggattcagcatcttcatccccagtaggtacttggaccatccacagcccagcaaggcagagcaggatgcttctattcctcctggcacccatgaggccctgcttcagacagccctttctcctcctcctcctcccaccaggcctgtgtctcctccccaaaaggcaaaagaggcaccaaacacccaagcccagcccatctctgatgatgaagccagtgatggggaagaaacccaggttagtgcagctgatctggaagccctcatcagtggccactaccccacctcccttgagggagattgtgagcctagcccagcccctgctgtcctggataagtgggtctgtgcacagccctcaagccagaaggcgaccaatcacaacctccatatcacagagaagctggaagttctggccaaagcctacagtgttcagggagacaagtggagggccctgggctatgccaaggccatcaatgccctcaagagcttccataagcctgtcacctcgtaccaggaggcctgcagtatccctgggattgggaagcggatggctgagaaaatcatagagatcctggagagcgggcatttgcggaagctggaccatatcagtgagagcgtgcctgtcttggagctcttctccaacatctggggagctgggaccaagactgcccagatgtggtaccaacagggcttccgaagtctggaagacatccgcagccaggcctccctgacaacccagcaggccatcggcctgaagcattacagtgacttcctggaacgtatgcccagggaggaggctacagagattgagcagacagtccagaaagcagcccaggcctttaactctgggctgctgtgtgtggcatgtggttcataccgacggggaaaggcgacctgtggtgatgtcgacgtgctcatcactcacccagatggccggtcccaccggggtatcttcagccgcctccttgacagtcttcggcaggaagggttcctcacagatgacttggtgagccaagaggagaatggtcagcaacagaagtacttgggggtgtgccggctcccagggccagggcggcggcaccggcgcctggacatcatcgtggtgccctatagcgagtttgcctgtgccctgcaaggtggggcctggccgagtgctgcccactcccactgagaaggatgtcttcaggctcttaggcctcccctaccgagaacctgctgagcgggactggtgacccatggctgggggtgctgaggagagccgagttggactggctacccctcctggccacccagtactccctccagcctcagctggctgaacctcgccgctccaaccaccagcttcctcagcgagcagggcccagggctctgggcctgaagcaagagccagcccggctcccagtgtctgcccggctcccagtgtctgcccagccctctcccagacaggagcaggctgccaccccttctacctcaccactgcccctcgaagaattttgcaaatggccccttgccccattttaagcaggagcaggtggctggtttgaagccccaggtatcccccttccctgctatgggaaaggccaagctgctgggtggggacagaagctgcaggggagagggaagcagccgtgctgtcaacatcatccggcaccctctggggtaggagaacagccattccacatgtgttccctctatccgtcctgcttcctgggcagctggtggtgctgggaatggggtgccccagccttggtgaggacagtgttgggaggcccaggggcccagtaaagtgcatttgacattg

SEQ ID NO: 3240 - DNA, 2287 bp, Homo sapiens
  source 1..2287: mol_type = genomic DNA
ggttggagagactcttggggccggggtcgggcactccagctttcttctagccccgagctgggattccctggcctgcgccagctgcgtacacggcgagtacaccgcacctgcccgggacttcacccgcagctgcgagactcctccattcccggagggctccccacacctgctgcggccgtgccccatctccccgcagctgcggcgctgagcacccccatgtcgagaggctgagaccaggacaggtgcagggcgttcccactcacccccgaaagtcctcctccttcctctgcgagtctgtgttggaggtagagaaatagtatgtggggtttatgtgcaggtcctccccaggctccgctccatcccctaaagctccatttcctagcccagcatcccatttggtaaagcccttcgaagtgggccgcagcagggctgtgctgaatctttagcgcaacccctctgaggaatggtgtcgtttcctactcctcaaaagtacccccgatggcaccagccttcccctcatttcccgtaatactccaacttcgaaaggctggggagtgtgaagctaggctaaaccactgaagtttaaccgggtttgaagagaccccctcccccgacccgcttccccaaactgggctgctacccccaaagcctggtcaggaaagaccctacctccataggcaaaggggttggagggcctcaattctggatttccacgtgcagcagccctgaccaacgctccaataggccgggatccagccatacttcaatggatcccaggggtatcttgaaggcatttcccaagcggcagaaaattcatgctgatgcatcatcaaaagtacttgcaaagattcctaggagggaagagggagaagaagcagaaggaggcctgcagtatccctgggattgggaagcggatggctgagaaaatcatagagatcctggagagcgggcatttgcggaagctggaccatatcagtgagagcgtgcctgtcttggagctcttctccaacatctggggagctgggaccaagactgcccagatgtggtaccaacagggcttccgaagtctggaagacatccgcagccaggcctccctgacaacccagcaggccatcggcctgaagcattacagtgacttcctggaacgtatgcccagggaggaggctacagagattgagcagacagtccagaaagcagcccaggcctttaactctgggctgctgtgtgtggcatgtggttcataccgacggggaaaggcgacctgtggtgatgtcgacgtgctcatcactcacccagatggccggtcccaccggggtatcttcagccgcctccttgacagtcttcggcaggaagggttcctcacagatgacttggtgagccaagaggagaatggtcagcaacagaagtacttgggggtgtgccggctcccagggccagggcggcggcaccggcgcctggacatcatcgtggtgccctatagcgagtttgcctgtgccctgctctacttcaccggctctgcacacttcaaccgctccatgcgagccctggccaaaaccaagggcatgagtctgtcagaacatgccctcagcactgctgtggtccggaacacccatggctgcaaggtggggcctggccgagtgctgcccactcccactgagaaggatgtcttcaggctcttaggcctcccctaccgagaacctgctgagcgggactggtgacccatggctgggggtgctgaggagagccgagttggactggctacccctcctggccacccagtactccctccagcctcagctggctgaacctcgccgctccaaccaccagcttcctcagcgagcagggcccagggctctgggcctgaagcaagagccagcccggctcccagtgtctgcccggctcccagtgtctgcccagccctctcccagacaggagcaggctgccaccccttctacctcaccactgcccctcgaagaattttgcaaatggccccttgccccattttaagcaggagcaggtggctggtttgaagccccaggtatcccccttccctgctatgggaaaggccaagctgctgggtggggacagaagctgcaggggagagggaagcagccgtgctgtcaacatcatccggcaccctctggggtaggagaacagccattccacatgtgttccctctatccgtcctgcttcctgggcagctggtggtgctgggaatggggtgccccagccttggtgaggacagtgttgggaggcccaggggcccagtaaagtgcatttgacattg

SEQ ID NO: 3241 - DNA, 2792 bp, Homo sapiens
  source 1..2792: mol_type = genomic DNA
tgactcggaagctattctggccatttgccctccttccccccttcgtccgctctcattggctctgctggtaagtggtctattcctgcccacccccgggtgactagcttggccagtagtcgaccccacccggggaccgactctgggggttggagagactcttggggccggggtcgggcactccagctttcttctagccccgagctgggattccctggcctgcgccagctgcgtacacggcgagtacaccgcacctgcccgggacttcacccgcagctgcgagactcctccattcccggagggctccccacacctgctgcggccgtgccccatctccccgcagctgcggcgctgagcacccccatgtcgagaggctgagaccaggacaggtgcagggcgttcccactcacccccgaaagtcctcctccttcctctgcgagtctgtgttggagcagccctgaccaacgctccaataggccgggatccagccatacttcaatggatcccaggggtatcttgaaggcatttcccaagcggcagaaaattcatgctgatgcatcatcaaaagtacttgcaaagattcctaggagggaagagggagaagaagcagaagagtggctgagctcccttcgggcccatgttgtgcgcactggcattggacgagcccgggcagaactctttgagaagcagattgttcagcatggcggccagctatgccctgcccagggcccaggtgtcactcacattgtggtggatgaaggcatggactatgagcgagccctccgccttctcagactaccccagctgcccccgggtgctcagctggtgaagtcagcctggctgagcttgtgccttcaggagaggaggctggtggatgtagctggattcagcatcttcatccccagtaggtacttggaccatccacagcccagcaaggcagagcaggatgcttctattcctcctggcacccatgaggccctgcttcagacagccctttctcctcctcctcctcccaccaggcctgtgtctcctccccaaaaggcaaaagaggcaccaaacacccaagcccagcccatctctgatgatgaagccagtgatggggaagaaacccaggttagtgcagctgatctggaagccctcatcagtggccactaccccacctcccttgagggagattgtgagcctagcccagcccctgctgtcctggataagtgggtctgtgcacagccctcaagccagaaggcgaccaatcacaacctccatatcacagagaagctggaagttctggccaaagcctacagtgttcagggagacaagtggagggccctgggctatgccaaggccatcaatgccctcaagagcttccataagcctgtcacctcgtaccaggaggcctgcagtatccctgggattgggaagcggatggctgagaaaatcatagagatcctggagagcgggcatttgcggaagctggaccatatcagtgagagcgtgcctgtcttggagctcttctccaacatctggggagctgggaccaagactgcccagatgtggtaccaacagggcttccgaagtctggaagacatccgcagccaggcctccctgacaacccagcaggccatcggcctgaagcattacagtgacttcctggaacgtatgcccagggaggaggctacagagattgagcagacagtccagaaagcagcccaggcctttaactctgggctgctgtgtgtggcatgtggttcataccgacggggaaaggcgacctgtggtgatgtcgacgtgctcatcactcacccagatggccggtcccaccggggtatcttcagccgcctccttgacagtcttcggcaggaagggttcctcacagatgacttggtgagccaagaggagaatggtcagcaacagaagtacttgggggtgtgccggctcccagggccagggcggcggcaccggcgcctggacatcatcgtggtgccctatagcgagtttgcctgtgccctgctctacttcaccggctctgcacacttcaaccgctccatgcgagccctggccaaaaccaagggcatgagtctgtcagaacatgccctcagcactgctgtggtccggaacacccatggctgcaaggtggggcctggccgagtgctgcccactcccactgagaaggatgtcttcaggctcttaggcctcccctaccgagaacctgctgagcgggactggtgacccatggctgggggtgctgaggagagccgagttggactggctacccctcctggccacccagtactccctccagcctcagctggctgaacctcgccgctccaaccaccagcttcctcagcgagcagggcccagggctctgggcctgaagcaagagccagcccggctcccagtgtctgcccggctcccagtgtctgcccagccctctcccagacaggagcaggctgccaccccttctacctcaccactgcccctcgaagaattttgcaaatggccccttgccccattttaagcaggagcaggtggctggtttgaagccccaggtatcccccttccctgctatgggaaaggccaagctgctgggtggggacagaagctgcaggggagagggaagcagccgtgctgtcaacatcatccggcaccctctggggtaggagaacagccattccacatgtgttccctctatccgtcctgcttcctgggcagctggtggtgctgggaatggggtgccccagccttggtgaggacagtgttgggaggcccaggggcccagtaaagtgcatttgacattg

SEQ ID NO: 3242 - DNA, 2505 bp, Homo sapiens
  source 1..2505: mol_type = genomic DNA
ctgctggtaagtggtctattcctgcccacccccgggtgactagcttggccagtagtcgaccccacccggggaccgactctgggggttggagagactcttggggccggggtcgggcactccagctttcttctagccccgagctgggattccctggcctgcgccagctgcgtacacggcgagtacaccgcacctgcccgggacttcacccgcagctgcgagactcctccattcccggagggctccccacacctgctgcggccgtgccccatctccccgcagctgcggcgctgagcacccccatgtcgagaggctgagaccaggacagcagccctgaccaacgctccaataggccgggatccagccatacttcaatggatcccaggggtatcttgaaggcatttcccaagcggcagaaaattcatgctgatgcatcatcaaaagtacttgcaaagattcctaggagggaagagggagaagaagcagaagagtggctgagctcccttcgggcccatgttgtgcgcactggcattggacgagcccgggcagaactctttgagaagcagattgttcagcatggcggccagctatgccctgcccagggcccaggtgtcactcacattgtggtggatgaaggcatggactatgagcgagccctccgccttctcagactaccccagctgcccccgggtgctcagctggtgaagtcagcctggctgagcttgtgccttcaggagaggaggctggtggatgtagctggattcagcatcttcatccccagtagcccatctctgatgatgaagccagtgatggggaagaaacccaggttagtgcagctgatctggaagccctcatcagtggccactaccccacctcccttgagggagattgtgagcctagcccagcccctgctgtcctggataagtgggtctgtgcacagccctcaagccagaaggcgaccaatcacaacctccatatcacagagaagctggaagttctggccaaagcctacagtgttcagggagacaagtggagggccctgggctatgccaaggccatcaatgccctcaagagcttccataagcctgtcacctcgtaccaggaggcctgcagtatccctgggattgggaagcggatggctgagaaaatcatagagatcctggagagcgggcatttgcggaagctggaccatatcagtgagagcgtgcctgtcttggagctcttctccaacatctggggagctgggaccaagactgcccagatgtggtaccaacagggcttccgaagtctggaagacatccgcagccaggcctccctgacaacccagcaggccatcggcctgaagcattacagtgacttcctggaacgtatgcccagggaggaggctacagagattgagcagacagtccagaaagcagcccaggcctttaactctgggctgctgtgtgtggcatgtggttcataccgacggggaaaggcgacctgtggtgatgtcgacgtgctcatcactcacccagatggccggtcccaccggggtatcttcagccgcctccttgacagtcttcggcaggaagggttcctcacagatgacttggtgagccaagaggagaatggtcagcaacagaagtacttgggggtgtgccggctcccagggccagggcggcggcaccggcgcctggacatcatcgtggtgccctatagcgagtttgcctgtgccctgctctacttcaccggctctgcacacttcaaccgctccatgcgagccctggccaaaaccaagggcatgagtctgtcagaacatgccctcagcactgctgtggtccggaacacccatggctgcaaggtggggcctggccgagtgctgcccactcccactgagaaggatgtcttcaggctcttaggcctcccctaccgagaacctgctgagcgggactggtgacccatggctgggggtgctgaggagagccgagttggactggctacccctcctggccacccagtactccctccagcctcagctggctgaacctcgccgctccaaccaccagcttcctcagcgagcagggcccagggctctgggcctgaagcaagagccagcccggctcccagtgtctgcccggctcccagtgtctgcccagccctctcccagacaggagcaggctgccaccccttctacctcaccactgcccctcgaagaattttgcaaatggccccttgccccattttaagcaggagcaggtggctggtttgaagccccaggtatcccccttccctgctatgggaaaggccaagctgctgggtggggacagaagctgcaggggagagggaagcagccgtgctgtcaacatcatccggcaccctctggggtaggagaacagccattccacatgtgttccctctatccgtcctgcttcctgggcagctggtggtgctgggaatggggtgccccagccttggtgaggacagtgttgggaggcccaggggcccagtaaagtgcatttgacattg

SEQ ID NO: 3243 - DNA, 1536 bp, Homo sapiens
  source 1..1536: mol_type = genomic DNA
cctggctctgcccacaatcaccagggcagcttggtaaggatgaagatgacaaggtccatcctcagactgatggaatcatgaacgagcatcttaggatagtggcagggctggatgatggcatgtttcccatgctccctgcctttcccaagtcctgctgagtacagacccaactgcccctaggttggtcctgcctctagccttccctagagtctggggcgatggaagccttgtgtgtgtgctcactcatgcctcttcattggtcctggatccttacagcttcccatctggctgcttttttccagggcttccgaagtctggaagacatccgcagccaggcctccctgacaacccagcaggccatcggcctgaagcattacagtgacttcctggaacgtatgcccagggaggaggctacagagattgagcagacagtccagaaagcagcccaggcctttaactctgggctgctgtgtgtggcatgtggttcataccgacggggaaaggcgacctgtggtgatgtcgacgtgctcatcactcacccagatggccggtcccaccggggtatcttcagccgcctccttgacagtcttcggcaggaagggttcctcacagatgacttggtgagccaagaggagaatggtcagcaacagaagtacttgggggtgtgccggctcccagggccagggcggcggcaccggcgcctggacatcatcgtggtgccctatagcgagtttgcctgtgccctgctctacttcaccggctctgcacacttcaaccgctccatgcgagccctggccaaaaccaagggcatgagtctgtcagaacatgccctcagcactgctgtggtccggaacacccatggctgcaaggtggggcctggccgagtgctgcccactcccactgagaaggatgtcttcaggctcttaggcctcccctaccgagaacctgctgagcgggactggtgacccatggctgggggtgctgaggagagccgagttggactggctacccctcctggccacccagtactccctccagcctcagctggctgaacctcgccgctccaaccaccagcttcctcagcgagcagggcccagggctctgggcctgaagcaagagccagcccggctcccagtgtctgcccggctcccagtgtctgcccagccctctcccagacaggagcaggctgccaccccttctacctcaccactgcccctcgaagaattttgcaaatggccccttgccccattttaagcaggagcaggtggctggtttgaagccccaggtatcccccttccctgctatgggaaaggccaagctgctgggtggggacagaagctgcaggggagagggaagcagccgtgctgtcaacatcatccggcaccctctggggtaggagaacagccattccacatgtgttccctctatccgtcctgcttcctgggcagctggtggtgctgggaatggggtgccccagccttggtgaggacagtgttgggaggcccaggggcccagtaaagtgcatttgacattgaa

SEQ ID NO: 3244 - DNA, 2360 bp, Homo sapiens
  source 1..2360: mol_type = genomic DNA
gatttccacgtgcagcagccctgaccaacgctccaataggccgggatccagccatacttcaatggatcccaggggtatcttgaaggcatttcccaagcggcagaaaattcatgctgatgcatcatcaaaagtacttgcaaagattcctaggagggaagagggagaagaagcagaagagtggctgagctcccttcgggcccatgttgtgcgcactggcattggacgagcccgggcagaactctttgagaagcagattgttcagcatggcggccagctatgccctgcccagggcccaggtgtcactcacattgtggtggatgaaggcatggactatgagcgagccctccgccttctcagactaccccagctgcccccgggtgctcagctggtgaagtcagcctggctgagcttgtgccttcaggagaggaggctggtggatgtagctggattcagcatcttcatccccagtaggtacttggaccatccacagcccagcaaggcagagcaggatgcttctattcctcctggcacccatgaggccctgcttcagacagccctttctcctcctcctcctcccaccaggcctgtgtctcctccccaaaaggcaaaagaggcaccaaacacccaagcccagcccatctctgatgatgaagccagtgatggggaagaaacccaggttagtgcagctgatctggaagccctcatcagtggccactaccccacctcccttgagggagattgtgagcctagcccagcccctgctgtcctggataagtgggtctgtgcacagccctcaagccagaaggcgaccaatcacaacctccatatcacagagaagctggaagttctggccaaagcctacagtgttcagggagacaagtggagggccctgggctatgccaaggccatcaatgccctcaagagcttccataagcctgtcacctcgtaccaggaggcctgcagtatccctgggattgggaagcggatggctgagaaaatcatagagatcctggagagcgggcatttgcggaagctggaccatatcagtgagagcgtgcctgtcttggagctcttctccaacatctggggagctgggaccaagactgcccagatgtggtaccaacagggcttccgaagtctggaagacatccgcagccaggcctccctgacaacccagcaggccatcggcctgaagcattacagtgacttcctggaacgtatgcccagggaggaggctacagagattgagcagacagtccagaaagcagcccaggcctttaactctgggctgctgtgtgtggcatgtggttcataccgacggggaaaggcgacctgtggtgatgtcgacgtgctcatcactcacccagatggccggtcccaccggggtatcttcagccgcctccttgacagtcttcggcaggaagggttcctcacagatgacttggtgagccaagaggagaatggtcagcaacagaagtacttgggggtgtgccggctcccagggccagggcggcggcaccggcgcctggacatcatcgtggtgccctatagcgagtttgcctgtgccctgctctacttcaccggctctgcacacttcaaccgctccatgcgagccctggccaaaaccaagggcatgagtctgtcagaacatgccctcagcactgctgtggtccggaacacccatggctgcaaggtggggcctggccgagtgctgcccactcccactgagaaggatgtcttcaggctcttaggcctcccctaccgagaacctgctgagcgggactggtgacccatggctgggggtgctgaggagagccgagttggactggctacccctcctggccacccagtactccctccagcctcagctggctgaacctcgccgctccaaccaccagcttcctcagcgagcagggcccagggctctgggcctgaagcaagagccagcccggctcccagtgtctgcccggctcccagtgtctgcccagccctctcccagacaggagcaggctgccaccccttctacctcaccactgcccctcgaagaattttgcaaatggccccttgccccattttaagcaggagcaggtggctggtttgaagccccaggtatcccccttccctgctatgggaaaggccaagctgctgggtggggacagaagctgcaggggagagggaagcagccgtgctgtcaacatcatccggcaccctctggggtaggagaacagccattccacatgtgttccctctatccgtcctgcttcctgggcagctggtggtgctgggaatggggtgccccagccttggtgaggacagtgttgggaggcccaggggcccagtaaagtgcatttgacattgaa

SEQ ID NO: 3245 - DNA, 2308 bp, Homo sapiens
  source 1..2308: mol_type = genomic DNA
atttgccctccttccccccttcgtccgctctcattggctctgctgccttcatgtgcttcagccctacgttgtttatgtccagaatcagatattggagctgactctgcctgtccagggcctgcagagtggctgagctcccttcgggcccatgttgtgcgcactggcattggacgagcccgggcagaactctttgagaagcagattgttcagcatggcggccagctatgccctgcccagggcccaggtgtcactcacattgtggtggatgaaggcatggactatgagcgagccctccgccttctcagactaccccagctgcccccgggtgctcagctggtgaagtcagcctggctgagcttgtgccttcaggagaggaggctggtggatgtagctggattcagcatcttcatccccagtaggtacttggaccatccacagcccagcaaggcagagcaggatgcttctattcctcctggcacccatgaggccctgcttcagacagccctttctcctcctcctcctcccaccaggcctgtgtctcctccccaaaaggcaaaagaggcaccaaacacccaagcccagcccatctctgatgatgaagccagtgatggggaagaaacccaggttagtgcagctgatctggaagccctcatcagtggccactaccccacctcccttgagggagattgtgagcctagcccagcccctgctgtcctggataagtgggtctgtgcacagccctcaagccagaaggcgaccaatcacaacctccatatcacagagaagctggaagttctggccaaagcctacagtgttcagggagacaagtggagggccctgggctatgccaaggccatcaatgccctcaagagcttccataagcctgtcacctcgtaccaggaggcctgcagtatccctgggattgggaagcggatggctgagaaaatcatagagatcctggagagcgggcatttgcggaagctggaccatatcagtgagagcgtgcctgtcttggagctcttctccaacatctggggagctgggaccaagactgcccagatgtggtaccaacagggcttccgaagtctggaagacatccgcagccaggcctccctgacaacccagcaggccatcggcctgaagcattacagtgacttcctggaacgtatgcccagggaggaggctacagagattgagcagacagtccagaaagcagcccaggcctttaactctgggctgctgtgtgtggcatgtggttcataccgacggggaaaggcgacctgtggtgatgtcgacgtgctcatcactcacccagatggccggtcccaccggggtatcttcagccgcctccttgacagtcttcggcaggaagggttcctcacagatgacttggtgagccaagaggagaatggtcagcaacagaagtacttgggggtgtgccggctcccagggccagggcggcggcaccggcgcctggacatcatcgtggtgccctatagcgagtttgcctgtgccctgctctacttcaccggctctgcacacttcaaccgctccatgcgagccctggccaaaaccaagggcatgagtctgtcagaacatgccctcagcactgctgtggtccggaacacccatggctgcaaggtggggcctggccgagtgctgcccactcccactgagaaggatgtcttcaggctcttaggcctcccctaccgagaacctgctgagcgggactggtgacccatggctgggggtgctgaggagagccgagttggactggctacccctcctggccacccagtactccctccagcctcagctggctgaacctcgccgctccaaccaccagcttcctcagcgagcagggcccagggctctgggcctgaagcaagagccagcccggctcccagtgtctgcccggctcccagtgtctgcccagccctctcccagacaggagcaggctgccaccccttctacctcaccactgcccctcgaagaattttgcaaatggccccttgccccattttaagcaggagcaggtggctggtttgaagccccaggtatcccccttccctgctatgggaaaggccaagctgctgggtggggacagaagctgcaggggagagggaagcagccgtgctgtcaacatcatccggcaccctctggggtaggagaacagccattccacatgtgttccctctatccgtcctgcttcctgggcagctggtggtgctgggaatggggtgccccagccttggtgaggacagtgttgggaggcccaggggcccagtaaagtgcatttgacattgaa

SEQ ID NO: 3246 - DNA, 2280 bp, Homo sapiens
  source 1..2280: mol_type = genomic DNA
attctggccatttgccctccttccccccttcgtccgctctcattggctctgctgcagccctgaccaacgctccaataggccgggatccagccatacttcaatggatcccaggggtatcttgaaggcatttcccaagcggcagaaaattcatgctgatgcatcatcaaaagtacttgcaaagattcctaggagggaagagggagaagaagcagaagagtggctgagctcccttcgggcccatgttgtgcgcactggcattggacgagcccgggcagaactctttgagaagcagattgttcagcatggcggccagctatgccctgcccagggcccaggtgtcactcacattgtggtggatgaaggcatggactatgagcgagccctccgccttctcagactaccccagctgcccccgggtgctcagctggtgaagtcagcctggctgagcttgtgccttcaggagaggaggctggtggatgtagctggattcagcatcttcatccccagtaggtacttggaccatccacagcccagcaaggcagagcaggatgcttctattcctcctggcacccatgaggccctgcttcagacagccctttctcctcctcctcctcccaccaggcctgtgtctcctccccaaaaggcaaaagaggcaccaaacacccaagcccagcccatctctgatgatgaagccagtgatggggaagaaacccaggttagtgcagctgatctggaagccctcatcagtggccactaccccacctcccttgagggagattgtgagcctagcccagcccctgctgtcctggataagtgggtctgtgcacagccctcaagccagaaggcgaccaatcacaacctccatatcacagagaagctggaagttctggccaaagcctacagtgttcagggagacaagtggagggccctgggctatgccaaggccatcaatgccctcaagagcttccataagcctgtcacctcgtaccaggaggcctgcagtatccctgggattgggaagcggatggctgagaaaatcatagagatcctggagagcgggcatttgcggaagctggaccatatcagtgagagcgtgcctgtcttggagctcttctccaacatctggggagctgggaccaagactgcccagatgtggtaccaacagggcttccgaagtctggaagacatccgcagccaggcctccctgacaacccagcaggccatcggcctgaagcattacagtgacttcctggaacgtatgcccagggaggaggctacagagattgagcagacagtccagaaagcagcccaggcctttaactctgggctgctgtgtgtggcatgtggttcataccgacggggaaaggcgacctgtggtgatgtcgacgtgctcatcactcacccagatggccggtcccaccggggtatcttcagccgcctccttgacagtcttcggcaggaagggttcctcacagatgacttggtgagccaagaggagaatggtcagcaacagaagtacttgggggtgtgccggctcccagggccagggcggcggcaccggcgcctggacatcatcgtggtgccctatagcgagtttgcctgtgccctgcaaggtggggcctggccgagtgctgcccactcccactgagaaggatgtcttcaggctcttaggcctcccctaccgagaacctgctgagcgggactggtgacccatggctgggggtgctgaggagagccgagttggactggctacccctcctggccacccagtactccctccagcctcagctggctgaacctcgccgctccaaccaccagcttcctcagcgagcagggcccagggctctgggcctgaagcaagagccagcccggctcccagtgtctgcccggctcccagtgtctgcccagccctctcccagacaggagcaggctgccaccccttctacctcaccactgcccctcgaagaattttgcaaatggccccttgccccattttaagcaggagcaggtggctggtttgaagccccaggtatcccccttccctgctatgggaaaggccaagctgctgggtggggacagaagctgcaggggagagggaagcagccgtgctgtcaacatcatccggcaccctctggggtaggagaacagccattccacatgtgttccctctatccgtcctgcttcctgggcagctggtggtgctgggaatggggtgccccagccttggtgaggacagtgttgggaggcccaggggcccagtaaagtgcatttgacattgaa

SEQ ID NO: 3247 - DNA, 855 bp, Homo sapiens
  source 1..855: mol_type = genomic DNA
cttcgtccgctctcattggctctgctggccgggatccagccatacttcaatggatcccaggggtatcttgaaggcatttcccaagcggcagaaaattcatgctgatgcatcatcaaaagtacttgcaaagattcctaggagggaagagggagaagaagcagaagagtggctgagctcccttcgggcccatgttgtgcgcactggcattggacgagcccgggcagaactctttgagaagcagattgttcagcatggcggccagctatgccctgcccagggcccaggtgtcactcacattgtggtggatgaaggcatggactatgagcgagccctccgccttctcagactaccccagctgcccccgggtgctcagctggtgaagtcagcctggctgagcttgtgccttcaggagaggaggctggtggatgtagctggattcagcatcttcatccccagtaggtacttggaccatccacagcccagcaaggcagagcaggatgcttctattcctcctggcacccatgaggccctgcttcagacagccctttctcctcctcctcctcccaccaggcctgtgtctcctccccaaaaggcaaaagaggcaccaaacacccaagcccagcccatctctgatgatgaagccagtgatggggaagaaacccaggttagtgcagctgatctggaagccctcatcagtggccactaccccacctcccttgagggagattgtgagcctagcccagcccctgctgtcctggataagtgggtctgtgcacagccctcaagccagaaggcgaccaatcacaacctccatatcacagagaagctggaagttctggccaaagcctacagtgt

SEQ ID NO: 3248 - DNA, 1457 bp, Homo sapiens
  source 1..1457: mol_type = genomic DNA
cagccctgaccaacgctccaataggccgggatccagccatacttcaatggatcccaggggtatcttgaaggcatttcccaagcggcagaaaattcatgctgatgcatcatcaaaagtacttgcaaagattcctaggagggaagagggagaagaagcagaagagtggctgagctcccttcgggcccatgttgtgcgcactggcattggacgagcccgggcagaactctttgagaagcagattgttcagcatggcggccagctatgccctgcccagggcccaggtgtcactcacattgtggtggatgaaggcatggactatgagcgagccctccgccttctcagactaccccagctgcccccgggtgctcagctggtgaagtcagcctggctgagcttgtgccttcaggagaggaggctggtggatgtagctggattcagcatcttcatccccagtaggtacttggaccatccacagcccagcaaggcagagcaggatgcttctattcctcctggcacccatgaggccctgcttcagacagccctttctcctcctcctcctcccaccaggcctgtgtctcctccccaaaaggcaaaagaggcaccaaacacccaagcccagcccatctctgatgatgaagccagtgatggggaagaaacccaggaggcctgcagtatccctgggattgggaagcggatggctgagaaaatcatagagatcctggagagcgggcatttgcggaagctggaccatatcagtgagagcgtgcctgtcttggagctcttctccaacatctggggagctgggaccaagactgcccagatgtggtaccaacagggcttccgaagtctggaagacatccgcagccaggcctccctgacaacccagcaggccatcggcctgaagcattacagtgacttcctggaacgtatgcccagggaggaggctacagagattgagcagacagtccagaaagcagcccaggcctttaactctgggctgctgtgtgtggcatgtggttcataccgacggggaaaggcgacctgtggtgatgtcgacgtgctcatcactcacccagatggccggtcccaccggggtatcttcagccgcctccttgacagtcttcggcaggaagcagtcccctctgttgggccagggttcctcacagatgacttggtgagccaagaggagaatggtcagcaacagaagtacttgggggtgtgccggctcccagggccagggcggcggcaccggcgcctggacatcatcgtggtgccctatagcgagtttgcctgtgccctgctctacttcaccggctctgcacacttcaaccgctccatgcgagccctggccaaaaccaagggcatgagtctgtcagaacatgccctcagcactgctgtggtccggaacacccatggctgcaaggtggggcctggccgagtgctgcccactcccactg

SEQ ID NO: 3249 - DNA, 1049 bp, Homo sapiens
  source 1..1049: mol_type = genomic DNA
agccctgaccaacgctccaataggccgggatccagccatacttcaatggatcccaggggtatcttgaaggcatttcccaagcggcagaaaattcatgctgatgcatcatcaaaaccttcatgtgcttcagccctacgttgtttatgtccagaatcagatattggagctgactctgcctgtccagggcctgcagagtggctgagctcccttcgggcccatgttgtgcgcactggcattggacgagcccgggcagaactctttgagaagcagattgttcagcatggcggccagctatgccctgcccagggcccaggtgtcactcacattgtggtggatgaaggcatggactatgagcgagccctccgccttctcagactaccccagctgcccccgggtgctcagctggtgaagtcagcctggctgagcttgtgccttcaggagaggaggctggtggatgtagctggattcagcatcttcatccccagtaggtacttggaccatccacagcccagcaaggcagagcaggatgcttctattcctcctggcacccatgaggccctgcttcagacagccctttctcctcctcctcctcccaccaggcctgtgtctcctccccaaaaggcaaaagaggcaccaaacacccaagcccagcccatctctgatgatgaagccagtgatggggaagaaacccaggttagtgcagctgatctggaagccctcatcagtggccactaccccacctcccttgagggagattgtgagcctagcccagcccctgctgtcctggataagtgggtctgtgcacagccctcaagccagaaggcgaccaatcacaacctccatatcacagagaagctggaagttctggccaaagcctacagtgttcagggagacaagtggagggccctgggctatgccaaggccatcaatgccctcaagagcttccataagcctgtcacctcgtaccaggaggcctgcagtatccctgggattgggaagcggatggctgagaaaatcatagagatcctggagagcgggcatttgcggaa

SEQ ID NO: 3250 - DNA, 784 bp, Homo sapiens
  source 1..784: mol_type = genomic DNA
cccttcgtccgctctcattggctctgctgcagccctgaccaacgctccaataggccgggatccagccatacttcaatggatcccaggggtatcttgaaggcatttcccaagcggcagaaaattcatgctgatgcatcatcaaaagtacttgcaaagattcctaggagggaagagggagaagaagcagaaggaggcctgcagtatccctgggattgggaagcggatggctgagaaaatcatagagatcctggagagcgggcatttgcggaagctggaccatatcagtgagagcgtgcctgtcttggagctcttctccaacatctggggagctgggaccaagactgcccagatgtggtaccaacagggcttccgaagtctggaagacatccgcagccaggcctccctgacaacccagcaggccatcggcctgaagcattacagtgacttcctggaacgtatgcccagggaggaggctacagagattgagcagacagtccagaaagcagcccaggcctttaactctgggctgctgtgtgtggcatgtggttcataccgacggggaaaggcgacctgtggtgatgtcgacgtgctcatcactcacccagatggccggtcccaccggggtatcttcagccgcctccttgacagtcttcggcaggaagggttcctcacagatgacttggtgagccaagaggagaatggtcagcaacagaagtacttgggggtgtgccggctcccagggccagggcggcggcaccggcgcctggacatcatcgtggtgccc

SEQ ID NO: 3251 - DNA, 1022 bp, Homo sapiens
  source 1..1022: mol_type = genomic DNA
cccttcgtccgctctcattggctctgctggtaagtggtctattcctgcccacccccgggtgactagcttggccagtagtcgaccccacccggggaccgactctgggggttggagagactcttggggccggggtcgggcactccagctttcttctagccccgagctgggattccctggcctgcgccagctgcgtacacggcgagtacaccgcacctgcccgggacttcacccgcagctgcgagactcctccattcccggagggctccccacacctgctgcggccgtgccccatctccccgcagctgcggcgctgagcacccccatgtcgagaggctgagaccaggacaggtgcagggcgttcccactcacccccgaaagtcctcctccttcctctgcgagtctgtgttggagcagccctgaccaacgctccaataggccgggatccagccatacttcaatggatcccaggggtatcttgaaggcatttcccaagcggcagaaaattcatgctgatgcatcatcaaaagtacttgcaaagattcctaggagggaagagggagaagaagcagaagagtggctgagctcccttcgggcccatgttgtgcgcactggcattggacgagcccgggcagaactctttgagaagcagattgttcagcatggcggccagctatgccctgcccagggcccaggtgtcactcacattgtggtggatgaaggcatggactatgagcgagccctccgccttctcagactaccccagctgcccccgggtgctcagctggtgaagtcagcctggctgagcttgtgccttcaggagaggaggctggtggatgtagctggattcagcatcttcatccccagtaggtacttggaccatccacagcccagcaaggcagagcaggatgcttctattcctcctggcacccatgaggccctgcttcagacagccctttctcctcctcctcctcccaccaggcctgtgtctcctccccaaaaggcaaaagaggcaccaaacaccc

SEQ ID NO: 3252 - DNA, 1257 bp, Homo sapiens
  source 1..1257: mol_type = genomic DNA
tctggccatttgccctccttccccccttcgtccgctctcattggctctgctgagtggctgagctcccttcgggcccatgttgtgcgcactggcattggacgagcccgggcagaactctttgagaagcagattgttcagcatggcggccagctatgccctgcccagggcccaggtgtcactcacattgtggtggatgaaggcatggactatgagcgagccctccgccttctcagactaccccagctgcccccgggtgctcagctggtgaagtcagcctggctgagcttgtgccttcaggagaggaggctggtggatgtagctggattcagcatcttcatccccagtagcccatctctgatgatgaagccagtgatggggaagaaacccaggttagtgcagctgatctggaagccctcatcagtggccactaccccacctcccttgagggagattgtgagcctagcccagcccctgctgtcctggataagtgggtctgtgcacagccctcaagccagaaggcgaccaatcacaacctccatatcacagagaagctggaagttctggccaaagcctacagtgttcagggagacaagtggagggccctgggctatgccaaggccatcaatgccctcaagagcttccataagcctgtcacctcgtaccaggaggcctgcagtatccctgggattgggaagcggatggctgagaaaatcatagagatcctggagagcgggcatttgcggaagctggaccatatcagtgagagcgtgcctgtcttggagctcttctccaacatctggggagctgggaccaagactgcccagatgtggtaccaacaggtcacaccctggctcagcccctacttcagttttgctgtgtctcagagttcctgccccagatgtgtgctgtgctctgccccagatccctatgctgtgctctgatgggaatgcacccacagtatagggagaccatttttcaagcggaccaggactcatatagacccctcagctcccagaacagccttgttgcttggtatccttaagaaggagtagacagggacaagaagtatgtttctcagtctccccagaccagcaagggccttcctgaggaggccaggccttgacactgcgtgtctagagcagtggttcccaatcctggctctgcccacaatcaccagggcagcttggtaaggatgaagatgacaaggtccatcctcagactgatggaatcatgaacgagcatcttaggatagtggca

SEQ ID NO: 3253 - DNA, 683 bp, Homo sapiens
  source 1..683: mol_type = genomic DNA
ccttcatgtgcttcagccctacgttgtttatgtccagaatcagatattggagctgactctgcctgtccagggcctgcagagtggctgagctcccttcgggcccatgttgtgcgcactggcattggacgagcccgggcagaactctttgagaagcagattgttcagcatggcggccagctatgccctgcccagggcccaggtgtcactcacattgtggtggatgaaggcatggactatgagcgagccctccgccttctcagactaccccagctgcccccgggtgctcagctggtgaagtcagcctggctgagcttgtgccttcaggagaggaggctggtggatgtagctggattcagcatcttcatccccagtagcccatctctgatgatgaagccagtgatggggaagaaacccaggttagtgcagctgatctggaagccctcatcagtggccactaccccacctcccttgagggagattgtgagcctagcccagcccctgctgtcctggataagtgggtctgtgcacagccctcaagccagaaggcgaccaatcacaacctccatatcacagagaagctggaagttctggccaaagcctacagtgttcagggagacaagtggagggccctgggctatgccaaggccatcaatgccctcaagagcttccataagcctgtcacc

SEQ ID NO: 3254 - DNA, 1533 bp, Homo sapiens
  source 1..1533: mol_type = genomic DNA
ctcattggctctgctgcagccctgaccaacgctccaataggccgggatccagccatacttcaatggatcccaggggtatcttgaaggcatttcccaagcggcagaaaattcatgctgatgcatcatcaaaagtacttgcaaagattcctaggagggaagagggagaagaagcagaagcccatctctgatgatgaagccagtgatggggaagaaacccaggaggcctgcagtatccctgggattgggaagcggatggctgagaaaatcatagagatcctggagagcgggcatttgcggaagctggaccatatcagtgagagcgtgcctgtcttggagctcttctccaacatctggggagctgggaccaagactgcccagatgtggtaccaacagggcttccgaagtctggaagacatccgcagccaggcctccctgacaacccagcaggccatcggcctgaagcattacagtgacttcctggaacgtatgcccagggaggaggctacagagattgagcagacagtccagaaagcagcccaggcctttaactctgggctgctgtgtgtggcatgtggttcataccgacggggaaaggcgacctgtggtgatgtcgacgtgctcatcactcacccagatggccggtcccaccggggtatcttcagccgcctccttgacagtcttcggcaggaagggttcctcacagatgacttggtgagccaagaggagaatggtcagcaacagaagtacttgggggtgtgccggctcccagggccagggcggcggcaccggcgcctggacatcatcgtggtgccctatagcgagtttgcctgtgccctgctctacttcaccggctctgcacacttcaaccgctccatgcgagccctggccaaaaccaagggcatgagtctgtcagaacatgccctcagcactgctgtggtccggaacacccatggctgcaaggtggggcctggccgagtgctgcccactcccactgagaaggatgtcttcaggctcttaggcctcccctaccgagaacctgctgagcgggactggtgacccatggctgggggtgctgaggagagccgagttggactggctacccctcctggccacccagtactccctccagcctcagctggctgaacctcgccgctccaaccaccagcttcctcagcgagcagggcccagggctctgggcctgaagcaagagccagcccggctcccagtgtctgcccggctcccagtgtctgcccagccctctcccagacaggagcaggctgccaccccttctacctcaccactgcccctcgaagaattttgcaaatggccccttgccccattttaagcaggagcaggtggctggtttgaagccccaggtatcccccttccctgctatgggaaaggccaagctgctgggtggggacagaagctgcaggggagagggaagcagccgtgctgtcaacatcatccggcaccctctggggtaggagaacagccattccacatgtgttccctctatccgtcctgcttcct

SEQ ID NO: 3255 - DNA, 3821 bp, Homo sapiens
  source 1..3821: mol_type = genomic DNA
gtagtgcgtcgcctccgttgccggggaaacgacccgggacctgggagggagcaaagacgtttcccgccggcgggagctgtggctgtgattgagagaggggttagaggcgggtcccagcgctgccgcaccatggcggaccagctttatctggaaaatatagacgagttcgtcacggaccaaaacaagatcgtgacatacaaatggctgagctatacactaggggttcatgttaaccaggccaaacagatgctgtatgattatgttgaaaggaaacgaaaagaaaattcaggagcccaactgcatgttacctacttggtgtctggcagtctcattcagaatggacattcctgccacaaggttgcagtagtgagagaagataaattggaagcagtgaagtccaagctagctgtgactgccagcatccatgtgtacagcatccagaaagccatgctaaaggacagtgggcctctgttcaatactgactatgacatccttaaaagcaacttgcagaactgcagcaaatttagtgctatacaatgtgcagctgccgtccctagagctcctgctgaatcctcttcgtcttccaaaaagtttgagcagtcacatcttcacatgtcaagtgagacacaagccaacaatgagctgaccaccaatggtcatggcccacctgcatccaagcaggtttcccagcagcccaaaggaattatgggaatgtttgcctccaaagctgctgctaaaacccaagaaaccaacaaggaaacgaaaacagaggctaaagaagtaacaaatgcatctgcagcaggcaacaaggcaccagggaaagggaatatgatgagcaacttttttggaaaagctgctatgaataaatttaaagtcaatttggactcagaacaagcagtgaaagaagaaaaaatagtggagcagcctacagtgtctgtcacggaaccaaagctggcaactcctgcaggcctgaaaaaatccagcaaaaaagcagagcctgttaaggtgctgcagaaggaaaaaaaaagggggaagcgagtagcattatctgatgatgagacaaaggaaactgaaaacatgaggaaaaagaggagaagaatcaaacttcctgaatctgatagcagtgaagatgaagtctttccagactctcctggggcttatgaagctgagtcaccatccccacctcctcctccgtctccacctcttgaaccagtgccaaagactgagcctgaacctccttctgtcaagagctcaagtggagaaaacaaaagaaaacgaaaacgcgtactaaaatctaaaacttacctggatggggaaggctgcatagtgactgaaaaagtctacgagagtgaatcctgcacagatagtgaagaggagcttaacatgaagacatcctcagtacacagaccccctgccatgactgtgaaaaaagaacccagagaggaacgaaagggccccaagaaagggactgctgctctgggcaaagccaacagacaggtgtccattactggcttcttccagaggaaataaactgccatctctggtagatcagagacttggagtggtcaagggagaagaccaagaaatgtactcctcacttactatgtaagttcatctagatctccacctcacctgtatcaaaagactgttctttcatcctgtgaggtttatactatttctggtttttaaccaaaaggaaatcatctggaagcaggaggcaaaaagctgttaccttctaatgacatttaaaaagcacagtctttgacctgtccaggagaaggatttactccaaaattatactggaacagttttcagaattctcactgaagccatttagtggctaacccactgtgctccactcaccctatgccctggtccgcatatggcacaggaattattccttcttgttcctctgtattctaagaattcatgtgggtgtttcttatccttacattctgctggatacgtttacccctcttgtcttcctgcagtaccacacttctgtcccctaacctcctgaggctgttctctgtaagtcttttaagttttggttggactaaaggctgaagtgaaaatctccctgtaatcctcttcctccattatgcagtacacggacacctggctacagaccaggacgtggcttgtgttctgttcctttcacaaaagctctctgggaccttcacttgcaattagtggttagggaaaagcctcaggcagaacacaaatagaaatttaatgatgtgttcaactccaccagaaattacctcgagtcagcattgacgatattggaggagctgccgtgctgctgatacggggtgtgctttatgctgctctttgcggtttgttgatcccctcctcccccactctcaatacctagagagtgaaacccgtacaatgagataaagactaaaaagagaaatcccttcctatatacagtgtgctacatttacaaaaaatttctccttaagaaaacagaatattcaaaaacagcacttttccaggaagttagtgaggaagataaggcacacatttatttataaatggatgttgctcctttgtatttttagcttccctatttgcttaaaagtacaggctccctaagagaggatggagagggagagactgaattgttagtaggtctaaacatcaaagaaaacatttttattagttacttatggaaaatcatctattacaatgataaccttcaagtgacttccattatggctggacaggcggtgagctcagtggattgcagtggtgtgctggtgattttgcacagtgagctctgcggaaggggtcaggctcaactgctgatgtgtctcacacgtagcagacaaggggtgtctgactggcttcttttgcctcaagatggtgtatgtcgtaagtgatgcaatcagctgtctgctttttaaggttgggattgtgctgactttgggattaacatgagcttctttagcaaccaagcatgaacttgattaagaccagaagtttgggagatgagtcctggcattatgtctaggactaaagcagtggctttgtatagcaagctgagtaaaggttgacatattccaaaacccttctttttaaaaggaaaaaggatggagagaaggatggaaagcctggacttaaacctttagaaaaaacttctggagagaaatcccttttaaacagttacttttgtcattgcctctggtcatttgtctaaataggaatggaaaattaaaagaaaagcaacaatccaatcttttttctaaaaattatgctggggtctcgactaaaactgaatttgaattggaaaattctggtgttggttggagttccatcttgcaagggataatacaaatcctatgatctctatgcccaatatgctgcctcaactctgagctgtctgcaaggcttagtaagtattgagtggtgttttttttttctttttatacaataccatgttaaccacatgagttaaataaatttgagaagttgttttaaaacagtgcttcaaactgagtatctgatgagtctcttatttgatggatggtaacagtgttgcaattatttaagctctgaatgggaagaaggctggttttcagttgatattgttaaaactgcatacccacagtctgagatgaacaagttatttgctgccttcatcgtttttttcagcactggggaaatgttagtttcagccaacctcattttttagttcatctagaagaaaatctagcacattgtattagtttggcttcatcacttgctagctgtatgactgtgggcaagtttcacagcctcaagttctttatcaaaataaaactaaaatgagttac

SEQ ID NO: 3256 - DNA, 2122 bp, Homo sapiens
  source 1..2122: mol_type = genomic DNA
gctgtggctgtgattgagagaggggttagaggcgggtcccagcgctgccgcaccatggcggaccagctttatctggaaaatatagacgagttcgtcacggaccaaaacaagatcgtgagcagctactactggggaacgcgggcgtgcgaccggggtcctgggcccggctagggcggcgggagccttgaccctctgtctgcttgtggcttcgtggggaccaggggagacaggtccccacgaggggacctgggcgagctctgtgccccagagcgagcgaggactcgtcgggaaggtcctccagcacacacggaagtccgcgtcccttgggtgggcgtgctgggaacagagcctggggctggagccgcggagaccgggcgcggagggagggccgttggctgagagttctaaggcgtccctacacctttcttttaaggtgacatacaaatggctgagctatacactaggggttcatgttaaccaggccaaacagatgctgtatgattatgttgaaaggaaacgaaaagaaaattcaggagcccaactgcatgttacctacttggtgtctggcagtctcattcagaatggacattcctgccacaaggttgcagtagtgagagaagataaattggaagcagtgaagtccaagctagctgtgactgccagcatccatgtgtacagcatccagaaagccatgctaaaggacagtgggcctctgttcaatactgactatgacatccttaaaagcaacttgcagaactgcagcaaatttagtgctatacaatgtgcagctgccgtccctagagctcctgctgaatcctcttcgtcttccaaaaagtttgagcagtcacatcttcacatgtcaagtgagacacaagccaacaatgagctgaccaccaatggtcatggcccacctgcatccaagcaggtttcccagcagcccaaaggaattatgggaatgtttgcctccaaagctgctgctaaaacccaagaaaccaacaaggaaacgaaaacagaggctaaagaagtaacaaatgcatctgcagcaggcaacaaggcaccagggaaagggaatatgatgagcaacttttttggaaaagctgctatgaataaatttaaagtcaatttggactcagaacaagcagtgaaagaagaaaaaatagtggagcagcctacagtgtctgtcacggaaccaaagctggcaactcctgcaggcctgaaaaaatccagcaaaaaagcagagcctgttaaggtgctgcagaaggaaaaaaaaagggggaagcgagtagcattatctgatgatgagacaaaggaaactgaaaacatgaggaaaaagaggagaagaatcaaacttcctgaatctgatagcagtgaagatgaagtctttccagactctcctggggcttatgaagctgagtcaccatccccacctcctcctccgtctccacctcttgaaccagtgccaaagactgagcctgaacctccttctgtcaagagctcaagtggagaaaacaaaagaaaacgaaaacgcgtactaaaatctaaaacttacctggatggggaaggctgcatagtgactgaaaaagtctacgagagtgaatcctgcacagatagtgaagaggagcttaacatgaagacatcctcagtacacagaccccctgccatgactgtgaaaaaagaacccagagaggaacgaaagggccccaagaaagggactgctgctctgggcaaagccaacagacaggtgtccattactggcttcttccagaggaaataaactgccatctctggtagatcagagacttggagtggtcaagggagaagaccaagaaatgtactcctcacttactatgtaagttcatctagatctccacctcacctgtatcaaaagactgttctttcatcctgtgaggtttatactatttctggtttttaaccaaaaggaaatcatctggaagcaggaggcaaaaagctgttaccttctaatgacatttaaaaagcacagtctttgacctgtccaggagaaggatttactccaaaattatactggaacagttttcagaattctcactgaagccatttagtggctaacccactgtgctccactcaccctatgccctggtcc

SEQ ID NO: 3257 - DNA, 1700 bp, Homo sapiens
  source 1..1700: mol_type = genomic DNA
gctgtggctgtgattgagagaggggttagaggcgggtcccagcgctgccgcaccatggcggaccagctttatctggaaaatatagacgagttcgtcacggaccaaaacaagatcgtgacatacaaatggctgagctatacactaggggttcatgttaaccaggccaaacatgccacaaggttgcagtagtgagagaagataaattggaagcagtgaagtccaagctagctgtgactgccagcatccatgtgtacagcatccagaaagccatgctaaaggacagtgggcctctgttcaatactgactatgacatccttaaaagcaacttgcagaactgcagcaaatttagtgctatacaatgtgcagctgccgtccctagagctcctgctgaatcctcttcgtcttccaaaaagtttgagcagtcacatcttcacatgtcaagtgagacacaagccaacaatgagctgaccaccaatggtcatggcccacctgcatccaagcaggtttcccagcagcccaaaggaattatgggaatgtttgcctccaaagctgctgctaaaacccaagaaaccaacaaggaaacgaaaacagaggctaaagaagtaacaaatgcatctgcagcaggcaacaaggcaccagggaaagggaatatgatgagcaacttttttggaaaagctgctatgaataaatttaaagtcaatttggactcagaacaagcagtgaaagaagaaaaaatagtggagcagcctacagtgtctgtcacggaaccaaagctggcaactcctgcaggcctgaaaaaatccagcaaaaaagcagagcctgttaaggtgctgcagaaggaaaaaaaaagggggaagcgagtagcattatctgatgatgagacaaaggaaactgaaaacatgaggaaaaagaggagaagaatcaaacttcctgaatctgatagcagtgaagatgaagtctttccagactctcctggggcttatgaagctgagtcaccatccccacctcctcctccgtctccacctcttgaaccagtgccaaagactgagcctgaacctccttctgtcaagagctcaagtggagaaaacaaaagaaaacgaaaacgcgtactaaaatctaaaacttacctggatggggaaggctgcatagtgactgaaaaagtctacgagagtgaatcctgcacagatagtgaagaggagcttaacatgaagacatcctcagtacacagaccccctgccatgactgtgaaaaaagaacccagagaggaacgaaagggccccaagaaagggactgctgctctgggcaaagccaacagacaggtgtccattactggcttcttccagaggaaataaactgccatctctggtagatcagagacttggagtggtcaagggagaagaccaagaaatgtactcctcacttactatgtaagttcatctagatctccacctcacctgtatcaaaagactgttctttcatcctgtgaggtttatactatttctggtttttaaccaaaaggaaatcatctggaagcaggaggcaaaaagctgttaccttctaatgacatttaaaaagcacagtctttgacctgtccaggagaaggatttactccaaaattatactggaacagttttcagaattctcactgaagccatttagtggctaacccactgtgctccactcaccctatgccctggtcc

SEQ ID NO: 3258 - DNA, 839 bp, Homo sapiens
  source 1..839: mol_type = genomic DNA
gaggggttagaggcgggtcccagcgctgccgcaccatggcggaccagctttatctggaaaatatagacgagttcgtcacggaccaaaacaagatcgtgacatacaaatggctgagctatacactaggggttcatgttaaccaggccaaacagatgctgtatgattatgttgaaaggaaacgaaaagaaaattcaggagcccaactgcatgttacctacttggtgtctggcagtctcattcagaatggacattcctgccacaaggttgcagtagtgagagaagataaattggaagcagtgaagtccaagctagctgtgactgccagcatccatgtgtacagcatccagaaagccatgctaaaggacagtgggcctctgttcaatactgactatgacatccttaaaagcaacttgcagaactgcagcaaatttagtgctatacaatgtgcagctgccgtccctagagctcctgctgaatcctcttcgtcttccaaaaagtttgagcagtcacatcttcacatgtcaagtgagacacaagccaacaatgagctgaccaccaatggtcatggcccacctgcatccaagcaggtttcccagcagcccaaaggaattatgggaatgtttgcctccaaagctgctgctaaaacccaagaaaccaacaaggaaacgaaaacagaggctaaagaagtaacaaatgcatctgcagcaggcaacaaggcaccagggaaagggaatatgatgagcaacttttttggaaaagctgctatgaataaatttaaagtcaatttggactcagaacaagcagtgaaagaagaaaaaataaaggaaaaaaaaaggtag

SEQ ID NO: 3259 - DNA, 1715 bp, Homo sapiens
  source 1..1715: mol_type = genomic DNA
ggaaccgaccgccgccggccgggttgcaggcggggcacctcgggcaggacctccctggtcggaagtggccgtgagcccaagccgcggtcccgggccggcacccaggatgggcgaggtggaggccccgggccgcttgtggctcgagagcccccctgggggagcgccccccatcttcctgccctcggacgggcaagccctggtcctgggcaggggacccctgacccaggttacggaccggaagtgctccagaactcaagtggagctggtcgcagatcctgagacccggacagtggcagtgaaacagctgggagttaacccctcaactaccgggacccaggagttgaagccggggttggagggctctctgggggtgggggacacactgtatttggtcaatggcctccacccactgaccctgcgctgggaagagacccgcacaccagaatcccagccagatactccgcctggcacccctctggtgtcccaagatgagaagagagatgctgagctgccgaagaagcgtatgcggaagtcaaaccccggctgggagaacttggagaagttgctagtgttcaccgcagctggggtgaaaccccagggcaaggtggctggctttgatctggacgggacgctcatcaccacacgctctgggaaggtctttcccactggccccagtgactggaggatcttgtacccagagattccccgtaagctccgagagctggaagccgagggctacaagctggtgatcttcaccaaccagatgagcatcgggcgcgggaagctgccagccgaggagttcaaggccaaggtggaggctgtggtggagaagctgggggtccccttccaggtgctggtggccacgcacgcaggcttgtaccggaagccggtgacgggcatgtgggaccatctgcaggagcaggccaacgacggcacgcccatatccatcggggacagcatctttgtgggagacgcagccggacgcccggccaactgggccccggggcggaagaagaaagacttctcctgcgccgatcgcctgtttgccctcaaccttggcctgcccttcgccacgcctgaggagttctttctcaagtggccagcagccggcttcgagctcccagcctttgatccgaggactgtctcccgctcagggcctctctgcctccccgagtccagggccctcctgagcgccagcccggaggtggttgtcgcagtgggattccctggggccgggaagtccacctttctcaagaagcacctcgtgtcggccggatatgtccacgtgaacagggacacgctaggctcctggcagcgctgtgtgaccacgtgtgagacagccctgaagcaagggaaacgggtcgccatcgacaacacaaacccagacgccgcgagccgcgccaggtacgtccagtgtgcccgagccgcgggcgtcccctgccgctgcttcctcttcaccgccactctggagcaggcgcgccacaacaaccggtttcgagagatgacggactcctctcatatccccgtgtcagacatggtcatgtatggctacaggaagcagttcgaggccccaacgctggctgaaggcttctctgccatcctggagatcccgttccggctatgggtggagccgaggctggggcggctgtactgccagttctccgagggctgagccccgcccagctcccctccacaataaacgctgtttctccttg

SEQ ID NO: 3260 - DNA, 3051 bp, Homo sapiens
  source 1..3051: mol_type = genomic DNA
attagaggctccagccccgccgacttgcagacgtgagatcgggcacacctgagcggcggcggggcggtcgtggccacatccggggcgacgtgcctgagtcaccccgtcccgccagcgtctgccagtccagccagtccgcccagtctctcgcgtccgagactcgcctccagcctcccacctccgcccgggccgcgcgagcctcgcgggggcgggggcggggcgccaaggggcggggctgtctcttaaagggccccgggccgctgcccttaggccacttcctgggggcggagaggacctcagcggctgcggcgacacccagggaaggcggcgcggccgggtcccgaaactcctggctgtttccatcagagccctcggacactcccagcccgggctgagcacgcatcgtcgctccccggcggatacaagggggctccgccatccgctcccgtcagttcggcctccatctcctgggacccgcgccggcagccaggccaggcctctgagtggccccagagccctggctggactcgtccacggcggcagcgatctgcccggggtctcggaggccatcccttcagagtcggccctgtgctcgccaccgtcacctgctggttggattccggaaacccactgtctgaagaccacagaggggtgtcgctgaccaccccaaatcggatacgtccagacctcaagctcccttcccctctctggctgccctctgctcttttcatctcttctctcaaccttttggggatttctgtgtcctgacaccacctccccatccaccaccaaagtagccggggtgagccccaaaccttactgggtgtgctccacctgtgcctccaacccagcgaatctgacagcttcgacccaattctgcacacacccaggaagttctgccttttcttttctttcggtgtctcctgtacttcccaaaatttctcctcctcctgtgccctcttcgcccccctcctttgggggccccgtgaccctgaatgtggggggcacactatattccaccactttggagaccctgacccgcttcccagactctatgctgggggccatgtttagggccggcacccccatgccccccaacctcaattcccaaggaggcggccactacttcatcgaccgggatggcaaggccttccggcacatcctcaatttcctgaggctgggccgcctggacctgccccgtgggtacggagagacagcgctgctcagggcagaggctgacttctaccagatccggcccctcctggacgcgctgcgggaactggaggcctctcaggggacccctgcacccacagctgccctgctccacgcagatgtagatgtcagcccccgcctggtgcacttctctgctcgccggggaccccatcactatgagctgagctccgtccaggtggacaccttccgagccaaccttttctgcaccgactctgagtgtctaggtgctttgcgggcccgatttggtgtggccagtggggatagggcagaggggagcccacattttcatctggagtgggccccccgccccgtggaactccccgaggtggagtatgggagactggggctgcagccgctgtggactggggggccaggagagcggcgggaggtggtgggcaccccaagcttcctggaggaggtgctgcgggtggctctcgagcacggcttccgactagactctgtcttccccgaccccgaagacctgctcaactccaggtctctgcgctttgtccggcactgaggatgctgttctcagtttgactgtggggaggagagagaatggggtactagcacccctgaagcctctttccagctctgcttcaggagctatgagagtcgggactctcctgcacctgactggagctcagatgtgggcaggaattcccaaacctgagcccaccaaggactcacaagtggtccagaaggtctcaacctgtgctgaccctgggaggggtagggaaggttctctcagcttgttcttgcctaaggctgagcacctccagtctctccttgatttggagctcagtgtttaagggcttggaaaaggggggaacatctctttacccagactagacctagcaaaaccctggaaggatattgaggtctggggaaaagggaggactttgcattttcccaatgcggtctcttggaccatggcttctactcctgaagctgggtggcctggcctggcctgaccaatgagaggccagaacactctggaacatcggaagaggagttctttgctatgttccaagccatctactgagggaggcagaaaggccacaacccaccctaggttgatgtatgggagctaggacagtccccatggcaatggggctggagcatccctcatctggaagaatcccatactgatggcagggctggccagggggaagagggtagtatctgtgggtcctggcctttcttcatgtgtgcgtgcatatcagcccgtgtggctgactgatgtataggtccctggcatcctggttcatatctgtgttgctgactacagtgtctgtgatgtccgcatgtccaggcctgtttggggttgcctagcgactcttctggcacagggtgtgtctgtggtatacctgtgaggtggttgacaattagtagtttaatcacagggtgtgtgtgtgtgtgtgtgtgtgtgtgtttatgtgcacgcatgtatatgcatcaccacgtagccaggaggggcctgttggggtttgagtcactgggatcttcctggtgagaggtaagagaagtcactgggcttagctgggcctctgaggcctgtatggaactcttggttgctgaggcaaccatggacctgttgctaggagatagctggggaaggcccaaggccgcccagggcagagagaggagacgaagagtttgggacagtgggggaggagatgggaagggatgggatttctgggtcccagagcgggtgggatactcacgcacagcttcttcactggtggggggtggggcacacattatttctcactggtcatgatttacaagaagaaaaataaaactgcttttggaacc

SEQ ID NO: 3261 - DNA, 7943 bp, Homo sapiens
  source 1..7943: mol_type = genomic DNA
gtaaaagtgacattctaaatgttcctcactctgcgaggcttattttttagggactttgctataattctgaaagacttagttttacagtacatctgaaagtaggagttttcagaagtatggctcttgggataaatttagattcttaattgtgaagctctgttaccacttgttagaaggcaggtcagctcacctgcttggggaggtaaatatatgaatgcactctcgagtaatttaatggagccctacctcaatgtacagaatgacagtatcacagatcaagaatggagtacgagtgattttcggctatggtgggggtaggtaggtcacttgtcccctgttgtctcttactatttgtaaagtgaagactatgattagtctttttgatcgggatggtttgagatgaataaagaataggcaggcaatttggatactttaggcttttcaagaacattagtaacattttttcttagatatttctcctaatacaatgagtgttgtgaaataacatggcagttattgttgagagaaaagccttcccagttatgtattgagtccttaggcgttttgaccttccctccactcttacagaacttggtggaaggggccactatgttttctacctccttccgtgcctttcacaaagccacatcctgcaccgtctacccttctctgtggatatttttccgcttggcaatttcctttcctgaggcacccacttgggacatctgaatctccatctccatgttgatggcccgtttgtgcttggacgtgttcttccacttgagactgagggttcatgtaatcaaagaagtttctttgttgtgtgtatctttacagaacacaacaggaattgaaaatgaatcagaacactactgagcctgtggcggccaccgagaccctggctgaggtacccgaacatgtgctgcgaggacttccggaggaagtgaggcttttcccttctgctgttgacaagacccggattggtgtctgggccactaaaccaattttaaaaggcaaaaaatttgggccatttgttggtgataagaaaaaaagatctcaggttaagaataatgtatacatgtgggaggtgtattacccaaatttgggatggatgtgcattgatgccactgatccagagaagggaaactggctgcgatatgtgaattgggcttgctcaggagaagagcaaaatttattcccactggaaatcaacagagccatttactataaaactttaaagccaatcgcgccgggcgaggagctcctggtctggtacaatggggaagacaaccctgagatagcagctgcgattgaggaagagcgagccagcgcccggagcaagcggagctcccccaagagccggaaagggaagaaaaaatcccaggaaaataaaaacaaaggaaacaaaatccaagacatacaactgaagacaagtgagccagatttcacctctgcaaatatgagagattctgcagaaggtcctaaagaagacgaagagaagccttcagcctcagcacttgagcagccggccaccctccaggaggtggccagtcaggaggtgcctccagaactagcaacccctgcccctgcctgggagccacagccagaaccagacgagcgattagaagcggcagcttgtgaggtgaatgatttgggggaagaggaggaggaggaagaggaggaggatgaagaagaagaagaagatgatgatgatgatgagttggaagacgagggggaagaagaagccagcatgccaaatgaaaattctgtgaaagagccagaaatacggtgtgatgagaagccagaagatttattagaggaaccaaaaacaacttcagaagaaactcttgaagactgctcagaggtaacacctgccatgcaaatccccagaactaaagaagaggccaatggtgatgtatttgaaacgtttatgtttccgtgtcaacattgtgaaaggaagtttacaaccaaacaggggcttgagcgtcacatgcatatccatatatccaccgtcaatcatgctttcaaatgcaagtactgtgggaaagcctttggcacacagattaaccggcggcgacatgagcggcgccatgaagcagggttaaagcggaaacccagccaaacactacagccgtcagaggatctggctgatggcaaagcatctggagaaaacgttgcttcaaaagatgattcgagtcctcccagtcttgggccagactgtctgatcatgaattcagagaaggcttcccaagacacaataaattcttctgtcgtagaagagaatggggaagttaaagaacttcatccgtgcaaatattgtaaaaaggtttttggaactcatactaatatgagacggcatcagcgtagagttcacgaacgtcatctgattcccaaaggtgtacggcgaaaaggaggccttgaagagccccagcctccagcagaacaggcccaggccacccagaacgtgtatgtaccaagcacagagccggaggaggaaggggaagcagatgatgtgtacatcatggacatttctagcaatatctctgaaaacttaaattactatattgatggtaaaattcaaactaataacaacactagtaactgtgatgtgattgagatggagtctgcttcggcagatttgtatggtataaattgtctgctcactccagttacagtggaaattactcaaaatataaagaccacacaggtccctgtaacagaagatcttcctaaagagcctttgggcagcacaaatagtgaggccaagaagcggagaactgcgagcccacctgcactgcccaaaattaaggccgaaacagactctgaccccatggtcccctcttgctctttaagtcttcctcttagcatatcaacaacagaggcagtgtctttccacaaagagaaaagtgtttatttgtcatcaaagctcaaacaacttcttcaaacccaagataaactaactcctgcagggatttcagcaactgaaatagctaaattaggtcctgtttgtgtgtctgctcctgcatcaatgttgcctgtgacctcaagtaggtttaagaggcggaccagctctcctcccagttctccacagcacagtcctgcccttcgagactttggaaagccaagtgatgggaaagcagcatggaccgatgccgggctgacttccaaaaaatccaaattagaaagtcacagcgactcaccagcatggagtttgtctgggagagatgagagagaaactgtgagccctccatgctttgatgaatataaaatgtctaaagagtggacagctagttctgcttttagcagtgtgtgcaaccagcagccactggatttatccagcggtgtcaaacagaaggctgagggtacaggcaagactccagtccagtgggaatctgtcttagatctcagtgtgcataaaaagcattgtagtgactctgaaggcaaggaattcaaagaaagtcattcagtgcagcctacgtgtagtgctgtaaagaaaaggaaaccaaccacctgcatgctgcagaaggttcttctcaatgaatataatggcatcgatttacctgtagaaaaccctgcagatgggaccaggagcccaagtccttgtaaatccctagaagctcagccagatcctgacctcggtccgggctctggtttccctgcccctactgttgagtccacacctgatgtttgtccttcatcacctgccctgcagacaccctccctttcatccggtcagctgcctcctctcttgatccccacagatccctcttcccctccaccctgtcccccggtattaactgttgccactccgccccctcccctccttcctaccgtacctcttccagccccctcttccagtgcatctccacacccatgcccctctccactctcaaatgccaccgcacagtccccacttccaattctgtccccaacagtgtccccctctccctctcccattcctcccgtggagcccctgatgtctgccgcctcacccgggcctccaacactttcttcttcctcctcttcatcttcctcctcctcttcgttttcttcttcatcttcctcctcttctccttctccacctcctctctccgcaatatcatctgttgtttcctctggtgataatctggaggcttctctccccatgatatctttcaaacaggaggaattagagaatgaaggtctgaaacccagggaagagccccagtctgctgctgaacaggatgttgttgttcaggaaacattcaacaaaaactttgtttgcaacgtctgtgaatcaccttttctttccattaaagatctaaccaaacatttatctattcatgctgaagaatggcccttcaaatgtgaattttgtgtgcagctttttaaggataaaacggacttgtcagaacatcgctttttgcttcatggagttgggaatatctttgtgtgttctgtttgtaaaaaagaatttgcttttttgtgcaatttgcagcagcaccagcgagatctccacccagataaggtgtgcacacatcacgagtttgaaagcgggactctgaggccccagaactttacagatcccagcaaggcccatgtagagcatatgcagagcttgccagaagatcctttagaaacttctaaagaagaagaggagttaaatgattcctctgaagagctttacacgactataaaaataatggcttctggaataaagacaaaagatccagatgttcgattgggcctcaatcagcattacccaagctttaaaccacctccatttcagtaccatcaccgtaaccccatggggattggtgtgacagccacaaatttcactacacacaatattccacagactttcactaccgccattcgctgcacaaagtgtggaaaaggtgtcgacaatatgccggagttgcacaaacatatcctggcttgtgcttctgcaagtgacaagaagaggtacacgcctaagaaaaacccagtaccattaaaacaaactgtgcaacccaaaaatggcgtggtggttttagataactctgggaaaaatgccttccgacgaatgggacagcccaaaaggcttaactttagtgttgagctcagcaaaatgtcgtcgaataagctcaaattaaatgcattgaagaaaaaaaatcagctagtacagaaagcaattcttcagaaaaacaaatctgcaaagcagaaggccgacttgaaaaatgcttgtgagtcatcctctcacatctgcccttactgtaatcgagagttcacttacattggaagcctgaataaacacgccgccttcagctgtcccaaaaaacccctttctcctcccaaaaaaaaagtttctcattcatctaagaaaggtggacactcatcacctgcaagtagtgacaaaaacagtaacagcaaccaccgcagacggacagcggatgcggagattaaaatgcaaagcatgcagactccgttgggcaagaccagagcccgcagctcaggccccacccaagtcccacttccctcctcatccttcaggtccaagcagaacgtcaagtttgcagcttcggtgaaatccaaaaaaccaagctcctcctctttaaggaactccagcccgataagaatggccaaaataactcatgttgaggggaaaaaacctaaagctgtggccaagaatcattctgctcagctttccagcaaaacatcacggagcctgcacgtgagggtacagaaaagcaaagctgttttacaaagcaaatccaccttggcgagtaagaaaagaacagaccggttcaatataaaatctagagagcggagtggggggccagtcacccggagccttcagctggcagctgctgctgacttgagtgagaacaagagagaggacggcagcgccaagcaggagctgaaggacttcagctacagcctccgcttggcgtcccgatgctctccaccagcggccccgtacatcaccaggcagtataggaaggtcaaagctccagctgcagcccagttccagggaccattcttcaaagagtagacactctggctgctccctgacagcacctgaagtgacctggaatcagtgaagccaaagggactggcagtctgccctgcagggagtaccgacctatcccagttgtgtgaggctgcgagagaaagggagtgcatgtgcgcgcgtgcatgtgtgcgtgcgtgtgtgttcacgtgttctcgtgcgggcgcgtgagtggtcttcaaacgagggtcccgatccccggggcggcaggaagggggccgactccacgctgtcctttgggatgatacttggatgcagctcttgggaccgtgttctgcagcccagccttcctgttggggtggggcctctcctactatgcaatttttcaagagctccttgaccctgctttttgcttcttgagttgtcttttgccattatggggactttggtttgacccaggggtcagccttaggaaggccttcaggaggaggccgagttccccttcagtaccacccctctctccccaccttccctctcccggcaacatctctgggaatcaacagcatattgacacgttggagccgagcctgaacatgcccctcggccccagcacatggaaaacccccttccttgcctaaggtgtctgagtttctggctcttgaggcatttccagacttgaaattctcatcagtccattgctcttgagtctttgcagagaacctcagatcaggtgcacctgggagaaagactttgtccccacttacagatctatctcctcccttgggaagggcagggaatggggacggtgtatggaggggagggatctcctgcgcccttcattgccacacttggtgggaccatgaacatctttagtgtctgagcttctcaaattagctgcaataggaaaaaaacaaattgggaaatgaaaaaaaaatgggaagattaaaaagcacagggggaagaagaagagatttcggaggccatcctgccaggggcggacggggctgactcctgctctctggaggacggtcagtccatgtctcggagaaacgggtgagctgagcttggcgtttggacccagttcagtgaggttcttgggttttgtgcctttggggcagaccccaggcaaggatgtctgagaccacttgggcgctgttttctcagctccaatttcaagagtgagctatcaaacccagagcggaaggagggagctctgatgagcacggtttgtcacacgataaagggattttttttttcagggctactacggttgatcttgcaactctgtaaatatgtatgtagacacttttaaaagcacgtatttatgtccctgactgtaaatgctccatttttaaagttttataacttgtgttatttaatgagtcagtcaatcggctgcagtatgggatctgataaggatctaggagaagggtctcatgcggaccctcacatgggcagaaaaatggtggtcattggccgacatcacagttttcctgtttcccacccagctaaaaaccgttgtttgctttaaattttcataaactggaatcctttcacccgctcctacagctaaccctcacaagcatgaagtgctgtggctgttccttatcctaatgatgcgcttttgtcccgtaaatgttaacactcatgaagcataccccggcctctcagttcttgagggcctccccaccgcagcagcaaggaaagctcacgaaccccaaacctggcaagtcacctgcagcccatggtgagctctgggaagtgtggttgaggccttggggtcactccttttttgcatgtgcaaatgtgctggtcacccttcaacgctcccagacggtcaggaaaactgttccaatcatgaaaaggggggatgattttgtaaaagtggcatttcctggtcagtggtggtcttcaagacgacagctctgtatctgccatgtgaagagaattaacaataaaagtgtgaagagcg

SEQ ID NO: 3262 - DNA, 7437 bp, Homo sapiens
  source 1..7437: mol_type = genomic DNA
gtaaaagtgacattctaaatgttcctcactctgcgaggcttattttttagggactttgctataattctgaaagacttagttttacagtacatctgaaagtaggagttttcagaagtatggctcttgggataaatttagattcttaattgtgaagctctgttaccacttgttagaaggcaggtcagctcacctgcttggggaggtaaatatatgaatgcactctcgagtaatttaatggagccctacctcaatgtacagaatgacagtatcacagatcaagaatggagtacgagtgattttcggctatggtgggggtaggtaggtcacttgtcccctgttgtctcttactatttgtaaagtgaagactatgattagtctttttgatcgggatggtttgagatgaataaagaataggcaggcaatttggatactttaggcttttcaagaacattagtaacattttttcttagatatttctcctaatacaatgagtgttgtgaaataacatggcagttattgttgagagaaaagccttcccagttatgtattgagtccttaggcgttttgaccttccctccactcttacagaacttggtggaaggggccactatgttttctacctccttccgtgcctttcacaaagccacatcctgcaccgtctacccttctctgtggatatttttccgcttggcaatttcctttcctgaggcacccacttgggacatctgaatctccatctccatgttgatggcccgtttgtgcttggacgtgttcttccacttgagactgagggttcatgtaatcaaagaagtttctttgttgtgtgtatctttacagaacacaacaggaattgaaaatgaatcagaacactactgagcctgtggcggccaccgagaccctggctgaggtacccgaacatgtgctgcgaggacttccggaggaagtgaggcttttcccttctgctgttgacaagacccggattggtgtctgggccactaaaccaattttaaaaggcaaaaaatttgggccatttgttggtgataagaaaaaaagatctcaggttaagaataatgtatacatgtgggaggtgtattacccaaatttgggatggatgtgcattgatgccactgatccagagaagggaaactggctgcgatatgtgaattgggcttgctcaggagaagagcaaaatttattcccactggaaatcaacagagccatttactataaaactttaaagccaatcgcgccgggcgaggagctcctggtctggtacaatggggaagacaaccctgagatagcagctgcgattgaggaagagcgagccagcgcccggagcaagcggagctcccccaagagccggaaagggaagaaaaaatcccaggaaaataaaaacaaaggaaacaaaatccaagacatacaactgaagacaagtgagccagatttcacctctgcaaatatgagagattctgcagaaggtcctaaagaagacgaagagaagccttcagcctcagcacttgagcagccggccaccctccaggaggtggccagtcaggaggtgcctccagaactagcaacccctgcccctgcctgggagccacagccagaaccagacgagcgattagaagcggcagcttgtgaggtgaatgatttgggggaagaggaggaggaggaagaggaggaggatgaagaagaagaagaagatgatgatgatgatgagttggaagacgagggggaagaagaagccagcatgccaaatgaaaattctgtgaaagagccagaaatacggtgtgatgagaagccagaagatttattagaggaaccaaaaacaacttcagaagaaactcttgaagactgctcagaggtaacacctgccatgcaaatccccagaactaaagaagaggccaatggtgatgtatttgaaacgtttatgtttccgtgtcaacattgtgaaaggaagtttacaaccaaacaggggcttgagcgtcacatgcatatccatatatccaccgtcaatcatgctttcaaatgcaagtactgtgggaaagcctttggcacacagattaaccggcggcgacatgagcggcgccatgaagcagggttaaagcggaaacccagccaaacactacagccgtcagaggatctggctgatggcaaagcatctggagaaaacgttgcttcaaaagatgattcgagtcctcccagtcttgggccagactgtctgatcatgaattcagagaaggcttcccaagacacaataaattcttctgtcgtagaagagaatggggaagttaaagaacttcatccgtgcaaatattgtaaaaaggtttttggaactcatactaatatgagacggcatcagcgtagagttcacgaacgtcatctgattcccaaaggtgtacggcgaaaaggaggccttgaagagccccagcctccagcagaacaggcccaggccacccagaacgtgtatgtaccaagcacagagccggaggaggaaggggaagcagatgatgtgtacatcatggacatttctagcaatatctctgaaaacttaaattactatattgatggtaaaattcaaactaataacaacactagtaactgtgatgtgattgagatggagtctgcttcggcagatttgtatggtataaattgtctgctcactccagttacagtggaaattactcaaaatataaagaccacacaggtccctgtaacagaagatcttcctaaagagcctttgggcagcacaaatagtgaggccaagaagcggagaactgcgagcccacctgcactgcccaaaattaaggccgaaacagactctgaccccatggtcccctcttgctctttaagtcttcctcttagcatatcaacaacagaggcagtgtctttccacaaagagaaaagtgtttatttgtcatcaaagctcaaacaacttcttcaaacccaagataaactaactcctgcagggatttcagcaactgaaatagctaaattaggtcctgtttgtgtgtctgctcctgcatcaatgttgcctgtgacctcaagtaggtttaagaggcggaccagctctcctcccagttctccacagcacagtcctgcccttcgagactttggaaagccaagtgatgggaaagcagcatggaccgatgccgggctgacttccaaaaaatccaaattagaaagtcacagcgactcaccagcatggagtttgtctgggagagatgagagagaaactgtgagccctccatgctttgatgaatataaaatgtctaaagagtggacagctagttctgcttttagcagtgtgtgcaaccagcagccactggatttatccagcggtgtcaaacagaaggctgagggtacaggcaagactccagtccagtgggaatctgtcttagatctcagtgtgcataaaaagcattgtagtgactctgaaggcaaggaattcaaagaaagtcattcagtgcagcctacgtgtagtgctgtaaagaaaaggaaaccaaccacctgcatgctgcagaaggttcttctcaatgaatataatggcatcgatttacctgtagaaaaccctgcagatgggaccaggagcccaagtccttgtaaatccctagaagctcagccagatcctgacctcggtccgggctctggtttccctgcccctactgttgagtccacacctgatgtttgtccttcatcacctgccctgcagacaccctccctttcatccggtcagctgcctcctctcttgatccccacagatccctcttcccctccaccctgtcccccggtattaactgttgccactccgccccctcccctccttcctaccgtacctcttccagccccctcttccagtgcatctccacacccatgcccctctccactctcaaatgccaccgcacagtccccacttccaattctgtccccaacagtgtccccctctccctctcccattcctcccgtggagcccctgatgtctgccgcctcacccgggcctccaacactttcttcttcctcctcttcatcttcctcctcctcttcgttttcttcttcatcttcctcctcttctccttctccacctcctctctccgcaatatcatctgttgtttcctctggtgataatctggaggcttctctccccatgatatctttcaaacaggaggaattagagaatgaaggtctgaaacccagggaagagccccagtctgctgctgaacaggatgttgttgttcaggaaacattcaacaaaaactttgtttgcaacgtctgtgaatcaccttttctttccattaaagatctaaccaaacatttatctattcatgctgaagaatggcccttcaaatgtgaattttgtgtgcagctttttaaggataaaacggacttgtcagaacatcgctttttgcttcatggagttgggaatatctttgtgtgttctgtttgtaaaaaagaatttgcttttttgtgcaatttgcagcagcaccagcgagatctccacccagataaggtgtgcacacatcacgagtttgaaagcgggactctgaggccccagaactttacagatcccagcaaggcccatgtagagcatatgcagagcttgccagaagatcctttagaaacttctaaagaagaagaggagttaaatgattcctctgaagagctttacacgactataaaaataatggcttctggaataaagacaaaagatccagatgttcgattgggcctcaatcagcattacccaagctttaaaccacctccatttcagtaccatcaccgtaaccccatggggattggtgtgacagccacaaatttcactacacacaatattccacagactttcactaccgccattcgctgcacaaagtgtggaaaaggtgtcgacaatatgccggagttgcacaaacatatcctggcttgtgcttctgcaagtgacaagaagaggtacacgcctaagaaaaacccagtaccattaaaacaaactgtgcaacccaaaaatggcgtggtggttttagataactctgggaaaaatgccttccgacgaatgggacagcccaaaaggcttaactttagtgttgagctcagcaaaatgtcgtcgaataagctcaaattaaatgcattgaagaaaaaaaatcagctagtacagaaagcaattcttcagaaaaacaaatctgcaaagcagaaggccgacttgaaaaatgcttgtgagtcatcctctcacatctgcccttactgtaatcgagagttcacttacattggaagcctgaataaacacgccgccttcagctgtcccaaaaaacccctttctcctcccaaaaaaaaagtttctcattcatctaagaaaggtggacactcatcacctgcaagtagtgacaaaaacagtaacagcaaccaccgcagacggacagcggatgcggagattaaaatgcaaagcatgcagactccgttgggcaagaccagagcccgcagctcaggccccacccaagtcccacttccctcctcatccttcaggtccaagcagaacgtcaagtttgcagcttcggtgaaatccaaaaaaccaagctcctcctctttaaggaactccagcccgataagaatggccaaaataactcatgttgaggggaaaaaacctaaagctgtggccaagaatcattctgctcagctttccagcaaaacatcacggagcctgcacgtgagggtacagaaaagcaaagctgttttacaaagcaaatccaccttggcgagtaagaaaagaacagaccggttcaatataaaatctagagagcggagtggggggccagtcacccggagccttcagctggcagctgctgctgacttgagtgagaacaagagagaggacggcagcgccaagcaggagctgaaggacttcaggaacttcctgtagaaaagcccccaaaacaaaacaaaccttaattgactaaaaagtattgcatgctcaacttaggataagcactacggcaaaggatacgaaatctaccaagcttgcaagaccagttgaagctgactcaaaaatcctaacattcagctgattgccggcaggcttagagtcaggcatctgctgcttcggtgggggcccaacgcgcatgctgggcgcccgggtgattgagatccaaagagaagggcactgtaagacaggccagatgaactggctcctcgtcatgggactggtacctcagatctgagcatggcccttgtttttggcacgtagcagagaaaggattgatttgaacttaaccttgcaaagcaagttgcctgttttagcagtagtttgttgtaggtttcagggatgacagatttggatgcactcatttaaaacgttttggtcacatatcagctcttgatgcctttcttttaaattaattatagacagagagaggcatttagctgatctcttacccctggtatttcttttttttgttgttttcgtttttttaaatcacaagtagattgccagcgtaatggagaggaaaccagattggatatggactcttttttatgcctattctggtgttgcgtttgtatatccaaatggacgttatcctctcagattcttatctggcactaatttataactattatattatcagagactatgtagcaatatatcagtgcacaggcgcatcccaggcctgtacagatgtatgtctacacgtaagtataaatgaatttgcataccaggttttacacttgcatctctaatagagattaaaaacaacaaattggcctcttcctaagtatattaatatcatttatccttacattttatgcctccccctaaattaatgactgagttggtggaaagcggctaggttttattcatactgttttttgttctcaacttcaaaagtaatctacctctgaaaaatttgtagtttaatatttgtttggtgaatttgtgccactttaatccttccactatcattcccattttgttacatttctgttatggggactttatgttgaaatattgtataaagcatttgtagcaatttaaaaataaaatatttaaaattatttaaattgttttggacgcttcaattgtattatatgtgatttacatttcactttttttgttggcgttgttaacccggagagtgctcctgtattgaactttgctgttagttattttattgcttctttttggagagtgctataaaagactattctaatgaaaacattaaaatttacaatttgacatacaaaaaggggttgtccattgattttaaccaatgtagcactgagagagagagaggttaattatagatagacaagagtggtgtttgttgtttttcccctcccagcattgaaatcattggggcttgtcagatgtattaaaaaaagatttgttgtgctattgctgcaaacacttaataactagaggagaatttaaacaatgcattttatattattgtaacc

SEQ ID NO: 3263 - DNA, 5797 bp, Homo sapiens
  source 1..5797: mol_type = genomic DNA
gagatagcagctgcgattgaggaagagcgagccagcgcccggagcaagcggagctcccccaagagccggaaagaccaagcggagcagccagctggcagtagcgccctgtaggacccccaggacccgatgggaagaaaaaatcccaggaaaataaaaacaaaggaaacaaaatccaagacatacaactgaagacaagtgagccagatttcacctctgcaaatatgagagattctgcagaaggtcctaaagaagacgaagagaagccttcagcctcagcacttgagcagccggccaccctccaggaggtggccagtcaggaggtgcctccagaactagcaacccctgcccctgcctgggagccacagccagaaccagacgagcgattagaagcggcagcttgtgaggtgaatgatttgggggaagaggaggaggaggaagaggaggaggatgaagaagaagaagaagatgatgatgatgatgagttggaagacgagggggaagaagaagccagcatgccaaatgaaaattctgtgaaagagccagaaatacggtgtgatgagaagccagaagatttattagaggaaccaaaaacaacttcagaagaaactcttgaagactgctcagaggtaacacctgccatgcaaatccccagaactaaagaagaggccaatggtgatgtatttgaaacgtttatgtttccgtgtcaacattgtgaaaggaagtttacaaccaaacaggggcttgagcgtcacatgcatatccatatatccaccgtcaatcatgctttcaaatgcaagtactgtgggaaagcctttggcacacagattaaccggcggcgacatgagcggcgccatgaagcagggttaaagcggaaacccagccaaacactacagccgtcagaggatctggctgatggcaaagcatctggagaaaacgttgcttcaaaagatgattcgagtcctcccagtcttgggccagactgtctgatcatgaattcagagaaggcttcccaagacacaataaattcttctgtcgtagaagagaatggggaagttaaagaacttcatccgtgcaaatattgtaaaaaggtttttggaactcatactaatatgagacggcatcagcgtagagttcacgaacgtcatctgattcccaaaggtgtacggcgaaaaggaggccttgaagagccccagcctccagcagaacaggcccaggccacccagaacgtgtatgtaccaagcacagagccggaggaggaaggggaagcagatgatgtgtacatcatggacatttctagcaatatctctgaaaacttaaattactatattgatggtaaaattcaaactaataacaacactagtaactgtgatgtgattgagatggagtctgcttcggcagatttgtatggtataaattgtctgctcactccagttacagtggaaattactcaaaatataaagaccacacaggtccctgtaacagaagatcttcctaaagagcctttgggcagcacaaatagtgaggccaagaagcggagaactgcgagcccacctgcactgcccaaaattaaggccgaaacagactctgaccccatggtcccctcttgctctttaagtcttcctcttagcatatcaacaacagaggcagtgtctttccacaaagagaaaagtgtttatttgtcatcaaagctcaaacaacttcttcaaacccaagataaactaactcctgcagggatttcagcaactgaaatagctaaattaggtcctgtttgtgtgtctgctcctgcatcaatgttgcctgtgacctcaagtaggtttaagaggcggaccagctctcctcccagttctccacagcacagtcctgcccttcgagactttggaaagccaagtgatgggaaagcagcatggaccgatgccgggctgacttccaaaaaatccaaattagaaagtcacagcgactcaccagcatggagtttgtctgggagagatgagagagaaactgtgagccctccatgctttgatgaatataaaatgtctaaagagtggacagctagttctgcttttagcagtgtgtgcaaccagcagccactggatttatccagcggtgtcaaacagaaggctgagggtacaggcaagactccagtccagtgggaatctgtcttagatctcagtgtgcataaaaagcattgtagtgactctgaaggcaaggaattcaaagaaagtcattcagtgcagcctacgtgtagtgctgtaaagaaaaggaaaccaaccacctgcatgctgcagaaggttcttctcaatgaatataatggcatcgatttacctgtagaaaaccctgcagatgggaccaggagcccaagtccttgtaaatccctagaagctcagccagatcctgacctcggtccgggctctggtttccctgcccctactgttgagtccacacctgatgtttgtccttcatcacctgccctgcagacaccctccctttcatccggtcagctgcctcctctcttgatccccacagatccctcttcccctccaccctgtcccccggtattaactgttgccactccgccccctcccctccttcctaccgtacctcttccagccccctcttccagtgcatctccacacccatgcccctctccactctcaaatgccaccgcacagtccccacttccaattctgtccccaacagtgtccccctctccctctcccattcctcccgtggagcccctgatgtctgccgcctcacccgggcctccaacactttcttcttcctcctcttcatcttcctcctcctcttcgttttcttcttcatcttcctcctcttctccttctccacctcctctctccgcaatatcatctgttgtttcctctggtgataatctggaggcttctctccccatgatatctttcaaacaggaggaattagagaatgaaggtctgaaacccagggaagagccccagtctgctgctgaacaggatgttgttgttcaggaaacattcaacaaaaactttgtttgcaacgtctgtgaatcaccttttctttccattaaagatctaaccaaacatttatctattcatgctgaagaatggcccttcaaatgtgaattttgtgtgcagctttttaaggataaaacggacttgtcagaacatcgctttttgcttcatggagttgggaatatctttgtgtgttctgtttgtaaaaaagaatttgcttttttgtgcaatttgcagcagcaccagcgagatctccacccagataaggtgtgcacacatcacgagtttgaaagcgggactctgaggccccagaactttacagatcccagcaaggcccatgtagagcatatgcagagcttgccagaagatcctttagaaacttctaaagaagaagaggagttaaatgattcctctgaagagctttacacgactataaaaataatggcttctggaataaagacaaaagatccagatgttcgattgggcctcaatcagcattacccaagctttaaaccacctccatttcagtaccatcaccgtaaccccatggggattggtgtgacagccacaaatttcactacacacaatattccacagactttcactaccgccattcgctgcacaaagtgtggaaaaggtgtcgacaatatgccggagttgcacaaacatatcctggcttgtgcttctgcaagtgacaagaagaggtacacgcctaagaaaaacccagtaccattaaaacaaactgtgcaacccaaaaatggcgtggtggttttagataactctgggaaaaatgccttccgacgaatgggacagcccaaaaggcttaactttagtgttgagctcagcaaaatgtcgtcgaataagctcaaattaaatgcattgaagaaaaaaaatcagctagtacagaaagcaattcttcagaaaaacaaatctgcaaagcagaaggccgacttgaaaaatgcttgtgagtcatcctctcacatctgcccttactgtaatcgagagttcacttacattggaagcctgaataaacacgccgccttcagctgtcccaaaaaacccctttctcctcccaaaaaaaaagtttctcattcatctaagaaaggtggacactcatcacctgcaagtagtgacaaaaacagtaacagcaaccaccgcagacggacagcggatgcggagattaaaatgcaaagcatgcagactccgttgggcaagaccagagcccgcagctcaggccccacccaagtcccacttccctcctcatccttcaggtccaagcagaacgtcaagtttgcagcttcggtgaaatccaaaaaaccaagctcctcctctttaaggaactccagcccgataagaatggccaaaataactcatgttgaggggaaaaaacctaaagctgtggccaagaatcattctgctcagctttccagcaaaacatcacggagcctgcacgtgagggtacagaaaagcaaagctgttttacaaagcaaatccaccttggcgagtaagaaaagaacagaccggttcaatataaaatctagagagcggagtggggggccagtcacccggagccttcagctggcagctgctgctgacttgagtgagaacaagagagaggacggcagcgccaagcaggagctgaaggacttcaggaacttcctgtagaaaagcccccaaaacaaaacaaaccttaattgactaaaaagtattgcatgctcaacttaggataagcactacggcaaaggatacgaaatctaccaagcttgcaagaccagttgaagctgactcaaaaatcctaacattcagctgattgccggcaggcttagagtcaggcatctgctgcttcggtgggggcccaacgcgcatgctgggcgcccgggtgattgagatccaaagagaagggcactgtaagacaggccagatgaactggctcctcgtcatgggactggtacctcagatctgagcatggcccttgtttttggcacgtagcagagaaaggattgatttgaacttaaccttgcaaagcaagttgcctgttttagcagtagtttgttgtaggtttcagggatgacagatttggatgcactcatttaaaacgttttggtcacatatcagctcttgatgcctttcttttaaattaattatagacagagagaggcatttagctgatctcttacccctggtatttcttttttttgttgttttcgtttttttaaatcacaagtagattgccagcgtaatggagaggaaaccagattggatatggactcttttttatgcctattctggtgttgcgtttgtatatccaaatggacgttatcctctcagattcttatctggcactaatttataactattatattatcagagactatgtagcaatatatcagtgcacaggcgcatcccaggcctgtacagatgtatgtctacacgtaagtataaatgaatttgcataccaggttttacacttgcatctctaatagagattaaaaacaacaaattggcctcttcctaagtatattaatatcatttatccttacattttatgcctccccctaaattaatgactgagttggtggaaagcggctaggttttattcatactgttttttgttctcaacttcaaaagtaatctacctctgaaaaatttgtagtttaatatttgtttggtgaatttgtgccactttaatccttccactatcattcccattttgttacatttctgttatggggactttatgttgaaatattgtataaagcatttgtagcaatttaaaaataaaatatttaaaatta

SEQ ID NO: 3264 - DNA, 2688 bp, Homo sapiens
  source 1..2688: mol_type = genomic DNA
gcgaaacagcggcggcggcggcggccctcggtgctctgaggcgctggcgcggcgggcgcggggttcatgtaatcaaagaagtttctttgttgtgtgtatctttacagaacacaacaggaattgaaaatgaatcagaacactactgagcctgtggcggccaccgagaccctggctgaggtacccgaacatgtgctgcgaggacttccggaggaagtgaggcttttcccttctgctgttgacaagacccggattggtgtctgggccactaaaccaattttaaaaggcaaaaaatttgggccatttgttggtgataagaaaaaaagatctcaggttaagaataatgtatacatgtgggaggtgtattacccaaatttgggatggatgtgcattgatgccactgatccagagaagggaaactggctgcgatatgtgaattgggcttgctcaggagaagagcaaaatttattcccactggaaatcaacagagccatttactataaaactttaaagccaatcgcgccgggcgaggagctcctggtctggtacaatggggaagacaaccctgagatagcagctgcgattgaggaagagcgagccagcgcccggagcaagcggagctcccccaagagccggaaagctacagcctccgcttggcgtcccgatgctctccaccagcggccccgtacatcaccaggcagtataggaaggtcaaagctccagctgcagcccagttccagggaccattcttcaaagagtagacactctggctgctccctgacagcacctgaagtgacctggaatcagtgaagccaaagggactggcagtctgccctgcagggagtaccgacctatcccagttgtgtgaggctgcgagagaaagggagtgcatgtgcgcgcgtgcatgtgtgcgtgcgtgtgtgttcacgtgttctcgtgcgggcgcgtgagtggtcttcaaacgagggtcccgatccccggggcggcaggaagggggccgactccacgctgtcctttgggatgatacttggatgcagctcttgggaccgtgttctgcagcccagccttcctgttggggtggggcctctcctactatgcaatttttcaagagctccttgaccctgctttttgcttcttgagttgtcttttgccattatggggactttggtttgacccaggggtcagccttaggaaggccttcaggaggaggccgagttccccttcagtaccacccctctctccccaccttccctctcccggcaacatctctgggaatcaacagcatattgacacgttggagccgagcctgaacatgcccctcggccccagcacatggaaaacccccttccttgcctaaggtgtctgagtttctggctcttgaggcatttccagacttgaaattctcatcagtccattgctcttgagtctttgcagagaacctcagatcaggtgcacctgggagaaagactttgtccccacttacagatctatctcctcccttgggaagggcagggaatggggacggtgtatggaggggagggatctcctgcgcccttcattgccacacttggtgggaccatgaacatctttagtgtctgagcttctcaaattagctgcaataggaaaaaaacaaattgggaaatgaaaaaaaaatgggaagattaaaaagcacagggggaagaagaagagatttcggaggccatcctgccaggggcggacggggctgactcctgctctctggaggacggtcagtccatgtctcggagaaacgggtgagctgagcttggcgtttggacccagttcagtgaggttcttgggttttgtgcctttggggcagaccccaggcaaggatgtctgagaccacttgggcgctgttttctcagctccaatttcaagagtgagctatcaaacccagagcggaaggagggagctctgatgagcacggtttgtcacacgataaagggattttttttttcagggctactacggttgatcttgcaactctgtaaatatgtatgtagacacttttaaaagcacgtatttatgtccctgactgtaaatgctccatttttaaagttttataacttgtgttatttaatgagtcagtcaatcggctgcagtatgggatctgataaggatctaggagaagggtctcatgcggaccctcacatgggcagaaaaatggtggtcattggccgacatcacagttttcctgtttcccacccagctaaaaaccgttgtttgctttaaattttcataaactggaatcctttcacccgctcctacagctaaccctcacaagcatgaagtgctgtggctgttccttatcctaatgatgcgcttttgtcccgtaaatgttaacactcatgaagcataccccggcctctcagttcttgagggcctccccaccgcagcagcaaggaaagctcacgaaccccaaacctggcaagtcacctgcagcccatggtgagctctgggaagtgtggttgaggccttggggtcactccttttttgcatgtgcaaatgtgctggtcacccttcaacgctcccagacggtcaggaaaactgttccaatcatgaaaaggggggatgattttgtaaaagtggcatttcctggtcagtggtggtcttcaagacgacagctctgtatctgccatgtgaagagaattaacaataaaagtgtgaagagcg

SEQ ID NO: 3265 - DNA, 5902 bp, Homo sapiens
  source 1..5902: mol_type = genomic DNA
gtaaaagtgacattctaaatgttcctcactctgcgaggcttattttttagggactttgctataattctgaaagacttagttttacagtacatctgaaagtaggagttttcagaagtatggctcttgggataaatttagattcttaattgtgaagctctgttaccacttgttagaaggcaggtcagctcacctgcttggggaggtaaatatatgaatgcactctcgagtaatttaatggagccctacctcaatgtacagaatgacagtatcacagatcaagaatggagtacgagtgattttcggctatggtgggggtaggtaggtcacttgtcccctgttgtctcttactatttgtaaagtgaagactatgattagtctttttgatcgggatggtttgagatgaataaagaataggcaggcaatttggatactttaggcttttcaagaacattagtaacattttttcttagatatttctcctaatacaatgagtgttgtgaaataacatggcagttattgttgagagaaaagccttcccagttatgtattgagtccttaggcgttttgaccttccctccactcttacagaacttggtggaaggggccactatgttttctacctccttccgtgcctttcacaaagccacatcctgcaccgtctacccttctctgtggatatttttccgcttggcaatttcctttcctgaggcacccacttgggacatctgaatctccatctccatgttgatggcccgtttgtgcttggacgtgttcttccacttgagactgagggttcatgtaatcaaagaagtttctttgttgtgtgtatctttacagaacacaacaggaattgaaaatgaatcagaacactactgagcctgtggcggccaccgagaccctggctgaggtacccgaacatgtgctgcgaggacttccggaggaagtgaggcttttcccttctgctgttgacaagacccggattggtgtctgggccactaaaccaattttaaaaggcaaaaaatttgggccatttgttggtgataagaaaaaaagatctcaggttaagaataatgtatacatgtgggaggtgtattacccaaatttgggatggatgtgcattgatgccactgatccagagaagggaaactggctgcgatatgtgaattgggcttgctcaggagaagagcaaaatttattcccactggaaatcaacagagccatttactataaaactttaaagccaatcgcgccgggcgaggagctcctggtctggtacaatggggaagacaaccctgagatagcagctgcgattgaggaagagcgagccagcgcccggagcaagcggagctcccccaagagccggaaagggaagaaaaaatcccaggaaaataaaaacaaaggaaacaaaatccaagacatacaactgaagacaagtgagccagatttcacctctgcaaatatgagagattctgcagaaggtcctaaagaagacgaagagaagccttcagcctcagcacttgagcagccggccaccctccaggaggtggccagtcaggaggtgcctccagaactagcaacccctgcccctgcctgggagccacagccagaaccagacgagcgattagaagcggcagcttgtgaggtgaatgatttgggggaagaggaggaggaggaagaggaggaggatgaagaagaagaagaagatgatgatgatgatgagttggaagacgagggggaagaagaagccagcatgccaaatgaaaattctgtgaaagagccagaaatacggtgtgatgagaagccagaagatttattagaggaaccaaaaacaacttcagaagaaactcttgaagactgctcagaggtaacacctgccatgcaaatccccagaactaaagaagaggccaatggtgatgtatttgaaacgtttatgtttccgtgtcaacattgtgaaaggaagtttacaaccaaacaggggcttgagcgtcacatgcatatccatatatccaccgtcaatcatgctttcaaatgcaagtactgtgggaaagcctttggcacacagattaaccggcggcgacatgagcggcgccatgaagcagggttaaagcggaaacccagccaaacactacagccgtcagaggatctggctgatggcaaagcatctggagaaaacgttgcttcaaaagatgattcgagtcctcccagtcttgggccagactgtctgatcatgaattcagagaaggcttcccaagacacaataaattcttctgtcgtagaagagaatggggaagttaaagaacttcatccgtgcaaatattgtaaaaaggtttttggaactcatactaatatgagacggcatcagcgtagagttcacgaacgtcatctgattcccaaaggtgtacggcgaaaaggaggccttgaagagccccagcctccagcagaacaggcccaggccacccagaacgtgtatgtaccaagcacagagccggaggaggaaggggaagcagatgatgtgtacatcatggacatttctagcaatatctctgaaaacttaaattactatattgatggtaaaattcaaactaataacaacactagtaactgtgatgtgattgagatggagtctgcttcggcagatttgtatggtataaattgtctgctcactccagttacagtggaaattactcaaaatataaagaccacacaggtccctgtaacagaagatcttcctaaagagcctttgggcagcacaaatagtgaggccaagaagcggagaactgcgagcccacctgcactgcccaaaattaaggccgaaacagactctgaccccatggtcccctcttgctctttaagtcttcctcttagcatatcaacaacagaggcagtgtctttccacaaagagaaaagtgtttatttgtcatcaaagctcaaacaacttcttcaaacccaagataaactaactcctgcagggatttcagcaactgaaatagctaaattaggtcctgtttgtgtgtctgctcctgcatcaatgttgcctgtgacctcaagtaggtttaagaggcggaccagctctcctcccagttctccacagcacagtcctgcccttcgagactttggaaagccaagtgatgggaaagcagcatggaccgatgccgggctgacttccaaaaaatccaaattagaaagtcacagcgactcaccagcatggagtttgtctgggagagatgagagagaaactgtgagccctccatgctttgatgaatataaaatgtctaaagagtggacagctagttctgcttttagcagtgtgtgcaaccagcagccactggatttatccagcggtgtcaaacagaaggctgagggtacaggcaagactccagtccagtgggaatctgtcttagatctcagtgtgcataaaaagcattgtagtgactctgaaggcaaggaattcaaagaaagtcattcagtgcagcctacgtgtagtgctgtaaagaaaaggaaaccaaccacctgcatgctgcagaaggttcttctcaatgaatataatggcatcgatttacctgtagaaaaccctgcagatgggaccaggagcccaagtccttgtaaatccctagaagctcagccagatcctgacctcggtccgggctctggtttccctgcccctactgttgagtccacacctgatgtttgtccttcatcacctgccctgcagacaccctccctttcatccggtcagctgcctcctctcttgatccccacagatccctcttcccctccaccctgtcccccggtattaactgttgccactccgccccctcccctccttcctaccgtacctcttccagccccctcttccagtgcatctccacacccatgcccctctccactctcaaatgccaccgcacagtccccacttccaattctgtccccaacagtgtccccctctccctctcccattcctcccgtggagcccctgatgtctgccgcctcacccgggcctccaacactttcttcttcctcctcttcatcttcctcctcctcttcgttttcttcttcatcttcctcctcttctccttctccacctcctctctccgcaatatcatctgttgtttcctctggtgataatctggaggcttctctccccatgatatctttcaaacaggaggaattagagaatgaaggtctgaaacccagggaagagccccagtctgctgctgaacaggatgttgttgttcaggaaacattcaacaaaaactttgtttgcaacgtctgtgaatcaccttttctttccattaaagatctaaccaaacatttatctattcatgctgaagaatggcccttcaaatgtgaattttgtgtgcagctttttaaggataaaacggacttgtcagaacatcgctttttgcttcatggagttgggaatatctttgtgtgttctgtttgtaaaaaagaatttgcttttttgtgcaatttgcagcagcaccagcgagatctccacccagataaggtgtgcacacatcacgagtttgaaagcgggactctgaggccccagaactttacagatcccagcaaggcccatgtagagcatatgcagagcttgccagaagatcctttagaaacttctaaagaagaagaggagttaaatgattcctctgaagagctttacacgactataaaaataatggcttctggaataaagacaaaagatccagatgttcgattgggcctcaatcagcattacccaagctttaaaccacctccatttcagtaccatcaccgtaaccccatggggattggtgtgacagccacaaatttcactacacacaatattccacagactttcactaccgccattcgctgcacaaagtgtggaaaaggtgtcgacaatatgccggagttgcacaaacatatcctggcttgtgcttctgcaagtgacaagaagaggtacacgcctaagaaaaacccagtaccattaaaacaaactgtgcaacccaaaaatggcgtggtggttttagataactctgggaaaaatgccttccgacgaatgggacagcccaaaaggcttaactttagtgttgagctcagcaaaatgtcgtcgaataagctcaaattaaatgcattgaagaaaaaaaatcagctagtacagaaagcaattcttcagaaaaacaaatctgcaaagcagaaggccgacttgaaaaatgcttgtgagtcatcctctcacatctgcccttactgtaatcgagagttcacttacattggaagcctgaataaacacgccgccttcagctgtcccaaaaaacccctttctcctcccaaaaaaaaagtttctcattcatctaagaaaggtggacactcatcacctgcaagtagtgacaaaaacagtaacagcaaccaccgcagacggacagcggatgcggagattaaaatgcaaagcatgcagactccgttgggcaagaccagagcccgcagctcaggccccacccaagtcccacttccctcctcatccttcaggtccaagcagaacgtcaagtttgcagcttcggtgaaatccaaaaaaccaagctcctcctctttaaggaactccagcccgataagaatggccaaaataactcatgttgaggggaaaaaacctaaagctgtggccaagaatcattctgctcagctttccagcaaaacatcacggagcctgcacgtgagggtacagaaaagcaaagctgttttacaaagcaaatccaccttggcgagtaagaaaagaacagaccggttcaatataaaatctagagagcggagtggggggccagtcacccggagccttcagctggcagctgctgctgacttgagtgagaacaagagagaggacggcagcgccaagcaggagctgaaggacttcaggtgttttttg

SEQ ID NO: 3266 - DNA, 513 bp, Homo sapiens
  source 1..513: mol_type = genomic DNA
gaagagcgagccagcgcccggagcaagcggagctcccccaagagccggaaagtgttgtcctgtccctctgctgttccttgtcatcatttccatttcacttcccttgtgtttcattcctctttcttgtctagaccaagcggagcagccagctggcagtagcgccctgtaggacccccaggacccgatgggaagaaaaaatcccaggaaaataaaaacaaaggaaacaaaatccaagacatacaactgaagacaagtgagccagatttcacctctgcaaatatgagagattctgcagaaggtcctaaagaagacgaagagaagccttcagcctcagcacttgagcagccggccaccctccaggaggtggccagtcaggaggtgcctccagaactagcaacccctgcccctgcctgggagccacagccagaaccagacgagcgattagaagcggcagcttgtgaggtgaatgatttgggggaagaggaggaggaggaagaggaggaggatgaagaa

SEQ ID NO: 3267 - DNA, 6175 bp, Homo sapiens
  source 1..6175: mol_type = genomic DNA
gaagacaaccctgagatagcagctgcgattgaggaagagcgagccagcgcccggagcaagcggagctcccccaagagccggaaagggaagaaaaaatcccaggaaaataaaaacaaaggaaacaaaatccaagacatacaactgaagacaagtgagccagatttcacctctgcaaatatgagagattctgcagaaggtcctaaagaagacgaagagaagccttcagcctcagcacttgagcagccggccaccctccaggaggtggccagtcaggaggtgcctccagaactagcaacccctgcccctgcctgggagccacagccagaaccagacgagcgattagaagcggcagcttgtgaggtgaatgatttgggggaagaggaggaggaggaagaggaggaggatgaagaagaagaagaagatgatgatgatgatgagttggaagacgagggggaagaagaagccagcatgccaaatgaaaattctgtgaaagagccagaaatacggtgtgatgagaagccagaagatttattagaggaaccaaaaacaacttcagaagaaactcttgaagactgctcagaggtaacacctgccatgcaaatccccagaactaaagaagaggccaatggtgatgtatttgaaacgtttatgtttccgtgtcaacattgtgaaaggaagtttacaaccaaacaggggcttgagcgtcacatgcatatccatatatccaccgtcaatcatgctttcaaatgcaagtactgtgggaaagcctttggcacacagattaaccggcggcgacatgagcggcgccatgaagcagggttaaagcggaaacccagccaaacactacagccgtcagaggatctggctgatggcaaagcatctggagaaaacgttgcttcaaaagatgattcgagtcctcccagtcttgggccagactgtctgatcatgaattcagagaaggcttcccaagacacaataaattcttctgtcgtagaagagaatggggaagttaaagaacttcatccgtgcaaatattgtaaaaaggtttttggaactcatactaatatgagacggcatcagcgtagagttcacgaacgtcatctgattcccaaaggtgtacggcgaaaaggaggccttgaagagccccagcctccagcagaacaggcccaggccacccagaacgtgtatgtaccaagcacagagccggaggaggaaggggaagcagatgatgtgtacatcatggacatttctagcaatatctctgaaaacttaaattactatattgatggtaaaattcaaactaataacaacactagtaactgtgatgtgattgagatggagtctgcttcggcagatttgtatggtataaattgtctgctcactccagttacagtggaaattactcaaaatataaagaccacacaggtccctgtaacagaagatcttcctaaagagcctttgggcagcacaaatagtgaggccaagaagcggagaactgcgagcccacctgcactgcccaaaattaaggccgaaacagactctgaccccatggtcccctcttgctctttaagtcttcctcttagcatatcaacaacagaggcagtgtctttccacaaagagaaaagtgtttatttgtcatcaaagctcaaacaacttcttcaaacccaagataaactaactcctgcagggatttcagcaactgaaatagctaaattaggtcctgtttgtgtgtctgctcctgcatcaatgttgcctgtgacctcaagtaggtttaagaggcggaccagctctcctcccagttctccacagcacagtcctgcccttcgagactttggaaagccaagtgatgggaaagcagcatggaccgatgccgggctgacttccaaaaaatccaaattagaaagtcacagcgactcaccagcatggagtttgtctgggagagatgagagagaaactgtgagccctccatgctttgatgaatataaaatgtctaaagagtggacagctagttctgcttttagcagtgtgtgcaaccagcagccactggatttatccagcggtgtcaaacagaaggctgagggtacaggcaagactccagtccagtgggaatctgtcttagatctcagtgtgcataaaaagcattgtagtgactctgaaggcaaggaattcaaagaaagtcattcagtgcagcctacgtgtagtgctgtaaagaaaaggaaaccaaccacctgcatgctgcagaaggttcttctcaatgaatataatggcatcgatttacctgtagaaaaccctgcagatgggaccaggagcccaagtccttgtaaatccctagaagctcagccagatcctgacctcggtccgggctctggtttccctgcccctactgttgagtccacacctgatgtttgtccttcatcacctgccctgcagacaccctccctttcatccggtcagctgcctcctctcttgatccccacagatccctcttcccctccaccctgtcccccggtattaactgttgccactccgccccctcccctccttcctaccgtacctcttccagccccctcttccagtgcatctccacacccatgcccctctccactctcaaatgccaccgcacagtccccacttccaattctgtccccaacagtgtccccctctccctctcccattcctcccgtggagcccctgatgtctgccgcctcacccgggcctccaacactttcttcttcctcctcttcatcttcctcctcctcttcgttttcttcttcatcttcctcctcttctccttctccacctcctctctccgcaatatcatctgttgtttcctctggtgataatctggaggcttctctccccatgatatctttcaaacaggaggaattagagaatgaaggtctgaaacccagggaagagccccagtctgctgctgaacaggatgttgttgttcaggaaacattcaacaaaaactttgtttgcaacgtctgtgaatcaccttttctttccattaaagatctaaccaaacatttatctattcatgctgaagaatggcccttcaaatgtgaattttgtgtgcagctttttaaggataaaacggacttgtcagaacatcgctttttgcttcatggagttgggaatatctttgtgtgttctgtttgtaaaaaagaatttgcttttttgtgcaatttgcagcagcaccagcgagatctccacccagataaggtgtgcacacatcacgagtttgaaagcgggactctgaggccccagaactttacagatcccagcaaggcccatgtagagcatatgcagagcttgccagaagatcctttagaaacttctaaagaagaagaggagttaaatgattcctctgaagagctttacacgactataaaaataatggcttctggaataaagacaaaagatccagatgttcgattgggcctcaatcagcattacccaagctttaaaccacctccatttcagtaccatcaccgtaaccccatggggattggtgtgacagccacaaatttcactacacacaatattccacagactttcactaccgccattcgctgcacaaagtgtggaaaaggtgtcgacaatatgccggagttgcacaaacatatcctggcttgtgcttctgcaagtgacaagaagaggtacacgcctaagaaaaacccagtaccattaaaacaaactgtgcaacccaaaaatggcgtggtggttttagataactctgggaaaaatgccttccgacgaatgggacagcccaaaaggcttaactttagtgttgagctcagcaaaatgtcgtcgaataagctcaaattaaatgcattgaagaaaaaaaatcagctagtacagaaagcaattcttcagaaaaacaaatctgcaaagcagaaggccgacttgaaaaatgcttgtgagtcatcctctcacatctgcccttactgtaatcgagagttcacttacattggaagcctgaataaacacgccgccttcagctgtcccaaaaaacccctttctcctcccaaaaaaaaagtttctcattcatctaagaaaggtggacactcatcacctgcaagtagtgacaaaaacagtaacagcaaccaccgcagacggacagcggatgcggagattaaaatgcaaagcatgcagactccgttgggcaagaccagagcccgcagctcaggccccacccaagtcccacttccctcctcatccttcaggtccaagcagaacgtcaagtttgcagcttcggtgaaatccaaaaaaccaagctcctcctctttaaggaactccagcccgataagaatggccaaaataactcatgttgaggggaaaaaacctaaagctgtggccaagaatcattctgctcagctttccagcaaaacatcacggagcctgcacgtgagggtacagaaaagcaaagctgttttacaaagcaaatccaccttggcgagtaagaaaagaacagaccggttcaatataaaatctagagagcggagtggggggccagtcacccggagccttcagctggcagctgctgctgacttgagtgagaacaagagagaggacggcagcgccaagcaggagctgaaggacttcaggaacttcctgtagaaaagcccccaaaacaaaacaaaccttaattgactaaaaagtattgcatgctcaacttaggataagcactacggcaaaggatacgaaatctaccaagcttgcaagaccagttgaagctgactcaaaaatcctaacattcagctgattgccggcaggcttagagtcaggcatctgctgcttcggtgggggcccaacgcgcatgctgggcgcccgggtgattgagatccaaagagaagggcactgtaagacaggccagatgaactggctcctcgtcatgggactggtacctcagatctgagcatggcccttgtttttggcacgtagcagagaaaggattgatttgaacttaaccttgcaaagcaagttgcctgttttagcagtagtttgttgtaggtttcagggatgacagatttggatgcactcatttaaaacgttttggtcacatatcagctcttgatgcctttcttttaaattaattatagacagagagaggcatttagctgatctcttacccctggtatttcttttttttgttgttttcgtttttttaaatcacaagtagattgccagcgtaatggagaggaaaccagattggatatggactcttttttatgcctattctggtgttgcgtttgtatatccaaatggacgttatcctctcagattcttatctggcactaatttataactattatattatcagagactatgtagcaatatatcagtgcacaggcgcatcccaggcctgtacagatgtatgtctacacgtaagtataaatgaatttgcataccaggttttacacttgcatctctaatagagattaaaaacaacaaattggcctcttcctaagtatattaatatcatttatccttacattttatgcctccccctaaattaatgactgagttggtggaaagcggctaggttttattcatactgttttttgttctcaacttcaaaagtaatctacctctgaaaaatttgtagtttaatatttgtttggtgaatttgtgccactttaatccttccactatcattcccattttgttacatttctgttatggggactttatgttgaaatattgtataaagcatttgtagcaatttaaaaataaaatatttaaaattatttaaattgttttggacgcttcaattgtattatatgtgatttacatttcactttttttgttggcgttgttaacccggagagtgctcctgtattgaactttgctgttagttattttattgcttctttttggagagtgctataaaagactattctaatgaaaacattaaaatttacaatttgacatacaaaaaggggttgtccattgattttaaccaatgtagcactgagagagagagaggttaattatagatagacaagagtggtgtttgttgtttttcccctcccagcattgaaatcattggggcttgtcagatgtattaaaaaaagatttgttgtgctattgctgcaaacacttaataactagaggagaatttaaacaatgcattttatattattgtaaccaataaaaaactttctaaaca

SEQ ID NO: 3268 - DNA, 1291 bp, Homo sapiens
  source 1..1291: mol_type = genomic DNA
ctcccggccccggcgcaggcgcaggcgcgggcacacgcgccgccgcccgccggtccttcccttcggcggaggtgggggaaggaggagtcatcccgtttaaccctgggctccccgaactctccttaatttgctaaatttgcagcttgctaattcctcctgctttctccttccttccttcttctggctcactccctgccccgataccaaagtctggtttatattcagtgcaaattggagcaaaccctacccttcacctctctcccgccaccccccatccttctgcattgctttccatcgaactctgcaaattttgcaatagggggagggatttttaaaattgcatttgcaaagttcggtgtctgggctggcgagtgggggagggagggaatggggagtaggccccgcccctaccgtcctttgcaaataaaaatctagcggggcggggggggggaggagcaggaagtggcggtgcgagggctgctgcacagcgagcggagccgcggtccggacggcagcgcgtgccccgagctctccgcctccccccgcccgccagccgaggcagctcgagcccagtccgcggccccagcagcagcgccgagagcagccccagtagcagcgccatggccgggtggaacgcctacatcgacaacctcatggcggacgggacctgtcaggacgcggccatcgtgggctacaaggactcgccctccgtctgggccgccgtccccgggaaaacgttcgtcaacatcacgccagctgaggtgggtgtcctggttggcaaagaccggtcaagtttttacgtgaatgggctgacacttgggggccagaaatgttcggtgatccgggactcactgctgcaggatggggaatttagcatggatcttcgtaccaagagcaccggtggggcccccaccttcaatgtcactgtcaccaagactgacaagacgctagtcctgctgatgggcaaagaaggtgtccacggtggtttgatcaacaagaaatgttatgaaatggcctcccaccttcggcgttcccagtactgacctcgtctgtcccttccccttcaccgctccccacagctttgcacccctttcctccccatacacacacaaaccattttattttttgggccattaccccataccccttattgctgccaaaaccacatgggctgggggccagggctggatggacagacacctccccctacccatatccctcccgtgtgtggttggaaaacttttgttttttggggttttttttttctgaataaaaaagattctactaacaa

SEQ ID NO: 3269 - DNA, 2496 bp, Homo sapiens
  source 1..2496: mol_type = genomic DNA
atgactgagctgaaggcaaagggtccccgggctccccacgtggcgggcggcccgccctcccccgaggtcggatccccactgctgtgtcgcccagccgcaggtccgttcccggggagccagacctcggacaccttgcctgaagtttcggccatacctatctccctggacgggctactcttccctcggccctgccagggacaggacccctccgacgaaaagacgcaggaccagcagtcgctgtcggacgtggagggcgcatattccagagctgaagctacaaggggtgctggaggcagcagttctagtcccccagaaaaggacagcggactgctggacagtgtcttggacactctgttggcgccctcaggtcccgggcagagccaacccagccctcccgcctgcgaggtcaccagctcttggtgcctgtttggccccgaacttcccgaagatccaccggctgcccccgccacccagcgggtgttgtccccgctcatgagccggtccgggtgcaaggttggagacagctccgggacggcagctgcccataaagtgctgccccggggcctgtcaccagcccggcagctgctgctcccggcctctgagagccctcactggtccggggccccagtgaagccgtctccgcaggccgctgcggtggaggttgaggaggaggatggctctgagtccgaggagtctgcgggtccgcttctgaagggcaaacctcgggctctgggtggcgcggcggctggaggaggagccgcggctgtcccgccgggggcggcagcaggaggcgtcgccctggtccccaaggaagattcccgcttctcagcgcccagggtcgccctggtggagcaggacgcgccgatggcgcccgggcgctccccgctggccaccacggtgatggatttcatccacgtgcctatcctgcctctcaatcacgccttattggcagcccgcactcggcagctgctggaagacgaaagttacgacggcggggccggggctgccagcgcctttgccccgccgcggagttcaccctgtgcctcgtccaccccggtcgctgtaggcgacttccccgactgcgcgtacccgcccgacgccgagcccaaggacgacgcgtaccctctctatagcgacttccagccgcccgctctaaagataaaggaggaggaggaaggcgcggaggcctccgcgcgctccccgcgttcctaccttgtggccggtgccaaccccgcagccttcccggatttcccgttggggccaccgcccccgctgccgccgcgagcgaccccatccagacccggggaagcggcggtgacggccgcacccgccagtgcctcagtctcgtctgcgtcctcctcggggtcgaccctggagtgcatcctgtacaaagcggagggcgcgccgccccagcagggcccgttcgcgccgccgccctgcaaggcgccgggcgcgagcggctgcctgctcccgcgggacggcctgccctccacctccgcctctgccgccgccgccggggcggcccccgcgctctaccctgcactcggcctcaacgggctcccgcagctcggctaccaggccgccgtgctcaaggagggcctgccgcaggtctacccgccctatctcaactacctgaggccggattcagaagccagccagagcccacaatacagcttcgagtcattacctcagaagatttgtttaatctgtggggatgaagcatcaggctgtcattatggtgtccttacctgtgggagctgtaaggtcttctttaagagggcaatggaagggcagcacaactacttatgtgctggaagaaatgactgcatcgttgataaaatccgcagaaaaaactgcccagcatgtcgccttagaaagtgctgtcaggctggcatggtccttggaggttttcgaaacttacatattgatgaccagataactctcattcagtattcttggatgagcttaatggtgtttggtctaggatggagatcctacaaacacgtcagtgggcagatgctgtattttgcacctgatctaatactaaatgaacagcggatgaaagaatcatcattctattcattatgccttaccatgtggcagatcccacaggagtttgtcaagcttcaagttagccaagaagagttcctctgtatgaaagtattgttacttcttaatacaattcctttggaagggctacgaagtcaaacccagtttgaggagatgaggtcaagctacattagagagctcatcaaggcaattggtttgaggcaaaaaggagttgtgtcgagctcacagcgtttctatcaacttacaaaacttcttgataacttgcatgatcttgtcaaacaacttcatctgtactgcttgaatacatttatccagtcccgggcactgagtgttgaatttccagaaatgatgtctgaagttattgctgcacaattacccaagatattggcagggatggtgaaaccccttctctttcataaaaagtga

SEQ ID NO: 3270 - DNA, 13748 bp, Homo sapiens
  source 1..13748: mol_type = genomic DNA
ggatccattttataagctcaaagataattacttttcagactaagaatatttagggtaaaaagtactgttcaacatctctactgaggatgttatgatgtagcacactgtataagctggagctaaaggaaactttccttaaagtgctatttactaaaaattggaacacattccttaagacaaatcgaagtgtggcacacaacatccaaacttccatcatagatacagaggtgttaccatctcccactcccaaatttctttgtcacgctgaggatactcaagaggagcaggacatgttggtcgcagcaggagaaacttgaaagcattcacttttatggaactcataagggagagaatctcttatttagtatcgtccttgatacatttattattttaaaagataatgtagccaaatgtcttcctctgtgttaaatctttacaaaactgaaatcttaaaatggtgacaaaaattctacttctgatagaatctattcatttttccaattagatagggcataattcttaatttgcaaaacaaaacgtaatatgcttatgaggttccatcccaaagaacctgctattgagagtagcattcagaataacgggtggaaatgccaactccagagtttcagatcctaccggtaattggggtagggaggggctttgggcggggcctccctagaggaggaggcgttgttagaaagctgtctggccagtccacagctgtcactaatcggggtaagccttgttgtatttgtgcgtgtgggtggcattctcaatgagaactagcttcacttgtcatttgagtgaaatctacaacccgaggcggctagtgctcccgcactactgggatctgagatcttcggagatgactgtcgcccgcagtacggagccagcagaagtccgacccttcctgggaatgggctgtaccgagaggtccgactagccccagggttttagtgagggggcagtggaactcagcgagggactgagagcttcacagcatgcacgagtttgatgccagagaaaaagtcgggagataaaggagccgcgtgtcactaaattgccgtcgcagccgcagccactcaagtgccggacttgtgagtactctgcgtctccagtcctcggacagaagttggagaactctcttggagaactccccgagttaggagacgagatctcctaacaattactactttttcttgcgctccccacttgccgctcgctgggacaaacgacagccacagttcccctgacgacaggatggaggccaagggcaggagctgaccagcgccgccctcccccgcccccgacccaggaggtggagatccctccggtccagccacattcaacacccactttctcctccctctgcccctatattcccgaaaccccctcctccttcccttttccctcctcctggagacgggggaggagaaaaggggagtccagtcgtcatgactgagctgaaggcaaagggtccccgggctccccacgtggcgggcggcccgccctcccccgaggtcggatccccactgctgtgtcgcccagccgcaggtccgttcccggggagccagacctcggacaccttgcctgaagtttcggccatacctatctccctggacgggctactcttccctcggccctgccagggacaggacccctccgacgaaaagacgcaggaccagcagtcgctgtcggacgtggagggcgcatattccagagctgaagctacaaggggtgctggaggcagcagttctagtcccccagaaaaggacagcggactgctggacagtgtcttggacactctgttggcgccctcaggtcccgggcagagccaacccagccctcccgcctgcgaggtcaccagctcttggtgcctgtttggccccgaacttcccgaagatccaccggctgcccccgccacccagcgggtgttgtccccgctcatgagccggtccgggtgcaaggttggagacagctccgggacggcagctgcccataaagtgctgccccggggcctgtcaccagcccggcagctgctgctcccggcctctgagagccctcactggtccggggccccagtgaagccgtctccgcaggccgctgcggtggaggttgaggaggaggatggctctgagtccgaggagtctgcgggtccgcttctgaagggcaaacctcgggctctgggtggcgcggcggctggaggaggagccgcggctgtcccgccgggggcggcagcaggaggcgtcgccctggtccccaaggaagattcccgcttctcagcgcccagggtcgccctggtggagcaggacgcgccgatggcgcccgggcgctccccgctggccaccacggtgatggatttcatccacgtgcctatcctgcctctcaatcacgccttattggcagcccgcactcggcagctgctggaagacgaaagttacgacggcggggccggggctgccagcgcctttgccccgccgcggagttcaccctgtgcctcgtccaccccggtcgctgtaggcgacttccccgactgcgcgtacccgcccgacgccgagcccaaggacgacgcgtaccctctctatagcgacttccagccgcccgctctaaagataaaggaggaggaggaaggcgcggaggcctccgcgcgctccccgcgttcctaccttgtggccggtgccaaccccgcagccttcccggatttcccgttggggccaccgcccccgctgccgccgcgagcgaccccatccagacccggggaagcggcggtgacggccgcacccgccagtgcctcagtctcgtctgcgtcctcctcggggtcgaccctggagtgcatcctgtacaaagcggagggcgcgccgccccagcagggcccgttcgcgccgccgccctgcaaggcgccgggcgcgagcggctgcctgctcccgcgggacggcctgccctccacctccgcctctgccgccgccgccggggcggcccccgcgctctaccctgcactcggcctcaacgggctcccgcagctcggctaccaggccgccgtgctcaaggagggcctgccgcaggtctacccgccctatctcaactacctgaggccggattcagaagccagccagagcccacaatacagcttcgagtcattacctcagaagatttgtttaatctgtggggatgaagcatcaggctgtcattatggtgtccttacctgtgggagctgtaaggtcttctttaagagggcaatggaagggcagcacaactacttatgtgctggaagaaatgactgcatcgttgataaaatccgcagaaaaaactgcccagcatgtcgccttagaaagtgctgtcaggctggcatggtccttggaggtcgaaaatttaaaaagttcaataaagtcagagttgtgagagcactggatgctgttgctctcccacagccagtgggcgttccaaatgaaagccaagccctaagccagagattcactttttcaccaggtcaagacatacagttgattccaccactgatcaacctgttaatgagcattgaaccagatgtgatctatgcaggacatgacaacacaaaacctgacacctccagttctttgctgacaagtcttaatcaactaggcgagaggcaacttctttcagtagtcaagtggtctaaatcattgccaggttttcgaaacttacatattgatgaccagataactctcattcagtattcttggatgagcttaatggtgtttggtctaggatggagatcctacaaacacgtcagtgggcagatgctgtattttgcacctgatctaatactaaatgaacagcggatgaaagaatcatcattctattcattatgccttaccatgtggcagatcccacaggagtttgtcaagcttcaagttagccaagaagagttcctctgtatgaaagtattgttacttcttaatacaattcctttggaagggctacgaagtcaaacccagtttgaggagatgaggtcaagctacattagagagctcatcaaggcaattggtttgaggcaaaaaggagttgtgtcgagctcacagcgtttctatcaacttacaaaacttcttgataacttgcatgatcttgtcaaacaacttcatctgtactgcttgaatacatttatccagtcccgggcactgagtgttgaatttccagaaatgatgtctgaagttattgctgcacaattacccaagatattggcagggatggtgaaaccccttctctttcataaaaagtgaatgtcatctttttcttttaaagaattaaattttgtggtatgtctttttgttttggtcaggattatgaggtcttgagtttttataatgttcttctgaaagccttacatttataacatcatagtgtgtaaatttaaaagaaaaattgtgaggttctaattattttcttttataaagtataattagaatgtttaactgttttgtttacccatattttcttgaagaatttacaagattgaaaaagtactaaaattgttaaagtaaactatcttatccatattatttcataccatgtaggtgaggatttttaacttttgcatctaacaaatcatcgacttaagagaaaaaatcttacatgtaataacacaaagctattatatgttatttctaggtaactccctttgtgtcaattatatttccaaaaatgaacctttaaaatggtatgcaaaattttgtctatatatatttgtgtgaggaggaaattcataactttcctcagattttcaaaagtatttttaatgcaaaaaatgtagaaagagtttaaaaccactaaaatagattgatgttcttcaaactaggcaaaacaactcatatgttaagaccattttccagattggaaacacaaatctcttaggaagttaataagtagattcatatcattatgcaaatagtattgtgggttttgtaggtttttaaaataaccttttttggggagagaattgtcctctaatgaggtattgcgagtggacataagaaatcagaagattatggcctaactgtactccttaccaactgtggcatgctgaaagttagtcactcttactgattctcaattctctcacctttgaaagtagtaaaatatctttcctgccaattgctcctttgggtcagagcttattaacatcttttcaaatcaaaggaaagaagaaagggagaggaggaggagggaggtatcaattcacatacctttctcctctttatcctccactatcatgaattcatattatgtttcagccatgcaaatctttttaccatgaaatttcttccagaattttccccctttgacacaaattccatgcatgtttcaaccttcgagactcagccaaatgtcatttctgtaaaatcttccctgagtcttccaagcagtaatttgccttctcctagagtttacctgccattttgtgcacatttgagttacagtagcatgttattttacaattgtgactctcctgggagtctgggagccatataaagtggtcaatagtgtttgctgactgagagttgaatgacattttctctctgtcttggtattactgtagatttcgatcattctttggttacatttctgcatatttctgtacccatgactttatcactttcttctcccatgctttatctccatcaattatcttcattacttttaaattttccacctttgcttcctactttgtgagatctctccctttactgactataacatagaagaatagaagtgtattttatgtgtcttaaggacaatactttagattccttgttctaagtttttaaactgaatgaatggaatattatttctctccctaagcaaaattccacaaaacaattatttcttatgtttatgtagccttaaattgttttgtactgtaaacctcagcataaaaactttcttcatttctaatttcattcaacaaatattgattgaatacctggtattagcacaagaaaaatgtgctaataagccttatgagaatttggagctgaagaaagacatataactcaggaaagttacagtccagtagtaggtataaattacagtgcctgataaataggcattttaatatttgtacactcaacgtatactaggtaggtgcaaaacatttacatataattttactgatacccatgcagcacaaaggtactaactttaaatattaaataacacctttatgtgtcagtaattcatttgcattaaatcttattgaaaaggctttcaatatattttccccacaaatgtcatcccaagaaaaaagtatttttaacatctcccaaatataatagttacaggaaatctacctctgtgagagtgacacctctcagaatgaactgtgtgacacaagaaaatgaatgtaggtctatccaaaaaaaaccccaagaaacaaaaacaatattattagccctttatgcttaagtgatggactcagggaacagttgatgttgtgatcattttattatctgattcttgttactttgaattaaaccaatattttgatgatataaatcatttccaccagcatatatttaatttccataataactttaaaattttctaatttcactcaactatgagggaatagaatgtggtggccacaggtttggcttttgttaaaatgtttgatatcttcgatgttgatctctgtctgcaatgtagatgtctaaacactaggatttaatatttaaggctaagctttaaaaataaagtacctttttaaaaagaatatggcttcaccaaatggaaaatacctaatttctaaatctttttctctacaaagtcctatctactaatgtctccattactatttagtcatcataaccattatcttcattttacatgtcgtgttctttctggtagctctaaaatgacactaaatcataagaagacaggttacatatcaggaaatacttgaaggttactgaaatagattcttgagttaatgaaaatattttctgtaaaaaggtttgaaaagccatttgagtctaaagcattatacctccattatcagtagttatgtgacaattgtgtgtgtgtttaatgtttaaagatgtggcactttttaataaggcaatgctatgctattttttcccatttaacattaagataatttattgctatacagatgatatggaaatatgatgaacaatattttttttgccaaaactatgccttgtaagtagccatggaatgtcaacctgtaacttaaattatccacagatagtcatgtgtttgatgatgggcactgtggagataactgacataggactgtgccccccttctctgccacttactagctggatgagattaagcaagtcatttaactgctctgattaaacctgcctttcccaagtgctttgtaatgaatagaaatggaaaccaaaaaaaacgtatacaggccttcagaaatagtaattgctactattttgttttcattaagccatagttctggctataattttatcaaactcaccagctatattctacagtgaaagcaggattctagaaagtctcactgttttatttatgtcaccatgtgctatgatatatttggttgaattcatttgaaattagggctggaagtattcaagtaatttcttctgctgaaaaaatacagtgttttgagtttagggcctgttttatcaaagttctaaagagcctatcactcttccattgtagacattttaaaataatgacactgattttaacatttttaagtgtctttttagaacagagagcctgactagaacacagcccctccaaaaacccatgctcaaattatttttactatggcagcaattccacaaaagggaacaatgggtttagaaattacaatgaagtcatcaacccaaaaaacatccctatccctaagaaggttatgatataaaatgcccacaagaaatctatgtctgctttaatctgtcttttattgctttggaaggatggctattacatttttagtttttgctgtgaatacctgagcagtttctctcatccatacttatccttcacacatcagaagtcaggatagaatatgaatcattttaaaaacttttacaactccagagccatgtgcataagaagcattcaaaacttgccaaaacatacattttttttcaaatttaaagatactctatttttgtattcaatagctcaacaactgtggtccccactgataaagtgaagtggacaaggagacaagtaatggcataagtttgtttttcccaaagtatgcctgttcaatagccattggatgtgggaaatttctacatctcttaaaattttacagaaaatacatagccagatagtctagcaaaagttcaccaagtcctaaattgcttatccttacttcactaagtcatgaaatcattttaatgaaaagaacatcacctaggttttgtggtttctttttttcttattcatggctgagtgaaaacaacaatctctgtttctccctagcatctgtggactatttaatgtaccattattccacactctatggtccttactaaatacaaaattgaacaaaaagcagtaaaacaactgactcttcacccatattataaaatataatccaagccagattagtcaacatccataagatgaatccaagctgaactgggcctagattattgagttcaggttggatcacatccctatttattaataaacttaggaaagaaggccttacagaccatcagttagctggagctaatagaacctacacttctaaagttcggcctagaatcaatgtggccttaaaagctgaaaagaagcaggaaagaacagttttcttcaataatttgtccaccctgtcactggagaaaatttaagaatttgggggtgttggtagtaagttaaacacagcagctgttcatggcagaaattattcaatacataccttctctgaatatcctataaccaaagcaaagaaaaacaccaaggggtttgttctcctccttggagttgacctcattccaaggcagagctcaggtcacaggcacaggggctgcgcccaagcttgtccgcagccttatgcagctgtggagtctggaagactgttgcaggactgctggcctagtcccagaatgtcagcctcattttcgatttactggctcttgttgctgtatgtcatgctgaccttattgttaaacacaggtttgtttgctttttttccactcatggagacatgggagaggcattatttttaagctggttgaaagctttaaccgataaagcatttttagagaaatgtgaatcaggcagctaagaaagcatactctgtccattacggtaaagaaaatgcacagattattaactctgcagtgtggcattagtgtcctggtcaatattcggatagatatgaataaaatatttaaatggtattgtaaatagttttcaggacatatgctatagcttatttttattatcttttgaaattgctcttaatacatcaaatcctgatgtattcaatttatcagatataaattattctaaatgaagcccagttaaatgtttttgtcttgtcagttatatgttaagtttctgatctctttgtctatgacgtttactaatctgcatttttactgttatgaattattttagacagcagtggtttcaagctttttgccactaaaaataccttttattttctcctcccccagaaaagtctataccttgaagtatctatccaccaaactgtacttctattaagaaatagttattgtgttttcttaatgttttgttattcaaagacatatcaatgaaagctgctgagcagcatgaataacaattatatccacacagatttgatatattttgtgcagccttaacttgatagtataaaatgtcattgctttttaaataatagttagtcaatggacttctatcatagctttcctaaactaggttaagatccagagctttggggtcataatatattacatacaattaagttatctttttctaagggctttaaaattcatgagaataaccaaaaaaggtatgtggagagttaatacaaacataccatattcttgttgaaacagagatgtggctctgcttgttctccataaggtagaaatactttccagaatttgcctaaactagtaagccctgaatttgctatgattagggataggaagagattttcacatggcagactttagaattcttcactttagccagtaaagtatctccttttgatcttagtattctgtgtattttaacttttctgagttgtgcatgtttataagaaaaatcagcacaaagggtttaagttaaagcctttttactgaaatttgaaagaaacagaagaaaatatcaaagttctttgtattttgagaggattaaatatgatttacaaaagttacatggagggctctctaaaacattaaattaattattttttgttgaaaagtcttactttaggcatcattttattcctcagcaactagctgtgaagcctttactgtgctgtatgccagtcactctgctagattgtggagattaccagtgttcccgtcttctccgagcttagagttggatggggaataaagacaggtaaacagatagctacaatattgtactgtgaatgcttatgctggaggaagtacagggaactattggagcacctaagaggagcacctaccttgaatttaggggttagcagaggcatcctgaaaaaagtcaaagctaagccacaatctataagcagtttaggaattagcagaacgtgcgtggtgaggagatgccaaaggcaagaagagaagagtattccaaacaggagggattccaaagagagaagagtatcccaaacaacatttgcacaaacctgatggggagagagaatgtggggtggggatggatgatgagactgaagaagaaagccaggtctagataatcagtggccttgtacaccatgttaaagagtgtagacttgattctgttgtaaacaggaaagcagcacaattcatatgaatattttagaagactcccactggaatatggagaataaagttggagatgactaatcctggaagcagggagaacatttttgaggaagttgcactattttggtgaaaatgatgatcataaacatgaagaattgtaggtgatcatgacctcctctctaattttccagaagggttttggaagatataacataggaacattgacaggactgacgaaaggagatgaaatacaccatataaattgtcaaacacaaggccagatgtctaattattttgcttatgtgttgaaattacaaatttttcatcaggaaaccaaaaactacaaaacttagttttcccaagtcccagaattctatctgtccaaacaatctgtaccactccacctatatccctacctttgcatgtctgtccaacctcaaagtccaggtctatacacacgggtaagactagagcagttcaagtttcagaaaatgagaaagaggaactgagttgtgctgaacccatacaaaataaacacattctttgtatagattcttggaacctcgagaggaattcacctaactcataggtatttgatggtatgaatccatggctgggctcggcttttaaaaagccttatctgggattccttctatggaaccaagttccatcaaagcccatttaaaagcctacattaaaaacaaaattcttgctgcattgtatacaaataatgatgtcatgatcaaataatcagatgccattatcaagtggaattacaaaatggtatacccactccaaaaaaaaaaaaaaagctaaattctcagtagaacattgtgacttcatgagccctccacagccttggagctgaggagggagcactggtgagcagtaggttgaagagaaaacttggcgcttaataatctatccatgttttttcatctaaaagagccttctttttggattaccttattcaatttccatcaaggaaattgttagttccactaaccagacagcagctgggaaggcagaagcttactgtatgtacatggtagctgtgggaaggaggtttctttctccaggtcctcactggccatacaccagtcccttgttagttatgcctggtcatagacccccgttgctatcatctcatatttaagtctttggcttgtgaatttatctattctttcagcttcagcactgcagagtgctgggactttgctaacttccatttcttgctggcttagcacattcctcataggcccagctcttttctcatctggccctgctgtggagtcaccttgccccttcaggagagccatggcttaccactgcctgctaagcctccactcagctgccaccacactaaatccaagcttctctaagatgttgcagactttacaggcaagcataaaaggcttgatcttcctggacttccctttacttgtctgaatctcacctccttcaactttcagtctcagaatgtaggcatttgtcctctttgccctacatcttccttcttctgaatcatgaaagcctctcacttcctcttgctatgtgctggaggcttctgtcaggttttagaatgagttctcatctagtcctagtagcttttgatgcttaagtccaccttttaaggatacctttgagatttagaccatgtttttcgcttgagaaagccctaatctccagacttgcctttctgtggatttcaaagaccaactgaggaagtcaaaagctgaatgttgactttctttgaacatttccgctataacaattccaattctcctcagagcaatatgcctgcctccaactgaccaggagaaaggtccagtgccaaagagaaaaacacaaagattaattatttcagttgagcacatactttcaaagtggtttgggtattcatatgaggttttctgtcaagagggtgagactcttcatctatccatgtgtgcctgacagttctcctggcactggctggtaacagatgcaaaactgtaaaaattaagtgatcatgtattttaacgatatcatcacatacttattttctatgtaatgttttaaatttcccctaacatactttgactgttttgcacatggtagatattcacatttttttgtgttgaagttgatgcaatcttcaaagttatctaccccgttgcttattagtaaaactagtgttaatacttggcaagagatgcagggaatctttctcatgactcacgccctatttagttattaatgctactaccctattttgagtaagtagtaggtccctaagtacattgtccagagttatacttttaaagatatttagccccatatacttcttgaatctaaagtcatacaccttgctcctcatttctgagtgggaaagacatttgagagtatgttgacaattgttctgaaggtttttgccaagaaggtgaaactgtcctttcatctgtgtatgcctggggctgggtccctggcagtgatggggtgacaatgcaaagctgtaaaaactaggtgctagtgggcacctaatatcatcatcatatacttattttcaagctaatatgcaaaatcccatctctgtttttaaactaagtgtagatttcagagaaaatattttgtggttcacataagaaaacagtctactcagcttgacaagtgttttatgttaaattggctggtggtttgaaatgaatcatcttcacataatgttttctttaaaaatattgtgaatttaactctaattcttgttattctgtgtgataataaagaataaactaatttcta

SEQ ID NO: 3271 - DNA, 2365 bp, Homo sapiens
  source 1..2365: mol_type = genomic DNA
atgactgagctgaaggcaaagggtccccgggctccccacgtggcgggcggcccgccctcccccgaggtcggatccccactgctgtgtcgcccagccgcaggtccgttcccggggagccagacctcggacaccttgcctgaagtttcggccatacctatctccctggacgggctactcttccctcggccctgccagggacaggacccctccgacgaaaagacgcaggaccagcagtcgctgtcggacgtggagggcgcatattccagagctgaagctacaaggggtgctggaggcagcagttctagtcccccagaaaaggacagcggactgctggacagtgtcttggacactctgttggcgccctcaggtcccgggcagagccaacccagccctcccgcctgcgaggtcaccagctcttggtgcctgtttggccccgaacttcccgaagatccaccggctgcccccgccacccagcgggtgttgtccccgctcatgagccggtccgggtgcaaggttggagacagctccgggacggcagctgcccataaagtgctgccccggggcctgtcaccagcccggcagctgctgctcccggcctctgagagccctcactggtccggggccccagtgaagccgtctccgcaggccgctgcggtggaggttgaggaggaggatggctctgagtccgaggagtctgcgggtccgcttctgaagggcaaacctcgggctctgggtggcgcggcggctggaggaggagccgcggctgtcccgccgggggcggcagcaggaggcgtcgccctggtccccaaggaagattcccgcttctcagcgcccagggtcgccctggtggagcaggacgcgccgatggcgcccgggcgctccccgctggccaccacggtgatggatttcatccacgtgcctatcctgcctctcaatcacgccttattggcagcccgcactcggcagctgctggaagacgaaagttacgacggcggggccggggctgccagcgcctttgccccgccgcggagttcaccctgtgcctcgtccaccccggtcgctgtaggcgacttccccgactgcgcgtacccgcccgacgccgagcccaaggacgacgcgtaccctctctatagcgacttccagccgcccgctctaaagataaaggaggaggaggaaggcgcggaggcctccgcgcgctccccgcgttcctaccttgtggccggtgccaaccccgcagccttcccggatttcccgttggggccaccgcccccgctgccgccgcgagcgaccccatccagacccggggaagcggcggtgacggccgcacccgccagtgcctcagtctcgtctgcgtcctcctcggggtcgaccctggagtgcatcctgtacaaagcggagggcgcgccgccccagcagggcccgttcgcgccgccgccctgcaaggcgccgggcgcgagcggctgcctgctcccgcgggacggcctgccctccacctccgcctctgccgccgccgccggggcggcccccgcgctctaccctgcactcggcctcaacgggctcccgcagctcggctaccaggccgccgtgctcaaggagggcctgccgcaggtctacccgccctatctcaactacctgaggccggattcagaagccagccagagcccacaatacagcttcgagtcattacctcagaagatttgtttaatctgtggggatgaagcatcaggctgtcattatggtgtccttacctgtgggagctgtaaggtcttctttaagagggcaatggaagggcagcacaactacttatgtgctggaagaaatgactgcatcgttgataaaatccgcagaaaaaactgcccagcatgtcgccttagaaagtgctgtcaggctggcatggtccttggaggttttcgaaacttacatattgatgaccagataactctcattcagtattcttggatgagcttaatggtgtttggtctaggatggagatcctacaaacacgtcagtgggcagatgctgtattttgcacctgatctaatactaaatgattcctttggaagggctacgaagtcaaacccagtttgaggagatgaggtcaagctacattagagagctcatcaaggcaattggtttgaggcaaaaaggagttgtgtcgagctcacagcgtttctatcaacttacaaaacttcttgataacttgcatgatcttgtcaaacaacttcatctgtactgcttgaatacatttatccagtcccgggcactgagtgttgaatttccagaaatgatgtctgaagttattgctgcacaattacccaagatattggcagggatggtgaaaccccttctctttcataaaaagtga

SEQ ID NO: 3272 - DNA, 2633 bp, Homo sapiens
  source 1..2633: mol_type = genomic DNA
atgactgagctgaaggcaaagggtccccgggctccccacgtggcgggcggcccgccctcccccgaggtcggatccccactgctgtgtcgcccagccgcaggtccgttcccggggagccagacctcggacaccttgcctgaagtttcggccatacctatctccctggacgggctactcttccctcggccctgccagggacaggacccctccgacgaaaagacgcaggaccagcagtcgctgtcggacgtggagggcgcatattccagagctgaagctacaaggggtgctggaggcagcagttctagtcccccagaaaaggacagcggactgctggacagtgtcttggacactctgttggcgccctcaggtcccgggcagagccaacccagccctcccgcctgcgaggtcaccagctcttggtgcctgtttggccccgaacttcccgaagatccaccggctgcccccgccacccagcgggtgttgtccccgctcatgagccggtccgggtgcaaggttggagacagctccgggacggcagctgcccataaagtgctgccccggggcctgtcaccagcccggcagctgctgctcccggcctctgagagccctcactggtccggggccccagtgaagccgtctccgcaggccgctgcggtggaggttgaggaggaggatggctctgagtccgaggagtctgcgggtccgcttctgaagggcaaacctcgggctctgggtggcgcggcggctggaggaggagccgcggctgtcccgccgggggcggcagcaggaggcgtcgccctggtccccaaggaagattcccgcttctcagcgcccagggtcgccctggtggagcaggacgcgccgatggcgcccgggcgctccccgctggccaccacggtgatggatttcatccacgtgcctatcctgcctctcaatcacgccttattggcagcccgcactcggcagctgctggaagacgaaagttacgacggcggggccggggctgccagcgcctttgccccgccgcggagttcaccctgtgcctcgtccaccccggtcgctgtaggcgacttccccgactgcgcgtacccgcccgacgccgagcccaaggacgacgcgtaccctctctatagcgacttccagccgcccgctctaaagataaaggaggaggaggaaggcgcggaggcctccgcgcgctccccgcgttcctaccttgtggccggtgccaaccccgcagccttcccggatttcccgttggggccaccgcccccgctgccgccgcgagcgaccccatccagacccggggaagcggcggtgacggccgcacccgccagtgcctcagtctcgtctgcgtcctcctcggggtcgaccctggagtgcatcctgtacaaagcggagggcgcgccgccccagcagggcccgttcgcgccgccgccctgcaaggcgccgggcgcgagcggctgcctgctcccgcgggacggcctgccctccacctccgcctctgccgccgccgccggggcggcccccgcgctctaccctgcactcggcctcaacgggctcccgcagctcggctaccaggccgccgtgctcaaggagggcctgccgcaggtctacccgccctatctcaactacctgaggccggattcagaagccagccagagcccacaatacagcttcgagtcattacctcagaagatttgtttaatctgtggggatgaagcatcaggctgtcattatggtgtccttacctgtgggagctgtaaggtcttctttaagagggcaatggaaggtcgaaaatttaaaaagttcaataaagtcagagttgtgagagcactggatgctgttgctctcccacagccagtgggcgttccaaatgaaagccaagccctaagccagagattcactttttcaccaggtcaagacatacagttgattccaccactgatcaacctgttaatgagcattgaaccagatgtgatctatgcaggacatgacaacacaaaacctgacacctccagttctttgctgacaagtcttaatcaactaggcgagaggcaacttctttcagtagtcaagtggtctaaatcattgccaggttttcgaaacttacatattgatgaccagataactctcattcagtattcttggatgagcttaatggtgtttggtctaggatggagatcctacaaacacgtcagtgggcagatgctgtattttgcacctgatctaatactaaatgaatcccacaggagtttgtcaagcttcaagttagccaagaagagttcctctgtatgaaagtattgttacttcttaatacaattcctttggaagggctacgaagtcaaacccagtttgaggagatgaggtcaagctacattagagagctcatcaaggcaattggtttgaggcaaaaaggagttgtgtcgagctcacagcgtttctatcaacttacaaaacttcttgataacttgcatgatcttgtcaaacaacttcatctgtactgcttgaatacatttatccagtcccgggcactgagtgttgaatttccagaaatgatgtctgaagttattgctgcacaattacccaagatattggcagggatggtgaaaccccttctctttcataaaaagtga

SEQ ID NO: 3273 - DNA, 1901 bp, Homo sapiens
  source 1..1901: mol_type = genomic DNA
atttgagtgaaatctacaacccgaggcggctagtgctcccgcactactgggatctgagatcttcggagatgactgtcgcccgcagtacggagccagcagaagtccgacccttcctgggaatgggctgtaccgagaggtccgactagccccagggttttagtgagggggcagtggaactcagcgagggactgagagcttcacagcatgcacgagtttgatgccagagaaaaagtcgggagataaaggagccgcgtgtcactaaattgccgtcgcagccgcagccactcaagtgccggacttgccggattcagaagccagccagagcccacaatacagcttcgagtcattacctcagaagatttgtttaatctgtggggatgaagcatcaggctgtcattatggtgtccttacctgtgggagctgtaaggtcttctttaagagggcaatggaagggcagcacaactacttatgtgctggaagaaatgactgcatcgttgataaaatccgcagaaaaaactgcccagcatgtcgccttagaaagtgctgtcaggctggcatggtccttggaggtcgaaaatttaaaaagttcaataaagtcagagttgtgagagcactggatgctgttgctctcccacagccagtgggcgttccaaatgaaagccaagccctaagccagagattcactttttcaccaggtcaagacatacagttgattccaccactgatcaacctgttaatgagcattgaaccagatgtgatctatgcaggacatgacaacacaaaacctgacacctccagttctttgctgacaagtcttaatcaactaggcgagaggcaacttctttcagtagtcaagtggtctaaatcattgccaggttttcgaaacttacatattgatgaccagataactctcattcagtattcttggatgagcttaatggtgtttggtctaggatggagatcctacaaacacgtcagtgggcagatgctgtattttgcacctgatctaatactaaatgaacagcggatgaaagaatcatcattctattcattatgccttaccatgtggcagatcccacaggagtttgtcaagcttcaagttagccaagaagagttcctctgtatgaaagtattgttacttcttaatacaattcctttggaagggctacgaagtcaaacccagtttgaggagatgaggtcaagctacattagagagctcatcaaggcaattggtttgaggcaaaaaggagttgtgtcgagctcacagcgtttctatcaacttacaaaacttcttgataacttgcatgatcttgtcaaacaacttcatctgtactgcttgaatacatttatccagtcccgggcactgagtgttgaatttccagaaatgatgtctgaagttattgctgcacaattacccaagatattggcagggatggtgaaaccccttctctttcataaaaagtgaatgtcatctttttcttttaaagaattaaattttgtggtatgtctttttgttttggtcaggattatgaggtcttgagtttttataatgttcttctgaaagccttacatttataacatcatagtgtgtaaatttaaaagaaaaattgtgaggttctaattattttcttttataaagtataattagaatgtttaactgttttgtttacccatattttcttgaagaatttacaagattgaaaaagtactaaaattgttaaagtaaactatcttatccatattatttcataccatgtaggtgaggatttttaacttttgcatctaacaaatcatcgacttaagagaaaaaatcttacatgtaataacacaaagctattatatgttatttctaggtaactccctttgtgtcaattatatttccaaaaatgaacctttaaaat

SEQ ID NO: 3274 - DNA, 2750 bp, Homo sapiens
  source 1..2750: mol_type = genomic DNA
atgactgagctgaaggcaaagggtccccgggctccccacgtggcgggcggcccgccctcccccgaggtcggatccccactgctgtgtcgcccagccgcaggtccgttcccggggagccagacctcggacaccttgcctgaagtttcggccatacctatctccctggacgggctactcttccctcggccctgccagggacaggacccctccgacgaaaagacgcaggaccagcagtcgctgtcggacgtggagggcgcatattccagagctgaagctacaaggggtgctggaggcagcagttctagtcccccagaaaaggacagcggactgctggacagtgtcttggacactctgttggcgccctcaggtcccgggcagagccaacccagccctcccgcctgcgaggtcaccagctcttggtgcctgtttggccccgaacttcccgaagatccaccggctgcccccgccacccagcgggtgttgtccccgctcatgagccggtccgggtgcaaggttggagacagctccgggacggcagctgcccataaagtgctgccccggggcctgtcaccagcccggcagctgctgctcccggcctctgagagccctcactggtccggggccccagtgaagccgtctccgcaggccgctgcggtggaggttgaggaggaggatggctctgagtccgaggagtctgcgggtccgcttctgaagggcaaacctcgggctctgggtggcgcggcggctggaggaggagccgcggctgtcccgccgggggcggcagcaggaggcgtcgccctggtccccaaggaagattcccgcttctcagcgcccagggtcgccctggtggagcaggacgcgccgatggcgcccgggcgctccccgctggccaccacggtgatggatttcatccacgtgcctatcctgcctctcaatcacgccttattggcagcccgcactcggcagctgctggaagacgaaagttacgacggcggggccggggctgccagcgcctttgccccgccgcggagttcaccctgtgcctcgtccaccccggtcgctgtaggcgacttccccgactgcgcgtacccgcccgacgccgagcccaaggacgacgcgtaccctctctatagcgacttccagccgcccgctctaaagataaaggaggaggaggaaggcgcggaggcctccgcgcgctccccgcgttcctaccttgtggccggtgccaaccccgcagccttcccggatttcccgttggggccaccgcccccgctgccgccgcgagcgaccccatccagacccggggaagcggcggtgacggccgcacccgccagtgcctcagtctcgtctgcgtcctcctcggggtcgaccctggagtgcatcctgtacaaagcggagggcgcgccgccccagcagggcccgttcgcgccgccgccctgcaaggcgccgggcgcgagcggctgcctgctcccgcgggacggcctgccctccacctccgcctctgccgccgccgccggggcggcccccgcgctctaccctgcactcggcctcaacgggctcccgcagctcggctaccaggccgccgtgctcaaggagggcctgccgcaggtctacccgccctatctcaactacctgaggccggattcagaagccagccagagcccacaatacagcttcgagtcattacctcagaagatttgtttaatctgtggggatgaagcatcaggctgtcattatggtgtccttacctgtgggagctgtaaggtcttctttaagagggcaatggaagggcagcacaactacttatgtgctggaagaaatgactgcatcgttgataaaatccgcagaaaaaactgcccagcatgtcgccttagaaagtgctgtcaggctggcatggtccttggaggtcgaaaatttaaaaagttcaataaagtcagagttgtgagagcactggatgctgttgctctcccacagccagtgggcgttccaaatgaaagccaagccctaagccagagattcactttttcaccaggtcaagacatacagttgattccaccactgatcaacctgttaatgagcattgaaccagatgtgatctatgcaggacatgacaacacaaaacctgacacctccagttctttgctgacaagtcttaatcaactaggcgagaggcaacttctttcagtagtcaagtggtctaaatcattgccaggttttcgaaacttacatattgatgaccagataactctcattcagtattcttggatgagcttaatggtgtttggtctaggatggagatcctacaaacacgtcagtgggcagatgctgtattttgcacctgatctaatactaaatgaatcccacaggagtttgtcaagcttcaagttagccaagaagagttcctctgtatgaaagtattgttacttcttaatacaattcctttggaagggctacgaagtcaaacccagtttgaggagatgaggtcaagctacattagagagctcatcaaggcaattggtttgaggcaaaaaggagttgtgtcgagctcacagcgtttctatcaacttacaaaacttcttgataacttgcatgatcttgtcaaacaacttcatctgtactgcttgaatacatttatccagtcccgggcactgagtgttgaatttccagaaatgatgtctgaagttattgctgcacaattacccaagatattggcagggatggtgaaaccccttctctttcataaaaagtga

SEQ ID NO: 3275 - DNA, 2816 bp, Homo sapiens
  source 1..2816: mol_type = genomic DNA
agtccacagctgtcactaatcggggtaagccttgttgtatttgtgcgtgtgggtggcattctcaatgagaactagcttcacttgtcatttgagtgaaatctacaacccgaggcggctagtgctcccgcactactgggatctgagatcttcggagatgactgtcgcccgcagtacggagccagcagaagtccgacccttcctgggaatgggctgtaccgagaggtccgactagccccagggttttagtgagggggcagtggaactcagcgagggactgagagcttcacagcatgcacgagtttgatgccagagaaaaagtcgggagataaaggagccgcgtgtcactaaattgccgtcgcagccgcagccactcaagtgccggacttgtgagtactctgcgtctccagtcctcggacagaagttggagaactctcttggagaactccccgagttaggagacgagatctcctaacaattactactttttcttgcgctccccacttgccgctcgctgggacaaacgacagccacagttcccctgacgacaggatggaggccaagggcaggagctgaccagcgccgccctcccccgcccccgacccaggaggtggagatccctccggtccagccacattcaacacccactttctcctccctctgcccctatattcccgaaaccccctcctccttcccttttccctcctcctggagacgggggaggagaaaaggggagtccagtcgtcatgactgagctgaaggcaaagggtccccgggctccccacgtggcgggcggcccgccctcccccgaggtcggatccccactgctgtgtcgcccagccgcaggtccgttcccggggagccagacctcggacaccttgcctgaagtttcggccatacctatctccctggacgggctactcttccctcggccctgccagggacaggacccctccgacgaaaagacgcaggaccagcagtcgctgtcggacgtggagggcgcatattccagagctgaagctacaaggggtgctggaggcagcagttctagtcccccagaaaaggacagcggactgctggacagtgtcttggacactctgttggcgccctcaggtcccgggcagagccaacccagccctcccgcctgcgaggtcaccagctcttggtgcctgtttggccccgaacttcccgaagatccaccggctgcccccgccacccagcgggtgttgtccccgctcatgagccggtccgggtgcaaggttggagacagctccgggacggcagctgcccataaagtgctgccccggggcctgtcaccagcccggcagctgctgctcccggcctctgagagccctcactggtccggggccccagtgaagccgtctccgcaggccgctgcggtggaggttgaggaggaggatggctctgagtccgaggagtctgcgggtccgcttctgaagggcaaacctcgggctctgggtggcgcggcggctggaggaggagccgcggctgtcccgccgggggcggcagcaggaggcgtcgccctggtccccaaggaagattcccgcttctcagcgcccagggtcgccctggtggagcaggacgcgccgatggcgcccgggcgctccccgctggccaccacggtgatggatttcatccacgtgcctatcctgcctctcaatcacgccttattggcagcccgcactcggcagctgctggaagacgaaagttacgacggcggggccggggctgccagcgcctttgccccgccgcggagttcaccctgtgcctcgtccaccccggtcgctgtaggcgacttccccgactgcgcgtacccgcccgacgccgagcccaaggacgacgcgtaccctctctatagcgacttccagccgcccgctctaaagataaaggaggaggaggaaggcgcggaggcctccgcgcgctccccgcgttcctaccttgtggccggtgccaaccccgcagccttcccggatttcccgttggggccaccgcccccgctgccgccgcgagcgaccccatccagacccggggaagcggcggtgacggccgcacccgccagtgcctcagtctcgtctgcgtcctcctcggggtcgaccctggagtgcatcctgtacaaagcggagggcgcgccgccccagcagggcccgttcgcgccgccgccctgcaaggcgccgggcgcgagcggctgcctgctcccgcgggacggcctgccctccacctccgcctctgccgccgccgccggggcggcccccgcgctctaccctgcactcggcctcaacgggctcccgcagctcggctaccaggccgccgtgctcaaggagggcctgccgcaggtctacccgccctatctcaactacctgaggccggattcagaagccagccagagcccacaatacagcttcgagtcattacctcagaagatttgtttaatctgtggggatgaagcatcaggctgtcattatggtgtccttacctgtgggagctgtaaggtcttctttaagagggcaatggaagggcagcacaactacttatgtgctggaagaaatgactgcatcgttgataaaatccgcagaaaaaactgcccagcatgtcgccttagaaagtgctgtcaggctggcatggtccttggaggttttcgaaacttacatattgatgaccagataactctcattcagtattcttggatgagcttaatggtgtttggtctaggatggagatcctacaaacacgtcagtgggcagatgctgtattttgcacctgatctaatactaaatgaggaaagtattgttacttcttaa

SEQ ID NO: 3276 - DNA, 3602 bp, Homo sapiens
  source 1..3602: mol_type = genomic DNA
agctccggctccgccgccacgattggccagccgaccacccggcctcggccaataagcgccgccctctcgcccccgtgttactgggtagaagaaaacaaaaacaaacagagcgagaagggccagagactctccgaggcggcggcagagacagaagagcggggtcggggccggctgaccaggaacctgggcgagcagcggcgggggcccgagggattctgaaggaagatttccattaggtaatttgtttaatcagtgcaagcgaaattaagggaaaatggatgtagaaaatgagcagatactgaatgtaaaccctgcagatcctgataacttaagtgactctctcttttccggtgatgaagaaaatgctgggactgaggaaataaagaatgaaataaatggaaattggatttcagcatcctccattaacgaagctagaattaatgccaaggcaaaaaggcgactaaggaaaaactcatcccgggactctggcagaggcgattcggtcagcgacagtgggagtgacgcccttagaagtggattaactgtgccaaccagtccaaagggaaggttgctggataggcgatccagatctgggaaaggaaggggactaccaaagaaaggtggtgcaggaggcaaaggtgtctggggtacacctggacaggtgtatgatgtggaggaggtggatgtgaaagatcctaactatgatgatgaccaggagaactgtgtttatgaaactgtagttttgcctttggatgaaagggcatttgagaagactttaacaccaatcatacaggaatattttgagcatggagatactaatgaagttgcggaaatgttaagagatttaaatcttggtgaaatgaaaagtggagtaccagtgttggcagtatccttagcattggaggggaaggctagtcatagagagatgacatctaagcttctttctgacctttgtgggacagtaatgagcacaactgatgtggaaaaatcatttgataaattgttgaaagatctacctgaattagcactggatactcctagagcaccacagttggtgggccagtttattgctagagctgttggagatggaattttatgtaatacctatattgatagttacaaaggaactgtagattgtgtgcaggctagagctgctctggataaggctaccgtgcttctgagtatgtctaaaggtggaaagcgtaaagatagtgtgtggggctctggaggtgggcagcaatctgtcaatcaccttgttaaagagattgatatgctgctgaaagaatatttactctctggagacatatctgaagctgaacattgccttaaggaactggaagtacctcattttcaccatgagcttgtatatgaagctattataatggttttagagtcaactggagaaagtacatttaagatgattttggatttattaaagtccctttggaagtcttctaccattactgtagaccaaatgaaaagaggttatgagagaatttacaatgaaattccggacattaatctggatgtcccacattcatactctgtgctggagcggtttgtagaagaatgttttcaggctggaataatttccaaacaactcagagatctttgtccttcaaggggcagaaagcgttttgtaagcgaaggagatggaggtcgtcttaaaccagagagctactgaatataagaactcttgcagtcttagatgttataaaaatatatatctgaattgtaagagttgttagcacaagttttttttttttttttttttaagcacttgttttgggtacaaggcatttctgacattttataaacctacatttaaggggaatttttaaaggaaatgttttttcttttttttttgtttttcgagggggcaaggagggacagaaaagtaacctcttcttaagtggaatattctaataagctaccttttgtaagtgccatgtttattatctaatcattccaagttttgcattgatgtctgactgccactcctttctttcaaggacagtgttttttgtagtaaaatcactggtttatacaaagctttatttagggggtaaagttaagctgctaaaaccccatgttggctgctgctgttgagatactgtgctttgggagtaaaaaaagaaagttatttctttgtcttaaagaatttttaaaaaattagtcatgagacttattcatctttccagggaacatactgattggtcttaaaagactagacagttaagtaaaaggtggctggaacatctatttttctacaaaactggaaaaatgaacctggttctagaagaatgtacaccaaaataaaacatgtgaagcagtattgattctttattgggagtacatttttttaggtctcttaaactttaatttcacacagtaaattttgaatctcataaggaagcatatttgaacctagtcaatttaatcttagtgttcccttgaaaactttttttccctacaaaattttaagtgaaaaatacaatagtaaattaagattacactggggaaaaaaatgcaggtatcactttactccattgttatctgacctagagcttaattaagttttagaaatatgtaataccttccatcattccatcatccttaaattctgttaccaaataatggctaatgttacaaaaagttatactccagagacccaaagcttgacatttacctaatgtatgagaaaatattaccaattaacaataaagaatgatcatatttttaacctcttttacatagcctaataactcagcaaggcctcaacgtctgtgctaatttaaactgccaaatattgactgcagcaaacaagaattatattcagaatttatgagggtactgttaggagtatactgcttacaggtttagatatagtctgttagaattaaaaccaagtttagtgttcatatttacctcatgggctttatcaagcccatattacctcagcttatatatagttaccatttttaggtttttaattgtttgacacttggatgataaatgcagtcattttattctcaagtgcttaaaattaatgtaattaaaagcttagctgactacagaataggtgagggtttcttaaaaatgagatttaagggctgggcacggtggctcatgcctgtaatcccagcactttgggaggccgaggtgggcggatcacttgaggttgggagttcatgaccagcttgaccaacatgaagaaaccctgtctctattaaaaatacaaaagtagccaggcatggtggcgcatgcgtgtaatcccagctacttgggaggctgaggcaggagaattgcttgaacctgggaggcagaggttgcagtgagtcgagatggtgccattgctctcgtttgggcaacaagagtgaaactcttgtctcaaaaaaaaaaaaaaatgaggtttaagacagttttgtcattactggtgggatctggtcacacaagatagcattaaacgtgacatggcacataaaattggttaaaaaattttgttttttaattacgtaatgtaaaagcccaacaaacactttatgcaagattggaatgtatcttcaaattcagatttaataaacatgtaaagatcctctgta

SEQ ID NO: 3277 - DNA, 3654 bp, Homo sapiens
  source 1..3654: mol_type = genomic DNA
cgaccacccggcctcggccaataagcgccgccctctcgcccccgtgttactgggtagaagaaaacaaaaacaaacagagcgagaagggccagagactctccgaggcggcggcagagacagaagagcggggtcggggccggctgaccaggaacctgggcgagcagcggcgggggcccgagggattctgaaggaagatttccattaggtaatttgtttaatcagtgcaagcgaaattaagggaaaatggatgtagaaaatgagcagatactgaatgtaaaccctgcagggtattttccctaattctccatggtgcttcaatagcatgttattatcataaaaatgaacagttttgtggaatagatgaccaaatatcctgataacttaagtgactctctcttttccggtgatgaagaaaatgctgggactgaggaaataaagaatgaaataaatggaaattggatttcagcatcctccattaacgaagctagaattaatgccaaggcaaaaaggcgactaaggaaaaactcatcccgggactctggcagaggcgattcggtcagcgacagtgggagtgacgcccttagaagtggattaactgtgccaaccagtccaaagggaaggttgctggataggcgatccagatctgggaaaggaaggggactaccaaagaaaggtggtgcaggaggcaaaggtgtctggggtacacctggacaggtgtatgatgtggaggaggtggatgtgaaagatcctaactatgatgatgaccaggagaactgtgtttatgaaactgtagttttgcctttggatgaaagggcatttgagaagactttaacaccaatcatacaggaatattttgagcatggagatactaatgaagttgcggaaatgttaagagatttaaatcttggtgaaatgaaaagtggagtaccagtgttggcagtatccttagcattggaggggaaggctagtcatagagagatgacatctaagcttctttctgacctttgtgggacagtaatgagcacaactgatgtggaaaaatcatttgataaattgttgaaagatctacctgaattagcactggatactcctagagcaccacagttggtgggccagtttattgctagagctgttggagatggaattttatgtaatacctatattgatagttacaaaggaactgtagattgtgtgcaggctagagctgctctggataaggctaccgtgcttctgagtatgtctaaaggtggaaagcgtaaagatagtgtgtggggctctggaggtgggcagcaatctgtcaatcaccttgttaaagagattgatatgctgctgaaagaatatttactctctggagacatatctgaagctgaacattgccttaaggaactggaagtacctcattttcaccatgagcttgtatatgaagctattataatggttttagagtcaactggagaaagtacatttaagatgattttggatttattaaagtccctttggaagtcttctaccattactgtagaccaaatgaaaagaggttatgagagaatttacaatgaaattccggacattaatctggatgtcccacattcatactctgtgctggagcggtttgtagaagaatgttttcaggctggaataatttccaaacaactcagagatctttgtccttcaaggggcagaaagcgttttgtaagcgaaggagatggaggtcgtcttaaaccagagagctactgaatataagaactcttgcagtcttagatgttataaaaatatatatctgaattgtaagagttgttagcacaagttttttttttttttttttttaagcacttgttttgggtacaaggcatttctgacattttataaacctacatttaaggggaatttttaaaggaaatgttttttcttttttttttgtttttcgagggggcaaggagggacagaaaagtaacctcttcttaagtggaatattctaataagctaccttttgtaagtgccatgtttattatctaatcattccaagttttgcattgatgtctgactgccactcctttctttcaaggacagtgttttttgtagtaaaatcactggtttatacaaagctttatttagggggtaaagttaagctgctaaaaccccatgttggctgctgctgttgagatactgtgctttgggagtaaaaaaagaaagttatttctttgtcttaaagaatttttaaaaaattagtcatgagacttattcatctttccagggaacatactgattggtcttaaaagactagacagttaagtaaaaggtggctggaacatctatttttctacaaaactggaaaaatgaacctggttctagaagaatgtacaccaaaataaaacatgtgaagcagtattgattctttattgggagtacatttttttaggtctcttaaactttaatttcacacagtaaattttgaatctcataaggaagcatatttgaacctagtcaatttaatcttagtgttcccttgaaaactttttttccctacaaaattttaagtgaaaaatacaatagtaaattaagattacactggggaaaaaaatgcaggtatcactttactccattgttatctgacctagagcttaattaagttttagaaatatgtaataccttccatcattccatcatccttaaattctgttaccaaataatggctaatgttacaaaaagttatactccagagacccaaagcttgacatttacctaatgtatgagaaaatattaccaattaacaataaagaatgatcatatttttaacctcttttacatagcctaataactcagcaaggcctcaacgtctgtgctaatttaaactgccaaatattgactgcagcaaacaagaattatattcagaatttatgagggtactgttaggagtatactgcttacaggtttagatatagtctgttagaattaaaaccaagtttagtgttcatatttacctcatgggctttatcaagcccatattacctcagcttatatatagttaccatttttaggtttttaattgtttgacacttggatgataaatgcagtcattttattctcaagtgcttaaaattaatgtaattaaaagcttagctgactacagaataggtgagggtttcttaaaaatgagatttaagggctgggcacggtggctcatgcctgtaatcccagcactttgggaggccgaggtgggcggatcacttgaggttgggagttcatgaccagcttgaccaacatgaagaaaccctgtctctattaaaaatacaaaagtagccaggcatggtggcgcatgcgtgtaatcccagctacttgggaggctgaggcaggagaattgcttgaacctgggaggcagaggttgcagtgagtcgagatggtgccattgctctcgtttgggcaacaagagtgaaactcttgtctcaaaaaaaaaaaaaaatgaggtttaagacagttttgtcattactggtgggatctggtcacacaagatagcattaaacgtgacatggcacataaaattggttaaaaaattttgttttttaattacgtaatgtaaaagcccaacaaacactttatgcaagattggaatgtatcttcaaattcagatttaataaacatgtaaagatcctctgt

SEQ ID NO: 3278 - DNA, 819 bp, Homo sapiens
  source 1..819: mol_type = genomic DNA
cagaagagcggggtcggggccggctgaccaggaacctgggcgagcagcggcgggggcccgagggattctgaaggaagatttccattaggtaatttgtttaatcagtgcaagcgaaattaagggaaaatggatgtagaaaatgagcagatactgaatgtaaaccctgcagaaaatgctgggactgaggaaataaagaatgaaataaatggaaattggatttcagcatcctccattaacgaagctagaattaatgccaaggcaaaaaggcgactaaggaaaaactcatcccgggactctggcagaggcgattcggtcagcgacagtgggagtgacgcccttagaagtggattaactgtgccaaccagtccaaagggaaggttgctggataggcgatccagatctgggaaaggaaggggactaccaaagaaaggtggtgcaggaggcaaaggtgtctggggtacacctggacaggtgtatgatgtggaggaggtggatgtgaaagatcctaactatgatgatgaccaggagaactgtgtttatgaaactgtagttttgcctttggatgaaagggcatttgagaagactttaacaccaatcatacaggaatattttgagcatggagatactaatgaagttgcggaaatgttaagagatttaaatcttggtgaaatgaaaagtggagtaccagtgttggcagtatccttagcattggaggggaaggctagtcatagagagatgacatctaagcttctttctgacctttgtgggacagtaatgagcacaactgatgtggaaaaatcatttgataaattgttgaaa

SEQ ID NO: 3279 - DNA, 1344 bp, Homo sapiens
  source 1..1344: mol_type = genomic DNA
gggctggacagcgtggtgacgtcgcaacgcggcgcagggtgagagcgcgcgcttgcggacgcggcggcattaaacggttgcaggcgtagcagagtggtcgttgtctttctaggtctcagccggtcgtcgcgacgttcgcccgctcgctctgaggctcctgaagccgaaaccagctagactttcctccttcccgcctgcctgtagcggcgttgttgccactccgccaccatgttcgaggcgcgcctggtccagggctccatcctcaagaaggtgttggaggcactcaaggacctcatcaacgaggcctgctgggatattagctccagcggtgtaaacctgcagagcatggactcgtcccacgtctctttggtgcagctcaccctgcggtctgagggcttcgacacctaccgctgcgaccgcaacctggccatgggcgtgaacctcaccagtatgtccaaaatactaaaatgcgccggcaatgaagatatcattacactaagggccgaagataacgcggataccttggcgctagtatttgaagcaccaaaccaggagaaagtttcagactatgaaatgaagttgatggatttagatgttgaacaacttggaattccagaacaggagtacagctgtgtagtaaagatgccttctggtgaatttgcacgtatatgccgagatctcagccatattggagatgctgttgtaatttcctgtgcaaaagacggagtgaaattttctgcaagtggagaacttggaaatggaaacattaaattgtcacagacaagtaatgtcgataaagaggaggaagctgttaccatagagatgaatgaaccagttcaactaacttttgcactgaggtacctgaacttctttacaaaagccactccactctcttcaacggtgacactcagtatgtctgcagatgtaccccttgttgtagagtataaaattgcggatatgggacacttaaaatactacttggctcccaagatcgaggatgaagaaggatcttaggcattcttaaaattcaagaaaataaaactaagctctttgagaactgcttctaagatgccagcatatactgaagtcttttctgtcaccaaatttgtacctctaagtacatatgtagatattgttttctgtaaataacctatttttttctctattctctgcaatttgtttaaagaataaagtccaaagtcagatctggtctagttaacctagaagtatttttgtctcttagaaatacttgtgatttttataatacaaaagggtcttgactctaaatgcagttttaagaattgtttttgaatttaaataaagttacttgaatttcaaacatca

SEQ ID NO: 3280 - DNA, 1359 bp, Homo sapiens
  source 1..1359: mol_type = genomic DNA
ccgcggatggccggagctggcgccctggttctggaggtaaccggttactgagggcgagaagcgccacccggaggctctagcctgacaaatgcttgctgacctgggccagagctcttcccttacgcaagtctcagccggtcgtcgcgacgttcgcccgctcgctctgaggctcctgaagccgaaaccagctagactttcctccttcccgcctgcctgtagcggcgttgttgccactccgccaccatgttcgaggcgcgcctggtccagggctccatcctcaagaaggtgttggaggcactcaaggacctcatcaacgaggcctgctgggatattagctccagcggtgtaaacctgcagagcatggactcgtcccacgtctctttggtgcagctcaccctgcggtctgagggcttcgacacctaccgctgcgaccgcaacctggccatgggcgtgaacctcaccagtatgtccaaaatactaaaatgcgccggcaatgaagatatcattacactaagggccgaagataacgcggataccttggcgctagtatttgaagcaccaaaccaggagaaagtttcagactatgaaatgaagttgatggatttagatgttgaacaacttggaattccagaacaggagtacagctgtgtagtaaagatgccttctggtgaatttgcacgtatatgccgagatctcagccatattggagatgctgttgtaatttcctgtgcaaaagacggagtgaaattttctgcaagtggagaacttggaaatggaaacattaaattgtcacagacaagtaatgtcgataaagaggaggaagctgttaccatagagatgaatgaaccagttcaactaacttttgcactgaggtacctgaacttctttacaaaagccactccactctcttcaacggtgacactcagtatgtctgcagatgtaccccttgttgtagagtataaaattgcggatatgggacacttaaaatactacttggctcccaagatcgaggatgaagaaggatcttaggcattcttaaaattcaagaaaataaaactaagctctttgagaactgcttctaagatgccagcatatactgaagtcttttctgtcaccaaatttgtacctctaagtacatatgtagatattgttttctgtaaataacctatttttttctctattctctgcaatttgtttaaagaataaagtccaaagtcagatctggtctagttaacctagaagtatttttgtctcttagaaatacttgtgatttttataatacaaaagggtcttgactctaaatgcagttttaagaattgtttttgaatttaaataaagttacttgaatttcaaacatca

SEQ ID NO: 3281 - DNA, 1767 bp, Homo sapiens
  source 1..1767: mol_type = genomic DNA
attcggctgcccccaaggccaggcatccagtgtgcttagtgctgagcagggtttcagagctcacccccaggagggtgcagacctcagccaaggtcgcagagcagaggagacccgtgggctgggattccacctgtgcccaccctggcagcatcccacctcctgagtcctctcggcacccagcaaggttgaagttcatgagttcgcccagcctcagtgacctgggcaagagagagccggccgccgccgcggacgagcggggcacgcagcagcgccgggcctgcgccaacgccacctggaacagcatccacaacggggtgatcgccgtcttccagcgcaaggggctgcccgaccaggagctcttcagcctcaacgagggcgtccggcagctgttgaagacagagctggggtccttcttcacggagtacctgcagaaccagctgctgacaaaaggcatggtgatccttcgggacaagattcgcttctatgagggacagaagctgctggactcactggcagagacctgggacttcttcttcagtgacgtgctgcccatgctgcaggccatcttctacccggtgcagggcaaggagccatcggtgcgccagctggccctgctgcacttccggaatgccatcaccctcagtgtgaagctagaggatgcgctggcccgggcccatgcccgtgtgccccctgccatcgtgcagatgctgctggtgctgcagggggtacatgagtccaggggcgtgactgaggactacctgcgcctggagacgctggtccagaaggtggtgtcgccatacctgggcacctacggcctccactccagcgaggggcccttcacccattcctgcatcctggaaaagcgcctcctccgccgctcccgctcgggggacgtgctggccaagaaccctgtggtgcgctccaagagctacaacacgcctctgctgaaccccgtgcaggagcacgaggcggagggcgcggcggccggcggtaccagcatccgcaggcactctgtgtcggagatgacgtcctgccccgagcctcagggcttctccgacccgcccggccagggccccaccgggaccttcaggtcctccccggcgccccactcagggccctgccccagcagactgtaccccacgacccagccccctgagcagggcttggatcccacccgcagctccctgccccgctccagcccggagaacctggtggaccagatcctggagtccgtggactcggattctgaagggattttcattgactttggccggggccggggctctggcatgtccgacttggagggctctgggggccggcagagtgtcgtgtgaggcctcacagctggccttgagtttttactgacacgtccctgtgtgcgggggtgtccatgtggcgtgtgtgtgagtgagacttttttactgcgtcccgtcccgccagccctatcggcctcgtcactggccttggtcactttgtatttctgtcttggttggaaataccatcagccttccttgctcggcccaggtctgtttcaggcatctgagtcggcgtttacccaggggccgggccagagacgggggtcggccgctcgctcccacgctcctcctgccccagccctctggtgtccacacctgcccacagagaatgtaaacccagtgggctctgcccacgccgggccccaaagtgaccagactccagcacacctgtctcctcctgcctggggtggccatggggatggaagggggtggaataaaacctgtcaacctg

SEQ ID NO: 3282 - DNA, 1878 bp, Homo sapiens
  source 1..1878: mol_type = genomic DNA
gcccccggcctccgtttgcgccgggtctgtgctggccgcgcgcctggcgctccacgctgagcctctccgtgcaatgattaacccggcggggcggccggcgcgggacccgagacggaggcgcggggccggggcgggaccccgcaggaccgctcggcttcctgctctcgccggagtttccgcgtagagggcgcatcgccggcccggggcccttggtgcggcgtggcgcagggcgcggcgtggggcgcgcgtgggcgcggcgcaggcggcccgggtcaccatgaggactctccgcaggttgaagttcatgagttcgcccagcctcagtgacctgggcaagagagagccggccgccgccgcggacgagcggggcacgcagcagcgccgggcctgcgccaacgccacctggaacagcatccacaacggggtgatcgccgtcttccagcgcaaggggctgcccgaccaggagctcttcagcctcaacgagggcgtccggcagctgttgaagacagagctggggtccttcttcacggagtacctgcagaaccagctgctgacaaaaggcatggtgatccttcgggacaagattcgcttctatgagggacagaagctgctggactcactggcagagacctgggacttcttcttcagtgacgtgctgcccatgctgcaggccatcttctacccggtgcagggcaaggagccatcggtgcgccagctggccctgctgcacttccggaatgccatcaccctcagtgtgaagctagaggatgcgctggcccgggcccatgcccgtgtgccccctgccatcgtgcagatgctgctggtgctgcagggggtacatgagtccaggggcgtgactgaggactacctgcgcctggagacgctggtccagaaggtggtgtcgccatacctgggcacctacggcctccactccagcgaggggcccttcacccattcctgcatcctggaaaagcgcctcctccgccgctcccgctcgggggacgtgctggccaagaaccctgtggtgcgctccaagagctacaacacgcctctgctgaaccccgtgcaggagcacgaggcggagggcgcggcggccggcggtaccagcatccgcaggcactctgtgtcggagatgacgtcctgccccgagcctcagggcttctccgacccgcccggccagggccccaccgggaccttcaggtcctccccggcgccccactcagggccctgccccagcagactgtaccccacgacccagccccctgagcagggcttggatcccacccgcagctccctgccccgctccagcccggagaacctggtggaccagatcctggagtccgtggactcggattctgaagggattttcattgactttggccggggccggggctctggcatgtccgacttggagggctctgggggccggcagagtgtcgtgtgaggcctcacagctggccttgagtttttactgacacgtccctgtgtgcgggggtgtccatgtggcgtgtgtgtgagtgagacttttttactgcgtcccgtcccgccagccctatcggcctcgtcactggccttggtcactttgtatttctgtcttggttggaaataccatcagccttccttgctcggcccaggtctgtttcaggcatctgagtcggcgtttacccaggggccgggccagagacgggggtcggccgctcgctcccacgctcctcctgccccagccctctggtgtccacacctgcccacagagaatgtaaacccagtgggctctgcccacgccgggccccaaagtgaccagactccagcacacctgtctcctcctgcctggggtggccatggggatggaagggggtggaataaaacctgtcaacctgg

SEQ ID NO: 3283 - DNA, 905 bp, Homo sapiens
  source 1..905: mol_type = genomic DNA
ctccgcggccccctcccccggccccgggctccggctccggctccggctctggctctgcgcggtggcagcggcggcggcggcgcggggaccgaggttgaagttcatgagttcgcccagcctcagtgacctgggcaagagagagccggccgccgccgcggacgagcggggcacgcagcagcgccgggcctgcgccaacgccacctggaacagcatccacaacggggtgatcgccgtcttccagcgcaaggggctgcccgaccaggagctcttcagcctcaacgagggcgtccggcagctgttgaagacagagctggggtccttcttcacggagtacctgcagaaccagctgctgacaaaaggcatggtgatccttcgggacaagattcgcttctatgagggacagaagctgctggactcactggcagagacctgggacttcttcttcagtgacgtgctgcccatgctgcaggccatcttctacccggtgcagggcaaggagccatcggtgcgccagctggccctgctgcacttccggaatgccatcaccctcagtgtgaagctagaggatgcgctggcccgggcccatgcccgtgtgccccctgccatcgtgcagatgctgctggtgctgcagggggtacatgagtccaggggcgtgactgaggactacctgcgcctggagacgctggtccagaaggtggtgtcgccatacctgggcacctacggcctccactccagcgaggggcccttcacccattcctgcatcctggaaaagcgcctcctccgccgctcccgctcgggggacgtgctggccaagaaccctgtggtgcgctccaagagctacaacacgcctctgctgaaccccgtgcaggagcacgaggcggagggcgcggcggccggcggtacca

SEQ ID NO: 3284 - DNA, 881 bp, Homo sapiens
  source 1..881: mol_type = genomic DNA
ccgggtctgtgctggccgcgcgcctggcgctccacgctgagcctctccgtgcaatgattaacccggcggggcggccggcgcgggacccgagacggaggcgcggggccggggcgggaccccgcaggaccgctcggcttcctgctctcgccggagtttccgcgtagagggcgcatcgccggcccggggcccttggttgaagttcatgagttcgcccagcctcagtgacctgggcaagagagagccggccgccgccgcggacgagcggggcacgcagcagcgccgggcctgcgccaacgccacctggaacagcatccacaacggggtgatcgccgtcttccagcgcaaggggctgcccgaccaggagctcttcagcctcaacgagggcgtccggcagctgttgaagacagagctggggtccttcttcacggagtacctgcagaaccagctgctgacaaaaggcatggtgatccttcgggacaagattcgcttctatgagggacagaagctgctggactcactggcagagacctgggacttcttcttcagtgacgtgctgcccatgctgcaggccatcttctacccggtgcagggcaaggagccatcggtgcgccagctggccctgctgcacttccggaatgccatcaccctcagtgtgaagctagaggatgcgctggcccgggcccatgcccgtgtgccccctgccatcgtgcagatgctgctggtgctgcagggggtacatgagtccaggggcgtgactgaggactacctgcgcctggagacgctggtccagaaggtggtgtcgccatacctgggcacctacggcctccactccagcgaggggcccttcacccattcctgcatcctggaaaagcgcctcctcc

SEQ ID NO: 3285 - DNA, 2279 bp, Homo sapiens
  source 1..2279: mol_type = genomic DNA
agtgtgcttagtgctgagcagggtttcagagctcacccccaggagggtgcagacctcagccaaggtcgcagagcagaggagacccgtgggctgggattccacctgtgcccaccctggcagcatcccacctcctgagtcctctcggcacccagcaagagtcccttcagtgacttcgagcgtgcattgagagcccagtaacactggggggcaactgccacaaagacacagcctcagccaggcgcagtgactcatgcctgtaatcccagcaccttgggaggccaaggcttgtggatcacctgaggtcaggagtttgagaccagccggaccaacatggagaaaccccatctctactaaaaatacaaaaaaattagctaggcattgtggcgcatgcctgtaatcccggctactcgggaggctgagggaggagaagcacttgaacccaggaggcgcggttgcagtgagccgagatcgccccattgcactccagcctgggcaacaagagcgaaactccatctcaaaataataataataacaataatagtaagactcagcctccccgctctgggacactcagtctgatggggcaggctggtcagaagacatagagccatggtgtgtttggaactttcacagagggaagcctggggctcgggaagcccggaaaagatgccggcgcagcctgagggcttgtacaggttgaagttcatgagttcgcccagcctcagtgacctgggcaagagagagccggccgccgccgcggacgagcggggcacgcagcagcgccgggcctgcgccaacgccacctggaacagcatccacaacggggtgatcgccgtcttccagcgcaaggggctgcccgaccaggagctcttcagcctcaacgagggcgtccggcagctgttgaagacagagctggggtccttcttcacggagtacctgcagaaccagctgctgacaaaaggcatggtgatccttcgggacaagattcgcttctatgagggacagaagctgctggactcactggcagagacctgggacttcttcttcagtgacgtgctgcccatgctgcaggccatcttctacccggtgcagggcaaggagccatcggtgcgccagctggccctgctgcacttccggaatgccatcaccctcagtgtgaagctagaggatgcgctggcccgggcccatgcccgtgtgccccctgccatcgtgcagatgctgctggtgctgcagggggtacatgagtccaggggcgtgactgaggactacctgcgcctggagacgctggtccagaaggtggtgtcgccatacctgggcacctacggcctccactccagcgaggggcccttcacccattcctgcatcctggaaaagcgcctcctccgccgctcccgctcgggggacgtgctggccaagaaccctgtggtgcgctccaagagctacaacacgcctctgctgaaccccgtgcaggagcacgaggcggagggcgcggcggccggcggtaccagcatccgcaggcactctgtgtcggagatgacgtcctgccccgagcctcagggcttctccgacccgcccggccagggccccaccgggaccttcaggtcctccccggcgccccactcagggccctgccccagcagactgtaccccacgacccagccccctgagcagggcttggatcccacccgcagctccctgccccgctccagcccggagaacctggtggaccagatcctggagtccgtggactcggattctgaagggattttcattgactttggccggggccggggctctggcatgtccgacttggagggctctgggggccggcagagtgtcgtgtgaggcctcacagctggccttgagtttttactgacacgtccctgtgtgcgggggtgtccatgtggcgtgtgtgtgagtgagacttttttactgcgtcccgtcccgccagccctatcggcctcgtcactggccttggtcactttgtatttctgtcttggttggaaataccatcagccttccttgctcggcccaggtctgtttcaggcatctgagtcggcgtttacccaggggccgggccagagacgggggtcggccgctcgctcccacgctcctcctgccccagccctctggtgtccacacctgcccacagagaatgtaaacccagtgggctctgcccacgccgggccccaaagtgaccagactccagcacacctgtctcctcctgcctggggtggccatggggatggaagggggtggaataaaacctgtcaacctgg

SEQ ID NO: 3286 - DNA, 4508 bp, Homo sapiens
  source 1..4508: mol_type = genomic DNA
gctcaagggactcagccaactggctcacgcctccccttcagcttctcttcacgcactccaagatctaaaccgagaatcgaaactaagctggggtccatggagcctgcacccgcccgatctccgaggccccagcaggaccccgcccggccccaggagcccaccatgcctccccccgagaccccctctgaaggccgccagcccagccccagccccagccctacagagcgagcccccgcttcggaggaggagttccagtttctgcgctgccagcaatgccaggcggaagccaagtgcccgaagctgctgccttgtctgcacacgctgtgctcaggatgcctggaggcgtcgggcatgcagtgccccatctgccaggcgccctggcccctaggtgcagacacacccgccctggataacgtctttttcgagagtctgcagcggcgcctgtcggtgtaccggcagattgtggatgcgcaggctgtgtgcacccgctgcaaagagtcggccgacttctggtgctttgagtgcgagcagctcctctgcgccaagtgcttcgaggcacaccagtggttcctcaagcacgaggcccggcccctagcagagctgcgcaaccagtcggtgcgtgagttcctggacggcacccgcaagaccaacaacatcttctgctccaaccccaaccaccgcacccctacgctgaccagcatctactgccgaggatgttccaagccgctgtgctgctcgtgcgcgctccttgacagcagccacagtgagctcaagtgcgacatcagcgcagagatccagcagcgacaggaggagctggacgccatgacgcaggcgctgcaggagcaggatagtgcctttggcgcggttcacgcgcagatgcacgcggccgtcggccagctgggccgcgcgcgtgccgagaccgaggagctgatccgcgagcgcgtgcgccaggtggtagctcacgtgcgggctcaggagcgcgagctgctggaggctgtggacgcgcggtaccagcgcgactacgaggagatggccagtcggctgggccgcctggatgctgtgctgcagcgcatccgcacgggcagcgcgctggtgcagaggatgaagtgctacgcctcggaccaggaggtgctggacatgcacggtttcctgcgccaggcgctctgccgcctgcgccaggaggagccccagagcctgcaagctgccgtgcgcaccgatggcttcgacgagttcaaggtgcgcctgcaggacctcagctcttgcatcacccaggggaaagatgcagctgtatccaagaaagccagcccagaggctgccagcactcccagggaccctattgacgttgacctgcccgaggaggcagagagagtgaaggcccaggttcaggccctggggctggctgaagcccagcctatggctgtggtacagtcagtgcccggggcacaccccgtgccagtgtacgccttctccatcaaaggcccttcctatggagaggatgtctccaatacaacgacagcccagaagaggaagtgcagccagacccagtgccccaggaaggtcatcaagatggagtctgaggaggggaaggaggcaaggttggctcggagctccccggagcagcccaggcccagcacctccaaggcagtctcaccaccccacctggatggaccgcctagccccaggagccccgtcataggaagtgaggtcttcctgcccaacagcaaccacgtggccagtggcgccggggaggcagaggaacgcgttgtggtgatcagcagctcggaagactcagatgccgaaaactcgtcctcccgagagctggatgacagcagcagtgagtccagtgacctccagctggaaggccccagcaccctcagggtcctggacgagaaccttgctgacccccaagcagaagacagacctctggttttctttgacctcaagattgacaatgaaacccagaagattagccagctggctgcggtgaaccgggaaagcaagttccgcgtggtcatccagcctgaagccttcttcagcatctactccaaggccgtgtccctggaggtggggctgcagcacttcctcagctttctgagctccatgcgccgccctatcttggcctgctacaagctgtgggggcctggcctcccaaacttcttccgggccctggaggacattaacaggctgtgggaattccaggaggccatctcgggcttcctggctgccctgcctctcatccgggagcgtgtgcccggggccagcagcttcaaactcaagaacctggcccagacctacctggcgagaaacatgagcgagcgcagcgccatggctgccgtgctggccatgcgtgacctgtgccgcctcctcgaggtctccccgggcccccagctggcccagcatgtctaccccttcagtagcctgcagtgctttgcctccctgcagcccctggtgcaggcagctgtgctgccccgggctgaggcccgcctcctggccctacacaacgtgagcttcatggagctgctgagtgcacaccgccgtgaccggcaggggggcctgaagaagtacagccgctatctaagcctgcagaccaccacgttgccccctgcccagcctgctttcaacctgcaggctctgggcacctactttgaaggcctgttggagggtccggcgctggcacgggcagaaggagtctccaccccacttgctggccgtggcttggcagagagggcctcccagcagagctgagaggagggggtgaccagcttggagtctctggtgggcagagagggatggggtccctgagccaggccccacccatcacagcattcccaggtcctggtacccagccctcagttgtcatttggttcagaatcagttccctttctctgggaccaaatttcccttctctaaacatcctacagagaaggttccaaagctgagcacccatcaccctaggtgtgcaccagactcctattagcccctccttccaggagctagaaccagggaggtcctgagtgaggaaggcatgacctctgggctctctaggtggccctggtcttgccccatccatcccacctgccactaccttgggtgtccttacagctctgccctgaccccagcccctgcccctggacacctgctgacagctcccacacagaacagtctgaggtgatgctggctacagccctggcagcccatggcaactcaaagtgccttccaaaccaaactgcccctcatgaggttagggtcccccaccctccacctgcccagaggccaactctgttcccttctcctttcatcccagaggggcctcatcagcaaagacagaaactgatgttccatgcatgtccctgcttccaaagcctgaccttccaaagcttgcttccttcctcctggctgcacagacacctctgcttggccacagctttgctctttggtcctcaggccaccagacccctcacagcatggcccttggctcttcctgcactgccctcaccctcagccgtcccaaggagtgcccagcactactcagcatgtagtccaggacctgcggcatcagcatcccctgggagcttcttagaaatgcagacctgtgggctctaccacaggcctctggaatcagaatcttcagggtggggcccagcagtctgtgttttaacaggttctcccggtgatgctggtgcatgctcaagtttgagaaccgctgctctcatagactgctcctccaaggggaagcagtgtggaacagcagagaaagtcccgtccctatctctgactgtgcagtgagtgtggcctaggaacaggtcccttcctaagctctagtgtccccatctgtaaaatgggctgattggcctccacggtcagagcggccatctggctgtgccatcctgcatttttaggaatggaaagcaggcctctgaggcagtggacaggaagacttctcatccttgaattctagctcccattccaaactgttagtccccaaccttgtggtcacatcagaggtcaacagcagaacagaggcaggtcagggttgtccgctctgattagcagaacgacagccccttcctcctcctccctccttcccatccctactcattagctccctgctcctgggatgcttcccaagcagcccaggcctctagcctccatggctgatgacctcagctttcacactggtgaagtctgtgtacccatactgcagccccatcccatggggcccctgaagacccactgaggaattccgtagggtcttgttcccacgaccggagtgctggctctcacagtgaattttgatgcatttaaaataagattctgatgccagactgttaaaacaggcgctggttctgaagcaccgatggaaacagattgatgcagatggaaggaggaagggagactgggcccactgatttccagccccaccatgtgtgctgttttcagatgtgattgaggggtgttctgccctgcctccactgtcacagcctttaataaagatgtgaatcttgaaa

SEQ ID NO: 3287 - DNA, 3029 bp, Homo sapiens
  source 1..3029: mol_type = genomic DNA
gctcaagggactcagccaactggctcacgcctccccttcagcttctcttcacgcactccaagatctaaaccgagaatcgaaactaagctggggtccatggagcctgcacccgcccgatctccgaggccccagcaggaccccgcccggccccaggagcccaccatgcctccccccgagaccccctctgaaggccgccagcccagccccagccccagccctacagagcgagcccccgcttcggaggaggagttccagtttctgcgctgccagcaatgccaggcggaagccaagtgcccgaagctgctgccttgtctgcacacgctgtgctcaggatgcctggaggcgtcgggcatgcagtgccccatctgccaggcgccctggcccctaggtgcagacacacccgccctggataacgtctttttcgagagtctgcagcggcgcctgtcggtgtaccggcagattgtggatgcgcaggctgtgtgcacccgctgcaaagagtcggccgacttctggtgctttgagtgcgagcagctcctctgcgccaagtgcttcgaggcacaccagtggttcctcaagcacgaggcccggcccctagcagagctgcgcaaccagtcggtgcgtgagttcctggacggcacccgcaagaccaacaacatcttctgctccaaccccaaccaccgcacccctacgctgaccagcatctactgccgaggatgttccaagccgctgtgctgctcgtgcgcgctccttgacagcagccacagtgagctcaagtgcgacatcagcgcagagatccagcagcgacaggaggagctggacgccatgacgcaggcgctgcaggagcaggatagtgcctttggcgcggttcacgcgcagatgcacgcggccgtcggccagctgggccgcgcgcgtgccgagaccgaggagctgatccgcgagcgcgtgcgccaggtggtagctcacgtgcgggctcaggagcgcgagctgctggaggctgtggacgcgcggtaccagcgcgactacgaggagatggccagtcggctgggccgcctggatgctgtgctgcagcgcatccgcacgggcagcgcgctggtgcagaggatgaagtgctacgcctcggaccaggaggtgctggacatgcacggtttcctgcgccaggcgctctgccgcctgcgccaggaggagccccagagcctgcaagctgccgtgcgcaccgatggcttcgacgagttcaaggtgcgcctgcaggacctcagctcttgcatcacccaggggaaagatgcagctgtatccaagaaagccagcccagaggctgccagcactcccagggaccctattgacgttgacctgcccgaggaggcagagagagtgaaggcccaggttcaggccctggggctggctgaagcccagcctatggctgtggtacagtcagtgcccggggcacaccccgtgccagtgtacgccttctccatcaaaggcccttcctatggagaggatgtctccaatacaacgacagcccagaagaggaagtgcagccagacccagtgccccaggaaggtcatcaagatggagtctgaggaggggaaggaggcaaggttggctcggagctccccggagcagcccaggcccagcacctccaaggcagtctcaccaccccacctggatggaccgcctagccccaggagccccgtcataggaagtgaggtcttcctgcccaacagcaaccacgtggccagtggcgccggggaggcagaggaacgcgttgtggtgatcagcagctcggaagactcagatgccgaaaactcgtgcatggagcccatggagaccgccgagccacagtcctcgccagcccactcctcgccagcccactcctcgccagcccactcctcgccagtccagtctctgctgagagcacaaggagcctccagcctgccctgtggcacataccaccccccagcttggcctccccaccagcccgctgagcaggctgccacccccgatgctgagcctcacagcgagcctcctgatcaccaggagcgccctgccgtccaccgtgggatccgctacctgttgtacagagcacagagagccatccgccttcgccatgccctccgcttgcaccctcaattgcatcgggcccctattcggacttggtctccccatgtggtccaagccagcactcctgccatcacagggcccctcaaccatcctgccaatgcccaggaacatcctgcccagctgcaaaggggcatcagcccaccccaccggatacgaggggctgtgcgatcccgcagccgctccctccggggctcctcccatttatcccagtggctcaacaacttttttgccctccccttctcctccatggcttcccagcttgacatgtcttccgtggtgggggcaggggaaagcagagcccagactcttggagcaggtgttccccctggggactctgtcagaggctccatggaggcctctcaagtccaagtgcctctggaagcctctccaattacattcccaccaccctgtgccccagaaaggccccccatcagcccagtcccaggcgcccgtcaagcaggcctctgagagtgctacccttctcttgtaaccttgcagccaacacccctgcccggcccctgagctgcctcctccagcccatgctcttacaggccctgcacagagtagcactcattaattcttggttaaggaatgaatcaacgaatgaatggctatgcatggacctctgggcagggagacctgggtcttctctggctgagaggggaaggctaaggcatggctgagattcaagccaccattccaggcctctttgcccaagaaagaaacttctgtcacccttgcactctcctgtattctgagtccctggccaatagcacagccttccatgccccgacccccaccccaagcctctccactaggcctctgccaggatctaagcccatgagcacagggactggctatcccaagacctggcagatgtggctgctcaataaacacttgttgaaccatca

SEQ ID NO: 3288 - DNA, 2885 bp, Homo sapiens
  source 1..2885: mol_type = genomic DNA
gctcaagggactcagccaactggctcacgcctccccttcagcttctcttcacgcactccaagatctaaaccgagaatcgaaactaagctggggtccatggagcctgcacccgcccgatctccgaggccccagcaggaccccgcccggccccaggagcccaccatgcctccccccgagaccccctctgaaggccgccagcccagccccagccccagccctacagagcgagcccccgcttcggaggaggagttccagtttctgcgctgccagcaatgccaggcggaagccaagtgcccgaagctgctgccttgtctgcacacgctgtgctcaggatgcctggaggcgtcgggcatgcagtgccccatctgccaggcgccctggcccctaggtgcagacacacccgccctggataacgtctttttcgagagtctgcagcggcgcctgtcggtgtaccggcagattgtggatgcgcaggctgtgtgcacccgctgcaaagagtcggccgacttctggtgctttgagtgcgagcagctcctctgcgccaagtgcttcgaggcacaccagtggttcctcaagcacgaggcccggcccctagcagagctgcgcaaccagtcggtgcgtgagttcctggacggcacccgcaagaccaacaacatcttctgctccaaccccaaccaccgcacccctacgctgaccagcatctactgccgaggatgttccaagccgctgtgctgctcgtgcgcgctccttgacagcagccacagtgagctcaagtgcgacatcagcgcagagatccagcagcgacaggaggagctggacgccatgacgcaggcgctgcaggagcaggatagtgcctttggcgcggttcacgcgcagatgcacgcggccgtcggccagctgggccgcgcgcgtgccgagaccgaggagctgatccgcgagcgcgtgcgccaggtggtagctcacgtgcgggctcaggagcgcgagctgctggaggctgtggacgcgcggtaccagcgcgactacgaggagatggccagtcggctgggccgcctggatgctgtgctgcagcgcatccgcacgggcagcgcgctggtgcagaggatgaagtgctacgcctcggaccaggaggtgctggacatgcacggtttcctgcgccaggcgctctgccgcctgcgccaggaggagccccagagcctgcaagctgccgtgcgcaccgatggcttcgacgagttcaaggtgcgcctgcaggacctcagctcttgcatcacccaggggaaagatgcagctgtatccaagaaagccagcccagaggctgccagcactcccagggaccctattgacgttgacctggatgtctccaatacaacgacagcccagaagaggaagtgcagccagacccagtgccccaggaaggtcatcaagatggagtctgaggaggggaaggaggcaaggttggctcggagctccccggagcagcccaggcccagcacctccaaggcagtctcaccaccccacctggatggaccgcctagccccaggagccccgtcataggaagtgaggtcttcctgcccaacagcaaccacgtggccagtggcgccggggaggcagaggaacgcgttgtggtgatcagcagctcggaagactcagatgccgaaaactcgtgcatggagcccatggagaccgccgagccacagtcctcgccagcccactcctcgccagcccactcctcgccagcccactcctcgccagtccagtctctgctgagagcacaaggagcctccagcctgccctgtggcacataccaccccccagcttggcctccccaccagcccgctgagcaggctgccacccccgatgctgagcctcacagcgagcctcctgatcaccaggagcgccctgccgtccaccgtgggatccgctacctgttgtacagagcacagagagccatccgccttcgccatgccctccgcttgcaccctcaattgcatcgggcccctattcggacttggtctccccatgtggtccaagccagcactcctgccatcacagggcccctcaaccatcctgccaatgcccaggaacatcctgcccagctgcaaaggggcatcagcccaccccaccggatacgaggggctgtgcgatcccgcagccgctccctccggggctcctcccatttatcccagtggctcaacaacttttttgccctccccttctcctccatggcttcccagcttgacatgtcttccgtggtgggggcaggggaaagcagagcccagactcttggagcaggtgttccccctggggactctgtcagaggctccatggaggcctctcaagtccaagtgcctctggaagcctctccaattacattcccaccaccctgtgccccagaaaggccccccatcagcccagtcccaggcgcccgtcaagcaggcctctgagagtgctacccttctcttgtaaccttgcagccaacacccctgcccggcccctgagctgcctcctccagcccatgctcttacaggccctgcacagagtagcactcattaattcttggttaaggaatgaatcaacgaatgaatggctatgcatggacctctgggcagggagacctgggtcttctctggctgagaggggaaggctaaggcatggctgagattcaagccaccattccaggcctctttgcccaagaaagaaacttctgtcacccttgcactctcctgtattctgagtccctggccaatagcacagccttccatgccccgacccccaccccaagcctctccactaggcctctgccaggatctaagcccatgagcacagggactggctatcccaagacctggcagatgtggctgctcaataaacacttgttgaaccatca

SEQ ID NO: 3289 - DNA, 1834 bp, Homo sapiens
  source 1..1834: mol_type = genomic DNA
ctctccagaggcgggccctgagccggcacctcccctttcggacagctcaagggactcagccaactggctcacgcctccccttcagcttctcttcacgcactccaagatctaaaccgagaatcgaaactaagctggggtccatggagcctgcacccgcccgatctccgaggccccagcaggaccccgcccggccccaggagcccaccatgcctccccccgagaccccctctgaaggccgccagcccagccccagccccagccctacagagcgagcccccgcttcggaggaggagttccagtttctgcgctgccagcaatgccaggcggaagccaagtgcccgaagctgctgccttgtctgcacacgctgtgctcaggatgcctggaggcgtcgggcatgcagtgccccatctgccaggcgccctggcccctaggtgcagacacacccgccctggataacgtctttttcgagagtctgcagcggcgcctgtcggtgtaccggcagattgtggatgcgcaggctgtgtgcacccgctgcaaagagtcggccgacttctggtgctttgagtgcgagcagctcctctgcgccaagtgcttcgaggcacaccagtggttcctcaagcacgaggcccggcccctagcagagctgcgcaaccagtcggtgcgtgagttcctggacggcacccgcaagaccaacaacatcttctgctccaaccccaaccaccgcacccctacgctgaccagcatctactgccgaggatgttccaagccgctgtgctgctcgtgcgcgctccttgacagcagccacagtgagctcaagtgcgacatcagcgcagagatccagcagcgacaggaggagctggacgccatgacgcaggcgctgcaggagcaggatagtgcctttggcgcggttcacgcgcagatgcacgcggccgtcggccagctgggccgcgcgcgtgccgagaccgaggagctgatccgcgagcgcgtgcgccaggtggtagctcacgtgcgggctcaggagcgcgagctgctggaggctgtggacgcgcggtaccagcgcgactacgaggagatggccagtcggctgggccgcctggatgctgtgctgcagcgcatccgcacgggcagcgcgctggtgcagaggatgaagtgctacgcctcggaccaggaggtgctggacatgcacggtttcctgcgccaggcgctctgccgcctgcgccaggaggagccccagagcctgcaagctgccgtgcgcaccgatggcttcgacgagttcaaggtgcgcctgcaggacctcagctcttgcatcacccaggggaaagatgcagctgtatccaagaaagccagcccagaggctgccagcactcccagggaccctattgacgttgacctgaggaacgcgttgtggtgatcagcagctcggaagactcagatgccgaaaactcgtcctcccgagagctggatgacagcagcagtgagtccagtgacctccagctggaaggccccagcaccctcagggtcctggacgagaaccttgctgacccccaagcagaagacagacctctggttttctttgacctcaagattgacaatgaaagtgggttctcctggggctacccccacccctttctaatttagtctctgagtcccaaaaagaagtgcaggcagagccatctgccaggcccaggagagctctgagctctggccaacaactgcagccaggctgggcagagcactccggctcacctgggctcctggcgtgtcatttgctggcttgaataaagatgtccgccttatccagtgcctgagtgtgcgagagaggcagatgcctcc

SEQ ID NO: 3290 - DNA, 1738 bp, Homo sapiens
  source 1..1738: mol_type = genomic DNA
gctcaagggactcagccaactggctcacgcctccccttcagcttctcttcacgcactccaagatctaaaccgagaatcgaaactaagctggggtccatggagcctgcacccgcccgatctccgaggccccagcaggaccccgcccggccccaggagcccaccatgcctccccccgagaccccctctgaaggccgccagcccagccccagccccagccctacagagcgagcccccgcttcggaggaggagttccagtttctgcgctgccagcaatgccaggcggaagccaagtgcccgaagctgctgccttgtctgcacacgctgtgctcaggatgcctggaggcgtcgggcatgcagtgccccatctgccaggcgccctggcccctaggtgcagacacacccgccctggataacgtctttttcgagagtctgcagcggcgcctgtcggtgtaccggcagattgtggatgcgcaggctgtgtgcacccgctgcaaagagtcggccgacttctggtgctttgagtgcgagcagctcctctgcgccaagtgcttcgaggcacaccagtggttcctcaagcacgaggcccggcccctagcagagctgcgcaaccagtcggtgcgtgagttcctggacggcacccgcaagaccaacaacatcttctgctccaaccccaaccaccgcacccctacgctgaccagcatctactgccgaggatgttccaagccgctgtgctgctcgtgcgcgctccttgacagcagccacagtgagctcaagtgcgacatcagcgcagagatccagcagcgacaggaggagctggacgccatgacgcaggcgctgcaggagcaggatagtgcctttggcgcggttcacgcgcagatgcacgcggccgtcggccagctgggccgcgcgcgtgccgagaccgaggagctgatccgcgagcgcgtgcgccaggtggtagctcacgtgcgggctcaggagcgcgagctgctggaggctgtggacgcgcggtaccagcgcgactacgaggagatggccagtcggctgggccgcctggatgctgtgctgcagcgcatccgcacgggcagcgcgctggtgcagaggatgaagtgctacgcctcggaccaggaggtgctggacatgcacggtttcctgcgccaggcgctctgccgcctgcgccaggaggagccccagagcctgcaagctgccgtgcgcaccgatggcttcgacgagttcaaggtgcgcctgcaggacctcagctcttgcatcacccaggggaaagatgcagctgtatccaagaaagccagcccagaggctgccagcactcccagggaccctattgacgttgacctgctgcctcctccagcccatgctcttacaggccctgcacagagtagcactcattaattcttggttaaggaatgaatcaacgaatgaatggctatgcatggacctctgggcagggagacctgggtcttctctggctgagaggggaaggctaaggcatggctgagattcaagccaccattccaggcctctttgcccaagaaagaaacttctgtcacccttgcactctcctgtattctgagtccctggccaatagcacagccttccatgccccgacccccaccccaagcctctccactaggcctctgccaggatctaagcccatgagcacagggactggctatcccaagacctggcagatgtggctgctcaataaacacttgttgaaccatca

SEQ ID NO: 3291 - DNA, 2237 bp, Homo sapiens
  source 1..2237: mol_type = genomic DNA
ctctccagaggcgggccctgagccggcacctcccctttcggacagctcaagggactcagccaactggctcacgcctccccttcagcttctcttcacgcactccaagatctaaaccgagaatcgaaactaagctggggtccatggagcctgcacccgcccgatctccgaggccccagcaggaccccgcccggccccaggagcccaccatgcctccccccgagaccccctctgaaggccgccagcccagccccagccccagccctacagagcgagcccccgcttcggaggaggagttccagtttctgcgctgccagcaatgccaggcggaagccaagtgcccgaagctgctgccttgtctgcacacgctgtgctcaggatgcctggaggcgtcgggcatgcagtgccccatctgccaggcgccctggcccctaggtgcagacacacccgccctggataacgtctttttcgagagtctgcagcggcgcctgtcggtgtaccggcagattgtggatgcgcaggctgtgtgcacccgctgcaaagagtcggccgacttctggtgctttgagtgcgagcagctcctctgcgccaagtgcttcgaggcacaccagtggttcctcaagcacgaggcccggcccctagcagagctgcgcaaccagtcggtgcgtgagttcctggacggcacccgcaagaccaacaacatcttctgctccaaccccaaccaccgcacccctacgctgaccagcatctactgccgaggatgttccaagccgctgtgctgctcgtgcgcgctccttgacagcagccacagtgagctcaagtgcgacatcagcgcagagatccagcagcgacaggaggagctggacgccatgacgcaggcgctgcaggagcaggatagtgcctttggcgcggttcacgcgcagatgcacgcggccgtcggccagctgggccgcgcgcgtgccgagaccgaggagctgatccgcgagcgcgtgcgccaggtggtagctcacgtgcgggctcaggagcgcgagctgctggaggctgtggacgcgcggtaccagcgcgactacgaggagatggccagtcggctgggccgcctggatgctgtgctgcagcgcatccgcacgggcagcgcgctggtgcagaggatgaagtgctacgcctcggaccaggaggtgctggacatgcacggtttcctgcgccaggcgctctgccgcctgcgccaggaggagccccagagcctgcaagctgccgtgcgcaccgatggcttcgacgagttcaaggtgcgcctgcaggacctcagctcttgcatcacccaggggaaagatgcagctgtatccaagaaagccagcccagaggctgccagcactcccagggaccctattgacgttgacctgcccgaggaggcagagagagtgaaggcccaggttcaggccctggggctggctgaagcccagcctatggctgtggtacagtcagtgcccggggcacaccccgtgccagtgtacgccttctccatcaaaggcccttcctatggagaggatgtctccaatacaacgacagcccagaagaggaagtgcagccagacccagtgccccaggaaggtcatcaagatggagtctgaggaggggaaggaggcaaggttggctcggagctccccggagcagcccaggcccagcacctccaaggcagtctcaccaccccacctggatggaccgcctagccccaggagccccgtcataggaagtgaggtcttcctgcccaacagcaaccacgtggccagtggcgccggggaggcagaggaacgcgttgtggtgatcagcagctcggaagactcagatgccgaaaactcgtcctcccgagagctggatgacagcagcagtgagtccagtgacctccagctggaaggccccagcaccctcagggtcctggacgagaaccttgctgacccccaagcagaagacagacctctggttttctttgacctcaagattgacaatgaaagtgggttctcctggggctacccccacccctttctaatttagtctctgagtcccaaaaagaagtgcaggcagagccatctgccaggcccaggagagctctgagctctggccaacaactgcagccaggctgggcagagcactccggctcacctgggctcctggcgtgtcatttgctggcttgaataaagatgtccgccttatccagtgcctgagtgtgcgagagaggcagatgcctcc

SEQ ID NO: 3292 - DNA, 1590 bp, Homo sapiens
  source 1..1590: mol_type = genomic DNA
agaatcgaaactaagctggggtccatggagcctgcacccgcccgatctccgaggccccagcaggaccccgcccggccccaggagcccaccatgcctccccccgagaccccctctgaaggccgccagcccagcctatggctgtggtacagtcagtgcccggggcacaccccgtgccagtgtacgccttctccatcaaaggcccttcctatggagaggatgtctccaatacaacgacagcccagaagaggaagtgcagccagacccagtgccccaggaaggtcatcaagatggagtctgaggaggggaaggaggcaaggttggctcggagctccccggagcagcccaggcccagcacctccaaggcagtctcaccaccccacctggatggaccgcctagccccaggagccccgtcataggaagtgaggtcttcctgcccaacagcaaccacgtggccagtggcgccggggaggcagaggaacgcgttgtggtgatcagcagctcggaagactcagatgccgaaaactcgtcctcccgagagctggatgacagcagcagtgagtccagtgacctccagctggaaggccccagcaccctcagggtcctggacgagaaccttgctgacccccaagcagaagacagacctctggttttctttgacctcaagattgacaatgaaacccagaagattagccagctggctgcggtgaaccgggaaagcaagttccgcgtggtcatccagcctgaagccttcttcagcatctactccaaggccgtgtccctggaggtggggctgcagcacttcctcagctttctgagctccatgcgccgccctatcttggcctgctacaagctgtgggggcctggcctcccaaacttcttccgggccctggaggacattaacaggctgtgggaattccaggaggccatctcgggcttcctggctgccctgcctctcatccgggagcgtgtgcccggggccagcagcttcaaactcaagaacctggcccagacctacctggcgagaaacatgagcgagcgcagcgccatggctgccgtgctggccatgcgtgacctgtgccgcctcctcgaggtctccccgggcccccagctggcccagcatgtctaccccttcagtagcctgcagtgctttgcctccctgcagcccctggtgcaggcagctgtgctgccccgggctgaggcccgcctcctggccctacacaacgtgagcttcatggagctgctgagtgcacaccgccgtgaccggcaggggggcctgaagaagtacagccgctatctaagcctgcagaccaccacgttgccccctgcccagcctgctttcaacctgcaggctctgggcacctactttgaaggcctgttggagggtccggcgctggcacgggcagaaggagtctccaccccacttgctggccgtggcttggcagagagggcctcccagcagagctgagaggagggggtgaccagcttggagtctctggtgggcagagagggatggggtccctgagccaggccccacccatcacagcattcccaggtcctggtacccagccctcagttgtcatttggttcag

SEQ ID NO: 3293 - DNA, 2608 bp, Homo sapiens
  source 1..2608: mol_type = genomic DNA
gctggggtccatggagcctgcacccgcccgatctccgaggccccagcaggaccccgcccggccccaggagcccaccatgcctccccccgagaccccctctgaaggccgccagcccagccccagccccagccctacagagcgagcccccgcttcggaggaggagttccagtttctgcgctgccagcaatgccaggcggaagccaagtgcccgaagctgctgccttgtctgcacacgctgtgctcaggatgcctggaggcgtcgggcatgcagtgccccatctgccaggcgccctggcccctaggtgcagacacacccgccctggataacgtctttttcgagagtctgcagcggcgcctgtcggtgtaccggcagattgtggatgcgcaggctgtgtgcacccgctgcaaagagtcggccgacttctggtgctttgagtgcgagcagctcctctgcgccaagtgcttcgaggcacaccagtggttcctcaagcacgaggcccggcccctagcagagctgcgcaaccagtcggtgcgtgagttcctggacggcacccgcaagaccaacaacatcttctgctccaaccccaaccaccgcacccctacgctgaccagcatctactgccgaggatgttccaagccgctgtgctgctcgtgcgcgctccttgacagcagccacagtgagctcaagtgcgacatcagcgcagagatccagcagcgacaggaggagctggacgccatgacgcaggcgctgcaggagcaggatagtgcctttggcgcggttcacgcgcagatgcacgcggccgtcggccagctgggccgcgcgcgtgccgagaccgaggagctgatccgcgagcgcgtgcgccaggtggtagctcacgtgcgggctcaggagcgcgagctgctggaggctgtggacgcgcggtaccagcgcgactacgaggagatggccagtcggctgggccgcctggatgctgtgctgcagcgcatccgcacgggcagcgcgctggtgcagaggatgaagtgctacgcctcggaccaggaggtgctggacatgcacggtttcctgcgccaggcgctctgccgcctgcgccaggaggagccccagagcctgcaagctgccgtgcgcaccgatggcttcgacgagttcaaggtgcgcctgcaggacctcagctcttgcatcacccaggggaaagatgcagctgtatccaagaaagccagcccagaggctgccagcactcccagggaccctattgacgttgacctgcccgaggaggcagagagagtgaaggcccaggttcaggccctggggctggctgaagcccagcctatggctgtggtacagtcagtgcccggggcacaccccgtgccagtgtacgccttctccatcaaaggcccttcctatggagaggatgtctccaatacaacgacagcccagaagaggaagtgcagccagacccagtgccccaggaaggtcatcaagatggagtctgaggaggggaaggaggcaaggttggctcggagctccccggagcagcccaggcccagcacctccaaggcagtctcaccaccccacctggatggaccgcctagccccaggagccccgtcataggaagtgaggtcttcctgcccaacagcaaccacgtggccagtggcgccggggaggcagaggaacgcgttgtggtgatcagcagctcggaagactcagatgccgaaaactcgtcctcccgagagctggatgacagcagcagtgagtccagtgacctccagctggaaggccccagcaccctcagggtcctggacgagaaccttgctgacccccaagcagaagacagacctctggttttctttgacctcaagattgacaatgaaacccagaagattagccagctggctgcggtgaaccgggaaagcaagttccgcgtggtcatccagcctgaagccttcttcagctttctgagctccatgcgccgccctatcttggcctgctacaagctgtgggggcctggcctcccaaacttcttccgggccctggaggacattaacaggctgtgggaattccaggaggccatctcgggcttcctggctgccctgcctctcatccgggagcgtgtgcccggggccagcagcttcaaactcaagaacctggcccagacctacctggcgagaaacatgagcgagcgcagcgccatggctgccgtgctggccatgcgtgacctgtgccgcctcctcgaggtctccccgggcccccagctggcccagcatgtctaccccttcagtagcctgcagtgctttgcctccctgcagcccctggtgcaggcagctgtgctgccccgggctgaggcccgcctcctggccctacacaacgtgagcttcatggagctgctgagtgcacaccgccgtgaccggcaggggggcctgaagaagtacagccgctatctaagcctgcagaccaccacgttgccccctgcccagcctgctttcaacctgcaggctctgggcacctactttgaaggcctgttggagggtccggcgctggcacgggcagaaggagtctccaccccacttgctggccgtggcttggcagagagggcctcccagcagagctga

SEQ ID NO: 3294 - DNA, 3713 bp, Homo sapiens
  source 1..3713: mol_type = genomic DNA
ctctccagaggcgggccctgagccggcacctcccctttcggacagctcaagggactcagccaactggctcacgcctccccttcagcttctcttcacgcactccaagatctaaaccgagaatcgaaactaagctggggtccatggagcctgcacccgcccgatctccgaggccccagcaggaccccgcccggccccaggagcccaccatgcctccccccgagaccccctctgaaggccgccagcccagccccagccccagccctacagagcgagcccccgcttcggaggaggagttccagtttctgcgctgccagcaatgccaggcggaagccaagtgcccgaagctgctgccttgtctgcacacgctgtgctcaggatgcctggaggcgtcgggcatgcagtgccccatctgccaggcgccctggcccctaggtgcagacacacccgccctggataacgtctttttcgagagtctgcagcggcgcctgtcggtgtaccggcagattgtggatgcgcaggctgtgtgcacccgctgcaaagagtcggccgacttctggtgctttgagtgcgagcagctcctctgcgccaagtgcttcgaggcacaccagtggttcctcaagcacgaggcccggcccctagcagagctgcgcaaccagtcggtgcgtgagttcctggacggcacccgcaagaccaacaacatcttctgctccaaccccaaccaccgcacccctacgctgaccagcatctactgccgaggatgttccaagccgctgtgctgctcgtgcgcgctccttgacagcagccacagtgagctcaagtgcgacatcagcgcagagatccagcagcgacaggaggagctggacgccatgacgcaggcgctgcaggagcaggatagtgcctttggcgcggttcacgcgcagatgcacgcggccgtcggccagctgggccgcgcgcgtgccgagaccgaggagctgatccgcgagcgcgtgcgccaggtggtagctcacgtgcgggctcaggagcgcgagctgctggaggctgtggacgcgcggtaccagcgcgactacgaggagatggccagtcggctgggccgcctggatgctgtgctgcagcgcatccgcacgggcagcgcgctggtgcagaggatgaagtgctacgcctcggaccaggaggtgctggacatgcacggtttcctgcgccaggcgctctgccgcctgcgccaggaggagccccagagcctgcaagctgccgtgcgcaccgatggcttcgacgagttcaaggtgcgcctgcaggacctcagctcttgcatcacccaggggaaagatgcagctgtatccaagaaagccagcccagaggctgccagcactcccagggaccctattgacgttgacctgcccgaggaggcagagagagtgaaggcccaggttcaggccctggggctggctgaagcccagcctatggctgtggtacagtcagtgcccggggcacaccccgtgccagtgtacgccttctccatcaaaggcccttcctatggagaggatgtctccaatacaacgacagcccagaagaggaagtgcagccagacccagtgccccaggaaggtcatcaagatggagtctgaggaggggaaggaggcaaggttggctcggagctccccggagcagcccaggcccagcacctccaaggcagtctcaccaccccacctggatggaccgcctagccccaggagccccgtcataggaagtgaggtcttcctgcccaacagcaaccacgtggccagtggcgccggggaggcagaggaacgcgttgtggtgatcagcagctcggaagactcagatgccgaaaactcggtgagtggcccagaagttcagcccaggactcctgcctccccccatttcaggtcccagggggcacagccacagcaggtgactctcagacttgccttgcgcctggggaattttccagtgaggcattgagtcccaagctgtgctgaggacagtctccaaatgacagctgcatgcctggaccaccccagccctcccactacaccagggccaggagctcttctgaaatgctgatagcatgtgtccagagccctgtctcttttctggaatgtccaagacctttgtctggagcttccttatgcattttctgtcctctaagtcctcagtgaggagggctggacaagaatccattccttggtttattacagccagtgggggccagtgaaggggtgtcaggccacagggcagctatataggggccaaacaagtgaggtttgactccatccatgtagaaagatatataaatccattccacagtgaaacaggtggcctcgtgggtagtgacccttctgtccctagaggtttattactagaggctggactatcacctgtccaggggaaaaggggatctgaatagagtgaaaggttggactgggtggcccctgaggtctcttccagccctcagtctgaggttctgtattggaaagtgcatggagcccatggagaccgccgagccacagtcctcgccagcccactcctcgccagcccactcctcgccagcccactcctcgccagtccagtctctgctgagagcacaaggagcctccagcctgccctgtggcacataccaccccccagcttggcctccccaccagcccgctgagcaggctgccacccccgatgctgagcctcacagcgagcctcctgatcaccaggagcgccctgccgtccaccgtgggatccgctacctgttgtacagagcacagagagccatccgccttcgccatgccctccgcttgcaccctcaattgcatcgggcccctattcggacttggtctccccatgtggtccaagccagcactcctgccatcacagggcccctcaaccatcctgccaatgcccaggaacatcctgcccagctgcaaaggggcatcagcccaccccaccggatacgaggggctgtgcgatcccgcagccgctccctccggggctcctcccatttatcccagtggctcaacaacttttttgccctccccttctcctccatggcttcccagcttgacatgtcttccgtggtgggggcaggggaaagcagagcccagactcttggagcaggtgttccccctggggactctgtcagaggctccatggaggcctctcaagtccaagtgcctctggaagcctctccaattacattcccaccaccctgtgccccagaaaggccccccatcagcccagtcccaggcgcccgtcaagcaggcctctgagagtgctacccttctcttgtaaccttgcagccaacacccctgcccggcccctgagctgcctcctccagcccatgctcttacaggccctgcacagagtagcactcattaattcttggttaaggaatgaatcaacgaatgaatggctatgcatggacctctgggcagggagacctgggtcttctctggctgagaggggaaggctaaggcatggctgagattcaagccaccattccaggcctctttgcccaagaaagaaacttctgtcacccttgcactctcctgtattctgagtccctggccaatagcacagccttccatgccccgacccccaccccaagcctctccactaggcctctgccaggatctaagcccatgagcacagggactggctatcccaagacctggcagatgtggctgctcaataaacacttgttgaaccatc

SEQ ID NO: 3295 - DNA, 3080 bp, Homo sapiens
  source 1..3080: mol_type = genomic DNA
ctctccagaggcgggccctgagccggcacctcccctttcggacagctcaagggactcagccaactggctcacgcctccccttcagcttctcttcacgcactccaagatctaaaccgagaatcgaaactaagctggggtccatggagcctgcacccgcccgatctccgaggccccagcaggaccccgcccggccccaggagcccaccatgcctccccccgagaccccctctgaaggccgccagcccagccccagccccagccctacagagcgagcccccgcttcggaggaggagttccagtttctgcgctgccagcaatgccaggcggaagccaagtgcccgaagctgctgccttgtctgcacacgctgtgctcaggatgcctggaggcgtcgggcatgcagtgccccatctgccaggcgccctggcccctaggtgcagacacacccgccctggataacgtctttttcgagagtctgcagcggcgcctgtcggtgtaccggcagattgtggatgcgcaggctgtgtgcacccgctgcaaagagtcggccgacttctggtgctttgagtgcgagcagctcctctgcgccaagtgcttcgaggcacaccagtggttcctcaagcacgaggcccggcccctagcagagctgcgcaaccagtcggtgcgtgagttcctggacggcacccgcaagaccaacaacatcttctgctccaaccccaaccaccgcacccctacgctgaccagcatctactgccgaggatgttccaagccgctgtgctgctcgtgcgcgctccttgacagcagccacagtgagctcaagtgcgacatcagcgcagagatccagcagcgacaggaggagctggacgccatgacgcaggcgctgcaggagcaggatagtgcctttggcgcggttcacgcgcagatgcacgcggccgtcggccagctgggccgcgcgcgtgccgagaccgaggagctgatccgcgagcgcgtgcgccaggtggtagctcacgtgcgggctcaggagcgcgagctgctggaggctgtggacgcgcggtaccagcgcgactacgaggagatggccagtcggctgggccgcctggatgctgtgctgcagcgcatccgcacgggcagcgcgctggtgcagaggatgaagtgctacgcctcggaccaggaggtgctggacatgcacggtttcctgcgccaggcgctctgccgcctgcgccaggaggagccccagagcctgcaagctgccgtgcgcaccgatggcttcgacgagttcaaggtgcgcctgcaggacctcagctcttgcatcacccaggggaaagatgcagctgtatccaagaaagccagcccagaggctgccagcactcccagggaccctattgacgttgacctgcccgaggaggcagagagagtgaaggcccaggttcaggccctggggctggctgaagcccagcctatggctgtggtacagtcagtgcccggggcacaccccgtgccagtgtacgccttctccatcaaaggcccttcctatggagaggatgtctccaatacaacgacagcccagaagaggaagtgcagccagacccagtgccccaggaaggtcatcaagatggagtctgaggaggggaaggaggcaaggttggctcggagctccccggagcagcccaggcccagcacctccaaggcagtctcaccaccccacctggatggaccgcctagccccaggagccccgtcataggaagtgaggtcttcctgcccaacagcaaccacgtggccagtggcgccggggaggcaggtagggagaggaacgcgttgtggtgatcagcagctcggaagactcagatgccgaaaactcgtgcatggagcccatggagaccgccgagccacagtcctcgccagcccactcctcgccagcccactcctcgccagcccactcctcgccagtccagtctctgctgagagcacaaggagcctccagcctgccctgtggcacataccaccccccagcttggcctccccaccagcccgctgagcaggctgccacccccgatgctgagcctcacagcgagcctcctgatcaccaggagcgccctgccgtccaccgtgggatccgctacctgttgtacagagcacagagagccatccgccttcgccatgccctccgcttgcaccctcaattgcatcgggcccctattcggacttggtctccccatgtggtccaagccagcactcctgccatcacagggcccctcaaccatcctgccaatgcccaggaacatcctgcccagctgcaaaggggcatcagcccaccccaccggatacgaggggctgtgcgatcccgcagccgctccctccggggctcctcccatttatcccagtggctcaacaacttttttgccctccccttctcctccatggcttcccagcttgacatgtcttccgtggtgggggcaggggaaagcagagcccagactcttggagcaggtgttccccctggggactctgtcagaggctccatggaggcctctcaagtccaagtgcctctggaagcctctccaattacattcccaccaccctgtgccccagaaaggccccccatcagcccagtcccaggcgcccgtcaagcaggcctctgagagtgctacccttctcttgtaaccttgcagccaacacccctgcccggcccctgagctgcctcctccagcccatgctcttacaggccctgcacagagtagcactcattaattcttggttaaggaatgaatcaacgaatgaatggctatgcatggacctctgggcagggagacctgggtcttctctggctgagaggggaaggctaaggcatggctgagattcaagccaccattccaggcctctttgcccaagaaagaaacttctgtcacccttgcactctcctgtattctgagtccctggccaatagcacagccttccatgccccgacccccaccccaagcctctccactaggcctctgccaggatctaagcccatgagcacagggactggctatcccaagacctggcagatgtggctgctcaataaacacttgttgaaccatc

SEQ ID NO: 3296 - DNA, 1985 bp, Homo sapiens
  source 1..1985: mol_type = genomic DNA
cgcctccccttcagcttctcttcacgcactccaagatctaaaccgagaatcgaaactaagctggggtccatggagcctgcacccgcccgatctccgaggccccagcaggaccccgcccggccccaggagcccaccatgcctccccccgagaccccctctgaaggccgccagcccagccccagccccagccctacagagcgagcccccgcttcggaggaggagttccagtttctgcgctgccagcaatgccaggcggaagccaagtgcccgaagctgctgccttgtctgcacacgctgtgctcaggatgcctggaggcgtcgggcatgcagtgccccatctgccaggcgccctggcccctaggtgcagacacacccgccctggataacgtctttttcgagagtctgcagcggcgcctgtcggtgtaccggcagattgtggatgcgcaggctgtgtgcacccgctgcaaagagtcggccgacttctggtgctttgagtgcgagcagctcctctgcgccaagtgcttcgaggcacaccagtggttcctcaagcacgaggcccggcccctagcagagctgcgcaaccagtcggtgcgtgagttcctggacggcacccgcaagaccaacaacatcttctgctccaaccccaaccaccgcacccctacgctgaccagcatctactgccgaggatgttccaagccgctgtgctgctcgtgcgcgctccttgacagcagccacagtgagctcaagtgcgacatcagcgcagagatccagcagcgacaggaggagctggacgccatgacgcaggcgctgcaggagcaggatagtgcctttggcgcggttcacgcgcagatgcacgcggccgtcggccagctgggccgcgcgcgtgccgagaccgaggagctgatccgcgagcgcgtgcgccaggtggtagctcacgtgcgggctcaggagcgcgagctgctggaggctgtggacgcgcggtaccagcgcgactacgaggagatggccagtcggctgggccgcctggatgctgtgctgcagcgcatccgcacgggcagcgcgctggtgcagaggatgaagtgctacgcctcggaccaggaggtgctggacatgcacggtttcctgcgccaggcgctctgccgcctgcgccaggaggagccccagagcctgcaagctgccgtgcgcaccgatggcttcgacgagttcaaggtgcgcctgcaggacctcagctcttgcatcacccaggggaaagatgcagctgtatccaagaaagccagcccagaggctgccagcactcccagggaccctattgacgttgacctggatgtctccaatacaacgacagcccagaagaggaagtgcagccagacccagtgccccaggaaggtcatcaagatggagtctgaggaggggaaggaggcaaggttggctcggagctccccggagcagcccaggcccagcacctccaaggcagtctcaccaccccacctggatggaccgcctagccccaggagccccgtcataggaagtgaggtcttcctgcccaacagcaaccacgtggccagtggcgccggggaggcagaggaacgcgttgtggtgatcagcagctcggaagactcagatgccgaaaactcgtcctcccgagagctggatgacagcagcagtgagtccagtgacctccagctggaaggccccagcaccctcagggtcctggacgagaaccttgctgacccccaagcagaagacagacctctggttttctttgacctcaagattgacaatgaaagtgggttctcctggggctacccccacccctttctaatttagtctctgagtcccaaaaagaagtgcaggcagagccatctgccaggcccaggagagctctgagctctggccaacaactgcagccaggctgggcagagcactccggctcacctgggctcctggcgtgtcatttgctggcttgaataaagatgtccgcctta

SEQ ID NO: 3297 - DNA, 1920 bp, Homo sapiens
  source 1..1920: mol_type = genomic DNA
ccagccgccgcccggcctcaccacccctcgtttgcacgcacgcacgttcattctccgtcctcgcgccccttttcctacactttcctcttctccccgaccggaggagccgctctttccgcgcggtgcattctggggcccgaggtcgagcccgccgctgccgccgtcgcctgagggaagcgagaagaggccgcgaccggagagaaaaagcggagtcgccaccggagagaagtcgactccctagcagcagccgccgccagagaggcccgcccaccagttcgcccgtccccctgccccgttcacaatgcagcctgcttctgcaaagtggtacgatcgaagggactatgtcttcattgaattttgtgttgaagacagtaaggatgttaatgtaaattttgaaaaatccaaacttacattcagttgtctcggaggaagtgataattttaagcatttaaatgaaattgatctttttcactgtattgatccaaatgattccaagcataaaagaacggacagatcaattttatgttgtttacgaaaaggagaatctggccagtcatggccaaggttaacaaaagaaagggcaaagcttaattggcttagtgtcgacttcaataattggaaagactgggaagatgattcagatgaagacatgtctaattttgatcgtttctctgagatgatgaacaacatgggtggtgatgaggatgtagatttaccagaagtagatggagcagatgatgattcacaagacagtgatgatgaaaaaatgccagatctggagtaaggaatattgtcatcacctggattttgagaaagaaaaataacttctctgcaagatttcataattgagagaattcctgagttgatagctctaaaggcagatatgctgtatttgcctactttaacccatttttcaacctgtttgttttttaaaaggcttcactaagggttgatatgtaccattgtatggggcaattttaagtcagctaaggcaataaccttatgcatgaacatttcccagactttcatgaagctgttgaggtcctaggcaattaatgcagcagttgcgataaataaaaacatctcacctaagtctccttttcttcataacatagatactgacatgataggaagctctcagcttagggaaagagaataaattttagattatagaacatggattcaaaagtgactggaacaaattggctgacaccttactggtaacctgctattcttctggtgttatccttcaggattgttccactaaaatttatttttcaaaaaatttacttcacattattctatgtaagtgatgacttgtcagtgttccaggtgtatcttagctaaaactagagaatgccctaacttagatggtttttgaagcctatacaattggtattgtttgacccttaagcttttacatctcttagcatggaggacgaagaaagctgtacattgttgcttgagagtctgtacatttagtccagatttgtatttgcactgtcagtatggcaaatgagtgaaaaatgtttaatacactattggattttttatttcctttttttgattcagcttatacccgggctgaaaacctcaatttatgttcatgacagtggggatttttttaaatgtctacattctttctaataaactgttggaagacttcttggctgtccttttaagtgtctggcttactgtaatttttatgtatttaccatttactggaatggagtttatttgaggaagaatttgggattattcctctgtttgaaaaaagaggcttgctgtaatgtcacaggaaaccttttaaaagtggatctgtaatagcatattgtagatgcactttgcagcagttggaaaagaaagtgttgtgtgatttgattgaaataaaactaaatgtgttgtcctcctaaatctttg

SEQ ID NO: 3298 - DNA, 2328 bp, Homo sapiens
  source 1..2328: mol_type = genomic DNA
gcgccatgagccggagtctcttgctctggttcttgctgttcctgctcctgctcccgccgctccccgtcctgctcgcggacccaggggcgcccacgccagtgaatccctgttgttactatccatgccagcaccagggcatctgtgtccgcttcggccttgaccgctaccagtgtgactgcacccgcacgggctattccggccccaactgcaccatccctggcctgtggacctggctccggaattcactgcggcccagcccctctttcacccacttcctgctcactcacgggcgctggttctgggagtttgtcaatgccaccttcatccgagagatgctcatgcgcctggtactcacagtgcgctccaaccttatccccagtccccccacctacaactcagcacatgactacatcagctgggagtctttctccaacgtgagctattacactcgtattctgccctctgtgcctaaagattgccccacacccatgggaaccaaagggaagaagcagttgccagatgcccagctcctggcccgccgcttcctgctcaggaggaagttcatacctgacccccaaggcaccaacctcatgtttgccttctttgcacaacacttcacccaccagttcttcaaaacttctggcaagatgggtcctggcttcaccaaggccttgggccatggggtagacctcggccacatttatggagacaatctggagcgtcagtatcaactgcggctctttaaggatgggaaactcaagtaccaggtgctggatggagaaatgtacccgccctcggtagaagaggcgcctgtgttgatgcactacccccgaggcatcccgccccagagccagatggctgtgggccaggaggtgtttgggctgcttcctgggctcatgctgtatgccacgctctggctacgtgagcacaaccgtgtgtgtgacctgctgaaggctgagcaccccacctggggcgatgagcagcttttccagacgacccgcctcatcctcataggggagaccatcaagattgtcatcgaggagtacgtgcagcagctgagtggctatttcctgcagctgaaatttgacccagagctgctgttcggtgtccagttccaataccgcaaccgcattgccatggagttcaaccatctctaccactggcaccccctcatgcctgactccttcaagatcggtgggggcaggaacatggaccaccacatcctgcatgtggctgtggatgtcatcagggagtctcgggagatgcggctgcagcccttcaatgagtaccgcaagaggtttggcatgaaaccctacacctccttccaggagctcgtaggagagaaggagatggcagcagagttggaggaattgtatggagacattgatgcgttggagttctaccctggactgcttcttgaaaagtgccatccaaactctatctttggggagagtatgatagagattggggctcccttttccctcaagggtctcctagggaatcccatctgttctccggagtactggaagccgagcacatttggcggcgaggtgggctttaacattgtcaagacggccacactgaagaagctggtctgcctcaacaccaagacctgtccctacgtttccttccgtgtgccggatgccagtcaggatgatgggcctgctgtggagcgaccatccacagagctctgaggggcaggaaagcagcattctggaggggagagctttgtgcttgtcattccagagtgctgaggccagggctgatggtcttaaatgctcattttctggtttggcatggtgagtgttggggttgacatttagaactttaagtctcacccattatctggaatattgtgattctgtttattcttccagaatgctgaactccttgttagcccttcagattgttaggagtggttctcatttggtctgccagaatactgggttcttagttgacaacctagaatgtcagatttctggttgatttgtaacacagtcattctaggatgtggagctactgatgaaatctgctagaaagttagggggttcttattttgcattccagaatcttgactttctgattggtgattcaaagtgttgtgttcctggctgatgatccagaacagtggctcgtatcccaaatctgtcagcatctggctgtctagaatgtggatttgattcattttcctgttcagtgagatatcatagagacggagatcctaaggtccaacaagaatgcattccctgaatctgtgcctgcactgagagggcaaggaagtggggtgttcttcttgggacccccactaagaccctggtctgaggatgt

SEQ ID NO: 3299 - DNA, 4964 bp, Homo sapiens
  source 1..4964: mol_type = genomic DNA
gcgccatgagccggagtctcttgctctggttcttgctgttcctgctcctgctcccgccgctccccgtcctgctcgcggacccaggggcgcccacgccagtgaatccctgttgttactatccatgccagcaccagggcatctgtgtccgcttcggccttgaccgctaccagtgtgactgcacccgcacgggctattccggccccaactgcaccatccctggcctgtggacctggctccggaattcactgcggcccagcccctctttcacccacttcctgctcactcacgggcgctggttctgggagtttgtcaatgccaccttcatccgagagatgctcatgcgcctggtactcacagtgcgctccaaccttatccccagtccccccacctacaactcagcacatgactacatcagctgggagtctttctccaacgtgagctattacactcgtattctgccctctgtgcctaaagattgccccacacccatgggaaccaaagggaagaagcagttgccagatgcccagctcctggcccgccgcttcctgctcaggaggaagttcatacctgacccccaaggcaccaacctcatgtttgccttctttgcacaacacttcacccaccagttcttcaaaacttctggcaagatgggtcctggcttcaccaaggccttgggccatggggtagacctcggccacatttatggagacaatctggagcgtcagtatcaactgcggctctttaaggatgggaaactcaagtaccaggtgctggatggagaaatgtacccgccctcggtagaagaggcgcctgtgttgatgcactacccccgaggcatcccgccccagagccagatggctgtgggccaggaggtgtttgggctgcttcctgggctcatgctgtatgccacgctctggctacgtgagcacaaccgtgtgtgtgacctgctgaaggctgagcaccccacctggggcgatgagcagcttttccagacgacccgcctcatcctcataggggagaccatcaagattgtcatcgaggagtacgtgcagcagctgagtggctatttcctgcagctgaaatttgacccagagctgctgttcggtgtccagttccaataccgcaaccgcattgccatggagttcaaccatctctaccactggcaccccctcatgcctgactccttcaaggtgggctcccaggagtacagctacgagcagttcttgttcaacacctccatgttggtggactatggggttgaggccctggtggatgccttctctcgccagattgctggccggatcggtgggggcaggaacatggaccaccacatcctgcatgtggctgtggatgtcatcagggagtctcgggagatgcggctgcagcccttcaatgagtaccgcaagaggtttggcatgaaaccctacacctccttccaggagctcgtaggagagaaggagatggcagcagagttggaggaattgtatggagacattgatgcgttggagttctaccctggactgcttcttgaaaagtgccatccaaactctatctttggggagagtatgatagagattggggctcccttttccctcaagggtctcctagggaatcccatctgttctccggagtactggaagccgagcacatttggcggcgaggtgggctttaacattgtcaagacggccacactgaagaagctggtctgcctcaacaccaagacctgtccctacgtttccttccgtgtgccggatgccagtcaggatgatgggcctgctgtggagcgaccatccacagagctctgaggggcaggaaagcagcattctggaggggagagctttgtgcttgtcattccagagtgctgaggccagggctgatggtcttaaatgctcattttctggtttggcatggtgagtgttggggttgacatttagaactttaagtctcacccattatctggaatattgtgattctgtttattcttccagaatgctgaactccttgttagcccttcagattgttaggagtggttctcatttggtctgccagaatactgggttcttagttgacaacctagaatgtcagatttctggttgatttgtaacacagtcattctaggatgtggagctactgatgaaatctgctagaaagttagggggttcttattttgcattccagaatcttgactttctgattggtgattcaaagtgttgtgttcctggctgatgatccagaacagtggctcgtatcccaaatctgtcagcatctggctgtctagaatgtggatttgattcattttcctgttcagtgagatatcatagagacggagatcctaaggtccaacaagaatgcattccctgaatctgtgcctgcactgagagggcaaggaagtggggtgttcttcttgggacccccactaagaccctggtctgaggatgtagagagaacaggtgggctgtattcacgccattggttggaagctaccagagctctatccccatccaggtcttgactcatggcagctgtttctcatgaagctaataaaattcgctttctaaagttacctgttatatatctcttttggtcccatcctctaaagcagaggcaacactggaacatggctagcctttcttgtagccatggctgggcgtgctagaggttgcagcatgagactttctgctgggatccttgggcccatcactgtatagacatgctaccactggtacttcctttctccctgcgggccaggcactgcccttttcaggaagctctcttaaaatacccattgccccagacctggaagatataacattcagttcccaccatctgattaaaacaacttcctcccttacagagcatacaacagagggggcacccggggaggagagcacatactgtgttccaatttcacgcttttaattctcatttgttctcacaccaacagtgtgaagtgcgtggtataatctccatttcaaaaccaaggaagcagcctcagagtggtcgagtgacacacctcacgcaggctgagtccagagcttgtgctcctcttgattcctggtttgactcagttccaggcctgatcttgcctgtctggctcagggtcaaagacagaatggtggagtgtagcctccacctgatattcaggctactcattcagtcccaaatatgtattttcctaagtgtttactatgtgccagttcctgtaacaggtgtggggacacagcagtgagtaatcaatacagacaaggttctgcccttatggagctcacactccagtggcagacaaacagaccataaataaggaaacgatgaaataagatatatacaaggtgagtgtgacttcccttctaaccccctctgctctgtcctcccctattgcgctctcaagaccagagacccaacagcagtgatctcagggcagacagccctccactccagctctgagacccttttctcaggacctctgtaggcagcagagagagaggacagaggggtaagatgaggggttgagggaaggttcttcatgatccacactttgggcttagtatttctcaggaagagctatggcccagaaacaacaggggaaactagagttcggtctgacagtccttggggttaagtctcctgtcttatggtccagaaactcctgtttctccttagttggctggaaactgctcccatcattccttctggcctctgctgaatgcagggaatgcaatccttccctgctcttgcagttgctctgacgtagaaagatccttcgggtgctggaagtctccatgaagagcttgtgtcctgtcctttcttgcagattctatttcccctcttctgctaatacctcttactttgcttgagaatcctctcctttcttattaatttcagtcttggtggttctatcaggggtgcattctggccaaggggtgggcctgtgaatcaatcctgggcaatcagacaccctctccttaaaaactggcccgtggagactgagatcactgactctgactcatccccacagctggctctgacaagatggtccatttgttcctgcttccgagatccccagggcagcctggatccctgcccttctcaagactttagcttttccttccatccggtggcctattccaggaattcctcttttgcttaaatcagttggagtttgtgtctgttgcttgtaatcaagcctttatggctgctgggctgagtgacacaagcactttaatggcctggagggacttttaatcagtgaagatgcaatcagacaagtgttttggaaagagcaccctcgagaagggtggatgacagggcagagcaggaaggacaggaagctggcagaacggaggaggctgcagccgtggtccaaccaggagctgatggcagctggggctaggggaagggctttgagggtggaaggatgggatgggttccagaggtattcctctcttaaatgcaagtgcctagattaggtagactttgcttagtattgacaactgcacatgaaagttttgcaaagggaaacaggctaaatgcaccaagaaagcttcttcagagtgaagaatcttaatgcttgtaatttaaacatttgttcctggagttttgatttggtggatgtgatggttggttttatttgtcagtttggttgggctatagcacacagttatttaatcaaacagtaatctaggtgtggctgtgaaggtattttgtagatgtgattaacatctacaatcagttgactttaagtgaaagagattacttaaataatttgggtgagctgcacctgattagttgaaaggcctcaagaacaaacactgcagtttcctggaaaagaagaaactttgcctcaagactatagccatcgactcctgcctgagtttccagcctgctagtctgccctatggatttgaagtttgccaaccccaacaattgtgtgaattaatttctaaaaataaagctatatacagcca

SEQ ID NO: 3300 - DNA, 2073 bp, Homo sapiens
  source 1..2073: mol_type = genomic DNA
agcttgtggctcttctgcctgccgaggcagagctctagggccatggcgggaggccttccggctccacctcagacagctgttgagggcctggaagatgagggactccttttggtcaggctggagtgaatccctgttgttactatccatgccagcaccagggcatctgtgtccgcttcggccttgaccgctaccagtgtgactgcacccgcacgggctattccggccccaactgcaccatccctggcctgtggacctggctccggaattcactgcggcccagcccctctttcacccacttcctgctcactcacgggcgctggttctgggagtttgtcaatgccaccttcatccgagagatgctcatgcgcctggtactcacagtgcgctccaaccttatccccagtccccccacctacaactcagcacatgactacatcagctgggagtctttctccaacgtgagctattacactcgtattctgccctctgtgcctaaagattgccccacacccatgggaaccaaagggaagaagcagttgccagatgcccagctcctggcccgccgcttcctgctcaggaggaagttcatacctgacccccaaggcaccaacctcatgtttgccttctttgcacaacacttcacccaccagttcttcaaaacttctggcaagatgggtcctggcttcaccaaggccttgggccatggggtagacctcggccacatttatggagacaatctggagcgtcagtatcaactgcggctctttaaggatgggaaactcaagtaccaggtgctggatggagaaatgtacccgccctcggtagaagaggcgcctgtgttgatgcactacccccgaggcatcccgccccagagccagatggctgtgggccaggaggtgtttgggctgcttcctgggctcatgctgtatgccacgctctggctacgtgagcacaaccgtgtgtgtgacctgctgaaggctgagcaccccacctggggcgatgagcagcttttccagacgacccgcctcatcctcataggggagaccatcaagattgtcatcgaggagtacgtgcagcagctgagtggctatttcctgcagctgaaatttgacccagagctgctgttcggtgtccagttccaataccgcaaccgcattgccatggagttcaaccatctctaccactggcaccccctcatgcctgactccttcaaggtgggctcccaggagtacagctacgagcagttcttgttcaacacctccatgttggtggactatggggttgaggccctggtggatgccttctctcgccagattgctggccggatcggtgggggcaggaacatggaccaccacatcctgcatgtggctgtggatgtcatcagggagtctcgggagatgcggctgcagcccttcaatgagtaccgcaagaggtttggcatgaaaccctacacctccttccaggagctcgtaggagagaaggagatggcagcagagttggaggaattgtatggagacattgatgcgttggagttctaccctggactgcttcttgaaaagtgccatccaaactctatctttggggagagtatgatagagattggggctcccttttccctcaagggtctcctagggaatcccatctgttctccggagtactggaagccgagcacatttggcggcgaggtgggctttaacattgtcaagacggccacactgaagaagctggtctgcctcaacaccaagacctgtccctacgtttccttccgtgtgccggatgccagtcaggatgatgggcctgctgtggagcgaccatccacagagctctgaggggcaggaaagcagcattctggaggggagagctttgtgcttgtcattccagagtgctgaggccagggctgatggtcttaaatgctcattttctggtttggcatggtgagtgttggggttgacatttagaactttaagtctcacccattatctggaatattgtgattctgtttattcttccagaatgctgaactccttgttagcccttcagattgttaggagtggttctcatttggtctgccag

SEQ ID NO: 3301 - DNA, 468 bp, Homo sapiens
  source 1..468: mol_type = genomic DNA
agtctcttgctctggttcttgctgttcctgctcctgctcccgccgctccccgtcctgctcgcggacccaggggcgcccacgccagctggcctgtggacctggctccggaattcactgcggcccagcccctctttcacccacttcctgctcactcacgggcgctggttctgggagtttgtcaatgccaccttcatccgagagatgctcatgcgcctggtactcacagtgcgctccaaccttatccccagtccccccacctacaactcagcacatgactacatcagctgggagtctttctccaacttcttcaaaacttctggcaagatgggtcctggcttcaccaaggccttgggccatggggtagacctcggccacatttatggagacaatctggagcgtcagtatcaactgcggctctttaaggatgggaaactcaagtaccaggtgctggatggagaaatgtacccg

SEQ ID NO: 3302 - DNA, 2312 bp, Homo sapiens
  source 1..2312: mol_type = genomic DNA
atctaggaaaccatcagcaggccaggctggactgccccatttctagccccctttcttctctgcagactgccctgtttctagccccttttcttctctacccttttctgtagagtgcgttagacccattttacagaaggggactctgagaccctttcttctctgcggggcagggtatgtggttcagacgagccgcttccatccccagttctgtccctaagccctgggtgacctcagcattgagcatcgtctctgagcctcagtttcctgtctatatctagtgccaccaggcatcagaaacggagtctcttgctctggttcttgctgttcctgctcctgctcccgccgctccccgtcctgctcgcggacccaggggcgcccacgccaggggcctctttgggaggaagccgcaggcaccaagggaaatgagttccctttctccagcctctaaccgtctgggaacccatcctgattcccattgccagtggagaaggtctcccctggtgaagacttcgggagaacatgggagatggaaatacatttaggagccgggatgcttcatctggggtttaagagatccccattgagcaaatgaggaaaccgaggctcatgaatccctgttgttactatccatgccagcaccagggcatctgtgtccgcttcggccttgaccgctaccagtgtgactgcacccgcacgggctattccggccccaactgcaccatccctggcctgtggacctggctccggaattcactgcggcccagcccctctttcacccacttcctgctcactcacgggcgctggttctgggagtttgtcaatgccaccttcatccgagagatgctcatgcgcctggtactcacagtgcgctccaaccttatccccagtccccccacctacaactcagcacatgactacatcagctgggagtctttctccaacgtgagctattacactcgtattctgccctctgtgcctaaagattgccccacacccatgggaaccaaagggaagaagcagttgccagatgcccagctcctggcccgccgcttcctgctcaggaggaagttcatacctgacccccaaggcaccaacctcatgtttgccttctttgcacaacacttcacccaccagttcttcaaaacttctggcaagatgggtcctggcttcaccaaggccttgggccatggggtagacctcggccacatttatggagacaatctggagcgtcagtatcaactgcggctctttaaggatgggaaactcaagtaccaggtgctggatggagaaatgtacccgccctcggtagaagaggcgcctgtgttgatgcactacccccgaggcatcccgccccagagccagatggctgtgggccaggaggtgtttgggctgcttcctgggctcatgctgtatgccacgctctggctacgtgagcacaaccgtgtgtgtgacctgctgaaggctgagcaccccacctggggcgatgagcagcttttccagacgacccgcctcatcctcataggggagaccatcaagattgtcatcgaggagtacgtgcagcagctgagtggctatttcctgcagctgaaatttgacccagagctgctgttcggtgtccagttccaataccgcaaccgcattgccatggagttcaaccatctctaccactggcaccccctcatgcctgactccttcaagatcggtgggggcaggaacatggaccaccacatcctgcatgtggctgtggatgtcatcagggagtctcgggagatgcggctgcagcccttcaatgagtaccgcaagaggtttggcatgaaaccctacacctccttccaggagctcgtaggagagaaggagatggcagcagagttggaggaattgtatggagacattgatgcgttggagttctaccctggactgcttcttgaaaagtgccatccaaactctatctttggggagagtatgatagagattggggctcccttttccctcaagggtctcctagggaatcccatctgttctccggagtactggaagccgagcacatttggcggcgaggtgggctttaacattgtcaagacggccacactgaagaagctggtctgcctcaacaccaagacctgtccctacgtttccttccgtgtgccggatgccagtcaggatgatgggcctgctgtggagcgaccatccacagagctctgaggggcaggaaagcagcattctggaggggagagctttgtgcttgtcattccagagtgctgaggccagggctgatggtcttaaatgctcattttctggtttggcatggtgag

SEQ ID NO: 3303 - DNA, 4514 bp, Homo sapiens
  source 1..4514: mol_type = genomic DNA
gaccaattgtcatacgacttgcagtgagcgtcaggagcacgtccaggaactcctcagcagcgcctccttcagctccacagccagacgccctcagacagcaaagcctacccccgcgccgcgccctgcccgccgctgcgatgctcgcccgcgccctgctgctgtgcgcggtcctggcgctcagccatacagcaaatccttgctgttcccacccatgtcaaaaccgaggtgtatgtatgagtgtgggatttgaccagtataagtgcgattgtacccggacaggattctatggagaaaactgctcaacaccggaatttttgacaagaataaaattatttctgaaacccactccaaacacagtgcactacatacttacccacttcaagggattttggaacgttgtgaataacattcccttccttcgaaatgcaattatgagttatgtgttgacatccagatcacatttgattgacagtccaccaacttacaatgctgactatggctacaaaagctgggaagccttctctaacctctcctattatactagagcccttcctcctgtgcctgatgattgcccgactcccttgggtgtcaaaggtaaaaagcagcttcctgattcaaatgagattgtggaaaaattgcttctaagaagaaagttcatccctgatccccagggctcaaacatgatgtttgcattctttgcccagcacttcacgcatcagtttttcaagacagatcataagcgagggccagctttcaccaacgggctgggccatggggtggacttaaatcatatttacggtgaaactctggctagacagcgtaaactgcgccttttcaaggatggaaaaatgaaatatcagataattgatggagagatgtatcctcccacagtcaaagatactcaggcagagatgatctaccctcctcaagtccctgagcatctacggtttgctgtggggcaggaggtctttggtctggtgcctggtctgatgatgtatgccacaatctggctgcgggaacacaacagagtatgcgatgtgcttaaacaggagcatcctgaatggggtgatgagcagttgttccagacaagcaggctaatactgataggagagactattaagattgtgattgaagattatgtgcaacacttgagtggctatcacttcaaactgaaatttgacccagaactacttttcaacaaacaattccagtaccaaaatcgtattgctgctgaatttaacaccctctatcactggcatccccttctgcctgacacctttcaaattcatgaccagaaatacaactatcaacagtttatctacaacaactctatattgctggaacatggaattacccagtttgttgaatcattcaccaggcaaattgctggcagggttgctggtggtaggaatgttccacccgcagtacagaaagtatcacaggcttccattgaccagagcaggcagatgaaataccagtcttttaatgagtaccgcaaacgctttatgctgaagccctatgaatcatttgaagaacttacaggagaaaaggaaatgtctgcagagttggaagcactctatggtgacatcgatgctgtggagctgtatcctgcccttctggtagaaaagcctcggccagatgccatctttggtgaaaccatggtagaagttggagcaccattctccttgaaaggacttatgggtaatgttatatgttctcctgcctactggaagccaagcacttttggtggagaagtgggttttcaaatcatcaacactgcctcaattcagtctctcatctgcaataacgtgaagggctgtccctttacttcattcagtgttccagatccagagctcattaaaacagtcaccatcaatgcaagttcttcccgctccggactagatgatatcaatcccacagtactactaaaagaacgttcgactgaactgtagaagtctaatgatcatatttatttatttatatgaaccatgtctattaatttaattatttaataatatttatattaaactccttatgttacttaacatcttctgtaacagaagtcagtactcctgttgcggagaaaggagtcatacttgtgaagacttttatgtcactactctaaagattttgctgttgctgttaagtttggaaaacagtttttattctgttttataaaccagagagaaatgagttttgacgtctttttacttgaatttcaacttatattataagaacgaaagtaaagatgtttgaatacttaaacactgtcacaagatggcaaaatgctgaaagtttttacactgtcgatgtttccaatgcatcttccatgatgcattagaagtaactaatgtttgaaattttaaagtacttttggttatttttctgtcatcaaacaaaaacaggtatcagtgcattattaaatgaatatttaaattagacattaccagtaatttcatgtctactttttaaaatcagcaatgaaacaataatttgaaatttctaaattcatagggtagaatcacctgtaaaagcttgtttgatttcttaaagttattaaacttgtacatataccaaaaagaagctgtcttggatttaaatctgtaaaatcagtagaaattttactacaattgcttgttaaaatattttataagtgatgttcctttttcaccaagagtataaacctttttagtgtgactgttaaaacttccttttaaatcaaaatgccaaatttattaaggtggtggagccactgcagtgttatcttaaaataagaatattttgttgagatattccagaatttgtttatatggctggtaacatgtaaaatctatatcagcaaaagggtctacctttaaaataagcaataacaaagaagaaaaccaaattattgttcaaatttaggtttaaacttttgaagcaaacttttttttatccttgtgcactgcaggcctggtactcagattttgctatgaggttaatgaagtaccaagctgtgcttgaataatgatatgttttctcagattttctgttgtacagtttaatttagcagtccatatcacattgcaaaagtagcaatgacctcataaaatacctcttcaaaatgcttaaattcatttcacacattaattttatctcagtcttgaagccaattcagtaggtgcattggaatcaagcctggctacctgcatgctgttccttttcttttcttcttttagccattttgctaagagacacagtcttctcatcacttcgtttctcctattttgttttactagttttaagatcagagttcactttctttggactctgcctatattttcttacctgaacttttgcaagttttcaggtaaacctcagctcaggactgctatttagctcctcttaagaagattaaaagagaaaaaaaaaggcccttttaaaaatagtatacacttattttaagtgaaaagcagagaattttatttatagctaattttagctatctgtaaccaagatggatgcaaagaggctagtgcctcagagagaactgtacggggtttgtgactggaaaaagttacgttcccattctaattaatgccctttcttatttaaaaacaaaaccaaatgatatctaagtagttctcagcaataataataatgacgataatacttcttttccacatctcattgtcactgacatttaatggtactgtatattacttaatttattgaagattattatttatgtcttattaggacactatggttataaactgtgtttaagcctacaatcattgatttttttttgttatgtcacaatcagtatatcttctttggggttacctctctgaatattatgtaaacaatccaaagaaatgattgtattaagatttgtgaataaatttttagaaatctgattggcatattgagatatttaaggttgaatgtttgtccttaggataggcctatgtgctagcccacaaagaatattgtctcattagcctgaatgtgccataagactgaccttttaaaatgttttgagggatctgtggatgcttcgttaatttgttcagccacaatttattgagaaaatattctgtgtcaagcactgtgggttttaatatttttaaatcaaacgctgattacagataatagtatttatataaataattgaaaaaaattttcttttgggaagagggagaaaatgaaataaatatcattaaagataactcaggagaatcttctttacaattttacgtttagaatgtttaaggttaagaaagaaatagtcaatatgcttgtataaaacactgttcactgttttttttaaaaaaaaaacttgatttgttattaacattgatctgctgacaaaacctgggaatttgggttgtgtatgcgaatgtttcagtgcctcagacaaatgtgtatttaacttatgtaaaagataagtctggaaataaatgtctgtttatttttgtactatttaaaaattgacagatcttttctgaagataaactttgattgtttctata

SEQ ID NO: 3304 - DNA, 1611 bp, Homo sapiens
  source 1..1611: mol_type = genomic DNA
agtttggttccagcaacaaattatatatatacacccctgaatcaacttaagggtggtacaattgtcaatgtctatggtgttgtgaagttctttaagcccccatatctaagcaaaggaactgattattgctcagttgtaactattgtggaccagacaaatgtaaaactaacttgcctgctctttagtggaaactatgaagcccttccaataatttataaaaatggagatattgttcgctttcacaggctgaagattcaagtatataaaaaggagactcagggtatcaccagctctggctttgcatctttgacgtttgagggaactttgggagcccctatcatacctcgcacttcaagcaagtattttaacttcactactgaggaccacaaaatggtagaagccttacgtgtttgggcatctactcatatgtcaccgtcttggacattactaaaattgtgtgatgttcagccaatgcagtattttgacctgacttgtcagctcttgggcaaagcagaagtggacggagcatcatttcttctaaaggtatgggatggcaccaggacaccatttccatcttggagagtcttaatacaagaccttgttcttgaaggtgatttaagtcacatccatcggctacaaaatctgacaatagacattttagtctacgataaccatgttcatgtggcaagatctctgaaggttggaagctttcttagaatctatagccttcataccaaacttcaatcaatgaattcagagaatcagacaatgttaagtttagagtttcatcttcatggaggtaccagttacggtcggggaatcagggtcttgccagaaagtaactctgatgtggatcaactgaaaaaggatttagaatctgcaaatttgacagccaatcagcattcagatgttatctgtcaatcagaacctgacgacagctttccaagctctggatcagtatcattatacgaggtagaaagatgtcaacagctatctgctacaatacttacagatcatcagtatttggagaggacaccactatgtgccattttgaaacaaaaagctcctcaacaataccgcatccgagcaaaattgaggtcatataagcccagaagactatttcagtctgttaaacttcattgccctaaatgtcatttgctgcaagaagttccacatgagggcgatttggatataatttttcaggatggtgcaactaaaaccccagatgtcaagctacaaaatacatcattatatgattcaaaaatctggaccactaaaaatcaaaaaggacgaaaagtagcagttcattttgtgaaaaataatggtattctcccgctttcaaatgaatgtctacttttgatagaaggaggtacactcagtgaaatttgcaaactctcgaacaagtttaatagtgtaattcctgtgagatctggccacgaagacctggaacttttggacctttcagcaccatttcttatacaaggaacaatacatcactatggatgtaaacagtgttctagtttgagatccatacaaaatctaaattccctggttgataaaacatcgtggattccttcttctgtggcagaagagctggacattgtgctgcag

SEQ ID NO: 3305 - DNA, 4080 bp, Homo sapiens
  source 1..4080: mol_type = genomic DNA
cagtatttcgccaaacctccaggcgccatcagtgtgtgaaccgttacgcagctggtccaccgcgggcggagaacaagcgactatgcccagggatcctgcacgcatgcgtggagctgaaccgtcagcgtgcgtgtgacgtcacctgcgcgcccgcctaaactcttcctagggttctttctagagtacggcagcaagttgtcagattccctagttgaatttgctttggacatcagtgtgaagcagaactgatatgccacttgaattaataaaggaagtcaatggggtgcctgaagttcagccgctgagtaaattacataaagtagatttcggatccctacagccaggttacaattatagcaagaaatatattcagggaaaactttcacttatctcttctttaacttatcgtggaaataaaacagctgttttgcagattggactacaaggacaccattgcagtggctagatttattgtttttttagcttcttcatctacaagcagagatggtaaaccttgcatatttttgaaagcatttgaagacctcaaatcaactgtttatgtttatgtcaaatctttaagagatttttctacagaatcaatgtctttggttccagcaacaaattatatatatacacccctgaatcaacttaagggtggtacaattgtcaatgtctatggtgttgtgaagttctttaagcccccatatctaagcaaaggaactgattattgctcagttgtaactattgtggaccagacaaatgtaaaactaacttgcctgctctttagtggaaactatgaagcccttccaataatttataaaaatggagatattgttcgctttcacaggctgaagattcaagtatataaaaaggagactcagggtatcaccagctctggctttgcatctttgacgtttgagggaactttgggagcccctatcatacctcgcacttcaagcaagtattttaacttcactactgaggaccacaaaatggtagaagccttacgtgtttgggcatctactcatatgtcaccgtcttggacattactaaaattgtgtgatgttcagccaatgcagtattttgacctgacttgtcagctcttgggcaaagcagaagtggacggagcatcatttcttctaaaggtatgggatggcaccaggacaccatttccatcttggagagtcttaatacaagaccttgttcttgaaggtgatttaagtcacatccatcggctacaaaatctgacaatagacattttagtctacgataaccatgttcatgtggcaagatctctgaaggttggaagctttcttagaatctatagccttcataccaaacttcaatcaatgaattcagagaatcagacaatgttaagtttagagtttcatcttcatggaggtaccagttacggtcggggaatcagggtcttgccagaaagtaactctgatgtggatcaactgaaaaaggatttagaatctgcaaatttgacagccaatcagcattcagatgttatctgtcaatcagaacctgacgacagctttccaagctctggatcagtatcattatacgaggtagaaagatgtcaacagctatctgctacaatacttacagatcatcagtatttggagaggacaccactatgtgccattttgaaacaaaaagctcctcaacaataccgcatccgagcaaaattgaggtcatataagcccagaagactatttcagtctgttaaacttcattgccctaaatgtcatttgctgcaagaagttccacatgagggcgatttggatataatttttcaggatggtgcaactaaaaccccagatgtcaagctacaaaatacatcattatatgattcaaaaatctggaccactaaaaatcaaaaaggacgaaaagtagcagttcattttgtgaaaaataatggtattctcccgctttcaaatgaatgtctacttttgatagaaggaggtacactcagtgaaatttgcaaactctcgaacaagtttaatagtgtaattcctgtgagatctggccacgaagacctggaacttttggacctttcagcaccatttcttatacaaggaacaatacatcactatggatgtaaacagtgttctagtttgagatccatacaaaatctaaattccctggttgataaaacatcgtggattccttcttctgtggcagaagcactgggtattgtacccctccaatatgtgtttgttatgacctttacacttgatgatggaacaggagtactagaagcctatctcatggattctgacaaattcttccagattccagcatcagaagttctgatggatgatgaccttcagaaaagtgtggatatgatcatggatatgttttgtcctccaggaataaaaattgatgcatatccgtggttggaatgcttcatcaagtcatacaatgtcacaaatggaacagataatcaaatttgctatcagatttttgacaccacagttgcagaagatgtaatctaatattgccatccaatttagcatacataaaatgttgccactcaccttccctgtttgagcttcttttcctgacctgagttttgtatcagcaatgttgatgatgttagcatgggtatgggattagaaaatgtccttaccttaaatctcttggcttttactgggtgcaaggtaaataatggctatggattttgttttgctttctgttttgcttttgtacaaagagacctgcttaaacaagtactgctgagataagtgtctgatcaagctacagtgtactttaagtagaaatggcaaagttgctttgttggggtgctgatactgatgattttaggataaattcatttctttaaacttgtaatacatggttttattgcttgtttctctccaggatagtagagatttctctatttcacctcaacctaataaaagtggtcagatttataatgttaatgacttaatattatccttttctaatagtctcatgtaaaatatgccgctattacaacttacaactaattgaatgagatgttaacttagtaaaatagtttgatttttacctgacagtgtttgtcaaatttaaaatcatgaatattcaattttatacaaacatttatatatatatatatagatttgtgtatgttatttgccaaagacagatataaattacctggtttaatattagtgaagaataaataagtgcacacatttcaactgtttcatttatttgccctaagttgagctgaaaaatgatatgaggcaaagaatcgaaataggtgtggcaatgcagcagatgtttagggctgtctacatcccaggtactgtgctaagcactaaacatgtatttgatcctcacagcaacctatttttccgataagaaatctgaggcttgattgataagctgacttgactaagttcacacagtttgtaaaagctagagtctgtgccttaattcacataatctctattcagagcctgtactgttaaccactcaaggattctggaacagaagctaacagttttctgcaacgagtctttgacttaaacatctgaaataacattggaaatagattataagaggagtcagtgtgtttttctatagtttcaaaatacttttaacatcttattgtcaaaaagattggataactgactttctttgctcataataactctaaattctagttcctgagtacattaacacatcttctttacctaactaccaatgtcccccatcatcgacttatcagcttgtttgagacaatgagaaagactgattttattttcaagaatatagactcttggttcaaaacattttcaggaaaaatattttaaaaccctacagttgaacaggtgtgtttccgtgttgatgatgtgctcaggatacaaaggtgaaataaacattttttctgccttcaggaagccctcaatctagaagagtagaggtccaaaggtgccatatgttcacactgtgagcctgcaagatctccacgttaacaaaggaaaactcttcctatgaatcttcatgatgataggccatgtctcttcttatttttgttttaaataaacatccaccttatcatga

SEQ ID NO: 3306 - DNA, 2028 bp, Homo sapiens
  source 1..2028: mol_type = genomic DNA
tctctttctttagttccagcaacaaattatatatatacacccctgaatcaacttaagggtggtacaattgtcaatgtctatggtgttgtgaagttctttaagcccccatatctaagcaaaggaactgattattgctcagttgtaactattgtggaccagacaaatgtaaaactaacttgcctgctctttagtggaaactatgaagcccttccaataatttataaaaatggagatattgttcgctttcacaggctgaagattcaagtatataaaaaggagactcagggtatcaccagctctggctttgcatctttgacgtttgagggaactttgggagcccctatcatacctcgcacttcaagcaagtattttaacttcactactgaggaccacaaaatggtagaagccttacgtgtttgggcatctactcatatgtcaccgtcttggacattactaaaattgtgtgatgttcagccaatgcagtattttgacctgacttgtcagctcttgggcaaagcagaagtggacggagcatcatttcttctaaaggtatgggatggcaccaggacaccatttccatcttggagagtcttaatacaagaccttgttcttgaaggtgatttaagtcacatccatcggctacaaaatctgacaatagacattttagtctacgataaccatgttcatgtggcaagatctctgaaggttggaagctttcttagaatctatagccttcataccaaacttcaatcaatgaattcagagaatcagacaatgttaagtttagagtttcatcttcatggaggtaccagttacggtcggggaatcagggtcttgccagaaagtaactctgatgtggatcaactgaaaaaggatttagaatctgcaaatttgacagccaatcagcattcagatgttatctgtcaatcagaacctgacgacagctttccaaatggagtctcgcttcgtcctccaggctggagttcagtggcacggtctcggctcattgcagcctccacctcctgagttcaagcttctcctgcctcagcctcccaagtagctgggattacaggctctggatcagtatcattatacgaggtagaaagatgtcaacagctatctgctacaatacttacagatcatcagtatttggagaggacaccactatgtgccattttgaaacaaaaagctcctcaacaataccgcatccgagcaaaattgaggtcatataagcccagaagactatttcagtctgttaaacttcattgccctaaatgtcatttgctgcaagaagttccacatgagggcgatttggatataatttttcaggatggtgcaactaaaaccccagatgtcaagctacaaaatacatcattatatgattcaaaaatctggaccactaaaaatcaaaaaggacgaaaagtagcagttcattttgtgaaaaataatggtattctcccgctttcaaatgaatgtctacttttgatagaaggaggtacactcagtgaaatttgcaaactctcgaacaagtttaatagtgtaattcctgtgagatctggccacgaagacctggaacttttggacctttcagcaccatttcttatacaaggaacaatacatcactatggatgtaaacagtgttctagtttgagatccatacaaaatctaaattccctggttgataaaacatcgtggattccttcttctgtggcagaagcactgggtattgtacccctccaatatgtgtttgttatgacctttacacttgatgatggaacaggagtactagaagcctatctcatggattctgacaaattcttccagattccagcatcagaagttctgatggatgatgaccttcagaaaagtgtggatatgatcatggatatgttttgtcctccaggaataaaaattgatgcatatccgtggttggaatgcttcatcaagtcatacaatgtcacaaatggaacagataatcaaatttgctatcagatttttgacaccacagttgcagaagatgtaatctaa

SEQ ID NO: 3307 - DNA, 3950 bp, Homo sapiens
  source 1..3950: mol_type = genomic DNA
gtcagtatttcgccaaacctccaggcgccatcagtgtgtgaaccgttacgcagctggtccaccgcgggcggagaacaagcgactatgcccagggatcctgcacgcatgcgtggagctgaaccgtcagcgtgcgtgtgacgtcacctgcgcgcccgcctaaactcttcctagggttctttctagagtacggcagcaagttgtcagattccctagttgaatttgctttggacatcagtgtgaagcagaactgatatgccacttgaattaataaaggaagtcaatggggtgcctgaagttcagccgctgagtaaattacataaagtagatttcggatccctacagccaggttacaattatagcaagaaatatattcagggaaaactttcacttatctcttctttaacttatcgtggaaataaaacagctgttttgcagattggactacaaggacaccattgcagtggctagatttattgtttttttagcttcttcatctacaagcagagatggtaaaccttgcatatttttgaaagcatttgaagacctcaaatcaactgtttatgtttatgtcaaatctttaagagatttttctacagaatcaatgtctttggttccagcaacaaattatatatatacacccctgaatcaacttaagggtggtacaattgtcaatgtctatggtgttgtgaagttctttaagcccccatatctaagcaaaggaactgattcaagtatataaaaaggagactcagggtatcaccagctctggctttgcatctttgacgtttgagggaactttgggagcccctatcatacctcgcacttcaagcaagtattttaacttcactactgaggaccacaaaatggtagaagccttacgtgtttgggcatctactcatatgtcaccgtcttggacattactaaaattgtgtgatgttcagccaatgcagtattttgacctgacttgtcagctcttgggcaaagcagaagtggacggagcatcatttcttctaaaggtatgggatggcaccaggacaccatttccatcttggagagtcttaatacaagaccttgttcttgaaggtgatttaagtcacatccatcggctacaaaatctgacaatagacattttagtctacgataaccatgttcatgtggcaagatctctgaaggttggaagctttcttagaatctatagccttcataccaaacttcaatcaatgaattcagagaatcagacaatgttaagtttagagtttcatcttcatggaggtaccagttacggtcggggaatcagggtcttgccagaaagtaactctgatgtggatcaactgaaaaaggatttagaatctgcaaatttgacagccaatcagcattcagatgttatctgtcaatcagaacctgacgacagctttccaagctctggatcagtatcattatacgaggtagaaagatgtcaacagctatctgctacaatacttacagatcatcagtatttggagaggacaccactatgtgccattttgaaacaaaaagctcctcaacaataccgcatccgagcaaaattgaggtcatataagcccagaagactatttcagtctgttaaacttcattgccctaaatgtcatttgctgcaagaagttccacatgagggcgatttggatataatttttcaggatggtgcaactaaaaccccagatgtcaagctacaaaatacatcattatatgattcaaaaatctggaccactaaaaatcaaaaaggacgaaaagtagcagttcattttgtgaaaaataatggtattctcccgctttcaaatgaatgtctacttttgatagaaggaggtacactcagtgaaatttgcaaactctcgaacaagtttaatagtgtaattcctgtgagatctggccacgaagacctggaacttttggacctttcagcaccatttcttatacaaggaacaatacatcactatggatgtaaacagtgttctagtttgagatccatacaaaatctaaattccctggttgataaaacatcgtggattccttcttctgtggcagaagcactgggtattgtacccctccaatatgtgtttgttatgacctttacacttgatgatggaacaggagtactagaagcctatctcatggattctgacaaattcttccagattccagcatcagaagttctgatggatgatgaccttcagaaaagtgtggatatgatcatggatatgttttgtcctccaggaataaaaattgatgcatatccgtggttggaatgcttcatcaagtcatacaatgtcacaaatggaacagataatcaaatttgctatcagatttttgacaccacagttgcagaagatgtaatctaatattgccatccaatttagcatacataaaatgttgccactcaccttccctgtttgagcttcttttcctgacctgagttttgtatcagcaatgttgatgatgttagcatgggtatgggattagaaaatgtccttaccttaaatctcttggcttttactgggtgcaaggtaaataatggctatggattttgttttgctttctgttttgcttttgtacaaagagacctgcttaaacaagtactgctgagataagtgtctgatcaagctacagtgtactttaagtagaaatggcaaagttgctttgttggggtgctgatactgatgattttaggataaattcatttctttaaacttgtaatacatggttttattgcttgtttctctccaggatagtagagatttctctatttcacctcaacctaataaaagtggtcagatttataatgttaatgacttaatattatccttttctaatagtctcatgtaaaatatgccgctattacaacttacaactaattgaatgagatgttaacttagtaaaatagtttgatttttacctgacagtgtttgtcaaatttaaaatcatgaatattcaattttatacaaacatttatatatatatatatagatttgtgtatgttatttgccaaagacagatataaattacctggtttaatattagtgaagaataaataagtgcacacatttcaactgtttcatttatttgccctaagttgagctgaaaaatgatatgaggcaaagaatcgaaataggtgtggcaatgcagcagatgtttagggctgtctacatcccaggtactgtgctaagcactaaacatgtatttgatcctcacagcaacctatttttccgataagaaatctgaggcttgattgataagctgacttgactaagttcacacagtttgtaaaagctagagtctgtgccttaattcacataatctctattcagagcctgtactgttaaccactcaaggattctggaacagaagctaacagttttctgcaacgagtctttgacttaaacatctgaaataacattggaaatagattataagaggagtcagtgtgtttttctatagtttcaaaatacttttaacatcttattgtcaaaaagattggataactgactttctttgctcataataactctaaattctagttcctgagtacattaacacatcttctttacctaactaccaatgtcccccatcatcgacttatcagcttgtttgagacaatgagaaagactgattttattttcaagaatatagactcttggttcaaaacattttcaggaaaaatattttaaaaccctacagttgaacaggtgtgtttccgtgttgatgatgtgctcaggatacaaaggtgaaataaacattttttctgccttcaggaagccctcaatctagaagagtagaggtccaaaggtgccatatgttcacactgtgagcctgcaagatctccacgttaacaaaggaaaactcttcctatgaatcttcatgatgataggccatgtctcttcttatttttgttttaaataaacatccaccttatcatg

SEQ ID NO: 3308 - DNA, 2006 bp, Homo sapiens
  source 1..2006: mol_type = genomic DNA
tctctttctttagttccagcaacaaattatatatatacacccctgaatcaacttaagggtggtacaattgtcaatgtctatggtgttgtgaagttctttaagcccccatatctaagcaaaggaactgattattgctcagttgtaactattgtggaccagacaaatgtaaaactaacttgcctgctctttagtggaaactatgaagcccttccaataatttataaaaatggagatattgttcgctttcacaggctgaagattcaagtatataaaaaggagactcagggtatcaccagctctggctttgcatctttgacgtttgagggaactttgggagcccctatcatacctcgcacttcaagcaagtattttaacttcactactgaggaccacaaaatggtagaagccttacgtgtttgggcatctactcatatgtcaccgtcttggacattactaaaattgtgtgatgttcagccaatgcagtattttgacctgacttgtcagctcttgggcaaagcagaagtggacggagcatcatttcttctaaaggtatgggatggcaccaggacaccatttccatcttggagagtcttaatacaagaccttgttcttgaaggtgatttaagtcacatccatcggctacaaaatctgacaatagacattttagtctacgataaccatgttcatgtggcaagatctctgaaggttggaagctttcttagaatctatagccttcataccaaacttcaatcaatgaattcagagaatcagacaatgttaagtttagagtttcatcttcatggaggtaccagttacggtcggggaatcagggtcttgccagaaagtaactctgatgtggatcaactgaaaaaggatttagaatctgcaaatttgacagccaatcagcattcagatgttatctgtcaatcagaacctgacgacagctttccaagctctggatcagtatcattatacgaggtagaaagatgtcaacagctatctgctacaatacttacagatcatcagtatttggagaggacaccactatgtgccattttgaaacaaaaagctcctcaacaataccgcatccgagcaaaattgaggtcatataagcccagaagactatttcagtctgttaaacttcattgccctaaatgtcatttgctgcaagaagttccacatgagggcgatttggatataatttttcaggatggtgcaactaaaaccccagatgtcaagctacaaaatacatcattatatgattcaaaaatctggaccactaaaaatcaaaaaggacgaaaagtagcagttcattttgtgaaaaataatggtattctcccgctttcaaatgaatgtctacttttgatagaagttcttctgtaagctggatatatcccctttgtaaacagaagaggaaactgagaccaagagaaaatggtgaagtactcaaggttaaagacttaataaatggaggtacactcagtgaaatttgcaaactctcgaacaagtttaatagtgtaattcctgtgagatctggccacgaagacctggaacttttggacctttcagcaccatttcttatacaaggaacaatacatcactatggatgtaaacagtgttctagtttgagatccatacaaaatctaaattccctggttgataaaacatcgtggattccttcttctgtggcagaagcactgggtattgtacccctccaatatgtgtttgttatgacctttacacttgatgatggaacaggagtactagaagcctatctcatggattctgacaaattcttccagattccagcatcagaagttctgatggatgatgaccttcagaaaagtgtggatatgatcatggatatgttttgtcctccaggaataaaaattgatgcatatccgtggttggaatgcttcatcaagtcatacaatgtcacaaatggaacagataatcaaatttgctatcagatttttgacaccacagttgcagaagatgtaatctaa

SEQ ID NO: 3309 - DNA, 806 bp, Homo sapiens
  source 1..806: mol_type = genomic DNA
gaaccgttacgcagctggtccaccgcgggcggagaacaagcgactatgcccagggatcctgcacgcatgcgtggagctgaaccgtcagcgtgcgtgtgacgtcacctgcgcgcccgcctaaactcttcctagggttctttctagagtacggcaagttgtcagattccctagttgaatttgctttggacatcagtgtgaagcagaactgatatgccacttgaattaataaaggaagtcaatggggtgcctgaagttcagccgctgagtaaattacataaagtagatttcggatccctacagccaggttacaattatagcaagaaatatattcagggaaaactttcacttatctcttctttaacttatcgtggaaataaaacagctgttttgcagattggactacaaggacaccattgcagtggctagatttattgtttttttagcttcttcatctacaagcagagatggtaaaccttgcatatttttgaaagcatttgaagacctcaaatcaactgtttatgtttatgtcaaatctttaagagatttttctacagaatcaatgtctttggttccagcaacaaattatatatatacacccctgaatcaacttaagggtggtacaattgtcaatgtctatggtgttgtgaagttctttaagcccccatatctaagcaaaggaactgattattgctcagttgtaactattgtggaccagacaaatgtaaaactaacttgcctgctctttagtggaaactatgaagcccttccaataatttataaaaatggagatattgttcgctttcaca

SEQ ID NO: 3310 - DNA, 1819 bp, Homo sapiens
  source 1..1819: mol_type = genomic DNA
tctctttctttagttccagcaacaaattatatatatacacccctgaatcaacttaagggtggtacaattgtcaatgtctatggtgttgtgaagttctttaagcccccatatctaagcaaaggaactgattattgctcagttgtaactattgtggaccagacaaatgtaaaactaacttgcctgctctttagtggaaactatgaagcccttccaataatttataaaaatggagatattgttcgctttcacaggctgaagattcaagtatataaaaaggagactcagggtatcaccagctctggctttgcatctttgacgtttgagggaactttgggagcccctatcatacctcgcacttcaagcaagtattttaacttcactactgaggaccacaaaatggtagaagccttacgtgtttgggcatctactcatatgtcaccgtcttggacattactaaaattgtgtgatgttcagccaatgcagtattttgacctgacttgtcagctcttgggcaaagcagaagtggacggagcatcatttcttctaaaggtatgggatggcaccaggacaccatttccatcttggagagtcttaatacaagaccttgttcttgaaggtgatttaagtcacatccatcggctacaaaatctgacaatagacattttagtctacgataaccatgttcatgtggcaagatctctgaaggttggaagctttcttagaatctatagccttcataccaaacttcaatcaatgaattcagagaatcagacaatgttaagtttagagtttcatcttcatggaggtaccagttacggtcggggaatcagggtcttgccagaaagtaactctgatgtggatcaactgaaaaaggatttagaatctgcaaatttgacagccaatcagcattcagatgttatctgtcaatcagaacctgacgacagctttccaagctctggatcagtatcattatacgaggtagaaagatgtcaacagctatctgctacaatacttacagatcatcagtatttggagaggacaccactatgtgccattttgaaacaaaaagctcctcaacaataccgcatccgagcaaaattgaggtcatataagcccagaagactatttcagtctgttaaacttcattgccctaaatgtcatttgctgcaagaagttccacatgagggcgatttggatataatttttcaggatggtgcaactaaaaccccagatgtcaagctacaaaatacatcattatatgattcaaaaatctggaccactaaaaatcaaaaaggacgaaaagtagcagttcattttgtgaaaaataatggtattctcccgctttcaaatgaatgtctacttttgatagaaggaggtacactcagtgaaatttgcaaactctcgaacaagtttaatagtgtaattcctgtgagatctggccacgaagacctggaacttttggacctttcagcaccatttcttatacaaggaacaatacatcactatggcactgggtattgtacccctccaatatgtgtttgttatgacctttacacttgatgatggaacaggagtactagaagcctatctcatggattctgacaaattcttccagattccagcatcagaagttctgatggatgatgaccttcagaaaagtgtggatatgatcatggatatgttttgtcctccaggaataaaaattgatgcatatccgtggttggaatgcttcatcaagtcatacaatgtcacaaatggaacagataatcaaatttgctatcagatttttgacaccacagttgcagaagatgtaatctaa

SEQ ID NO: 3311 - DNA, 5675 bp, Homo sapiens
  source 1..5675: mol_type = genomic DNA
tcacctgaggaccccaggagcaagcacaagttcaaaatccacacttacggaagccccaccttctgcgatcactgtgggtcactgctctatggacttatccatcaagggatgaaatgtgacacctgcgatatgaacgttcacaagcaatgcgtcatcaatgtccccagcctctgcggaatggatcacactgagaagagggggcggatttacctaaaggctgaggttgctgatgaaaagctccatgtcacagtacgagatgcaaaaaatctaatccctatggatccaaacgggctttcagatccttatgtgaagctgaaacttattcctgatcccaagaatgaaagcaagcaaaaaaccaaaaccatccgctccacactaaatccgcagtggaatgagtcctttacattcaaattgaaaccttcagacaaagaccgacgactgtctgtagaaatctgggactgggatcgaacaacaaggaatgacttcatgggatccctttcctttggagtttcggagctgatgaagatgccggccagtggatggtacaagttgcttaaccaagaagaaggtgagtactacaacgtacccattccggaaggggacgaggaaggaaacatggaactcaggcagaaattcgagaaagccaaacttggccctgctggcaacaaagtcatcagtccctctgaagacaggaaacaaccttccaacaaccttgaccgagtgaaactcacggacttcaatttcctcatggtgttgggaaaggggagttttggaaaggtgatgcttgccgacaggaagggcacagaagaactgtatgcaatcaaaatcctgaagaaggatgtggtgattcaggatgatgacgtggagtgcaccatggtagaaaagcgagtcttggccctgcttgacaaacccccgttcttgacgcagctgcactcctgcttccagacagtggatcggctgtacttcgtcatggaatatgtcaacggtggggacctcatgtaccacattcagcaagtaggaaaatttaaggaaccacaagcagtattctatgcggcagagatttccatcggattgttctttcttcataaaagaggaatcatttatagggatctgaagttagataacgtcatgttggattcagaaggacatatcaaaattgctgactttgggatgtgcaaggaacacatgatggatggagtcacgaccaggaccttctgtgggactccagattatatcgccccagagataatcgcttatcagccgtatggaaaatctgtggactggtgggcctatggcgtcctgttgtatgaaatgcttgccgggcaggtaatgttttgctacattttcatgtttgtttattgctgtgttatgtgaatacttcagctctggttgggcctcgagagcaagacctgacgttttagtgcagctggtgttggcgtgacttccctgacccaggcgaaagagggagaaacgcccccttcaaagtggatcacgttcagtatgcacagaaattatctctggtcatagaaactccaaattgaaagctacaacctggagtgtagacagtgtcagtttcacgttatgaaatgtacatgttggccaggcgcggtggctcatggctataatcccagcactttcagaagccaaggcaggcggatcgcctgaggtcaggagttcgagaccaccctggccaacatggcgaaaccccatctctactaaaaatacaaaaattagccaggcgtggtggtgcacatctgtaaactcagctacttgagctactgaggcatgagaattgcttaagcctgagaggcggaggctgcagtgagccaagatcgtgccactgcactgcagcctgggcaacagagtgagacggtctcaaaaaagaaaaaaatgtgcacgttgatgacagcagtggcctctaagttttcagtatcttaaaactggggttgggttatatggttccctgcaagtttgtctgcaaagattgccccagctgctgccaatgtgtgtaattagtattattatttaaggaagaagacagttaccttgaagaagtgttttaatagtttctccccatctcctcctatctcacccttggcaattcgttgtaattttcactgaagtccagtgaggctgaacatccagttaaggaaggtaaattagctttctcttatgatgtgacatgtaccagataaccatgtgccttattgcctaacatggcactttctaatataatggccttaatatctgtgtcatcagggtgaatcgtactatctgccacttctaggcctggcccctaagacatcctttatgactgtcctcatgctctaggctgaaattaggaggaattagtggagaaatctgagaccctacaagatggtggggcactgacccacaggttcattcaaggacacaggtttctcctgtccgtcagccctactaccttttagggtctcagatttctccgctaattcctcctcctttcagccgagcacagatcagttacataggatatcttaggggccggcctagaaatggcatgtatcacttctgcctaggttccactggccacttggccccagtgggacacaaagaggcaggaagtatagcatatctgagagctcagcaggggaagcaggcttggtaatcacgaagcaggcttggtaatcacccagcagatctctgccttatactaaacatgattctgccgtgggcagctttttataattcccagcactcacatgctagtgccaagacctgtgactctccatagccagaagccttagtcagagacaatggaaagagatggccatgctgtgcgacagagccacccccaaagacatctttgtttctggggaaaaagtcttcccttcccacatgttacgtccattgactcatttattcattcactcaccacgtatttattcactgaatgcttacaatgtgcatggccataaggatgaacaaaacagacgagaatccttaacttcgtgaagcttacagcttagaggaggagagacagcagacaggttagataaggaaaatgtataacacagcagaggtaagctaggaagaaaagtaataaagcaggaaagaagatagtgttgggggaggttgaaattggccagagaggataaggttaagacctaaaggaagtatggggttgtctgtgtgcatatctgttgaaagggcattccaggcagagggagccaccacgcgaaggccctaaggccagggaatgtgcagccacgtttaagaaatggaagctcccagcagggctagagcagaattgagctagagagggagggagtaggaggcctgaggccagagaggaagaggctctggatcctgttgttagcagtggtgcatccccatgaggctgcagcaacctcagttcttgcctcctcagaagaaagaatttgactgtggggcatcaggtagagtgagagcctaagacaagctgtttctgttttgttttgttttgtttttgagatggagttttgctctgttgcccaggctggagtcggtggcgcgatctcagctcactgcaccctccgcctcccaggttcaagcaattttctgcctcagcctccttagtagctgggattacaggcacctgccaacacgcttggctaatttttgtatttttagtaaagacggggtttcaccatcttggccaggctggtcctgagctcctgacctcgtgatccacccgcctcagcctcccaaagtgctgggattacaggcatgagccactgcacctggcctaagacaagttttagagaggaatgaaagttcatggaaaagctttcaagcaggagcaaaaggaagtaaagtacacttggaagagggccaagccggcgacttgagagatctagtgcactctttgacttttgacttggggttttatgcattggtgttcttccagggtcttacatctcttctcccctgattcttcccttgggttgggctgtctgcgtgcgcagtggcctgctagtgcttgggaggggcggcatgtgcagtgtgtttactggagttacgtgtgtgctcagctgaggcattcttcccttaccagtcagatgtcctagaaggtggtgtaccagttaaactccgccatgttgccttttcatgcgcgtgcttgagcccactcgcccaactcctgaaatcttattgggaagctgctgctcaccagtttcaggtgtttccctttattgggagactgcctttccttggtgctggctgcgaccaattattattttacagagagagagttaaccacctgatggtcgcctgacattcctggtgggtagggggagccctctcctgccctgcccatgtccgaacagccacctgttgtaacactgtgaccatgaacgtcatctccagatcagcggctttgcctctaggatgggaggctgtggatgatctctcctttatgtgtctttcattatatttcctaaatactgaaatggtcttgtagacattgaaagacataaagctttagcctgcatttgatcattatttctcaatggtgttaaggcttgactgacatcaaaagagtggtttattatttatttagttcccctccccccaccccaaatcaaagcattcctcttaggccaaatacgtccgggtgtaaacacagaaaggcagttcgtacacagtcaccatcagtgagtcaatggctggagaaacaggagttgtctgctcctcaagttaatttccccctctttaaaatttttacagtaaaattcggctctgaattacaggccccctaagagtcctgcttttcatgaagtcacaaaaagccaagtccccctcttgatcccacttgaatgttcagctcttgagtctggaaaacaaaccctgctttcattaagagtcacatttgcatatgctaacatgcaaaaggggctgggcggaaacgaagccaggatctgtttccgagggcgctttacaagaggtcacgtgagtagactcttggccagcaggagacaagaatttcagaacccaggtctgcaggaaagtcctcctccctcccgcagcctggcttctcccctctccaagccttcctgggatctcattcactaggggagaactcagggaatgctttcttctggcagagaagtcccctttggggggtgcattttgaagctctgccacactggcctcagacctcatttgcaaattggcctgaggtgatttacaggccttatttaaaggtttccctactaagctcacgccccctggagagcaccaggctccagctctcaatagttctgcaaactttctggcctgtttccaatatttcccacactgcttctcagagccacttagcctgccttatatgcatactttcaggtctccatcatctctattaaaaacggtgatggctgggcccggtggctcacacctgtaatcccagcacttcgggaggccgaggcgggcggatcacgaggtcaggagattgagaccatcctggctaacacagtgaaaccccatctctactaaaaatgcaaaaaaaaattagccgagtgtggtggcgggcgcctgtagtcccagctactcgggaggctgaggcaggagaatggcgtgaacccgggaggcggagcttgcagtgagccgagatcgcgccactgcactgcagcctgggcgacagagcgagactccatctc

SEQ ID NO: 3312 - DNA, 3004 bp, Homo sapiens
  source 1..3004: mol_type = genomic DNA
gaggcaagaggtggttgggggggaccatggctgacgttttcccgggcaacgactccacggcgtctcaggacgtggccaaccgcttcgcccgcaaaggggcgctgaggcagaagaacgtgcacgaggtgaaggaccacaaattcatcgcgcgcttcttcaagcagcccaccttctgcagccactgcaccgacttcatctgggggtttgggaaacaaggcttccagtgccaagtttgctgttttgtggtccacaagaggtgccatgaatttgttactttttcttgtccgggtgcggataagggacccgacactgatgaccccaggagcaagcacaagttcaaaatccacacttacggaagccccaccttctgcgatcactgtgggtcactgctctatggacttatccatcaagggatgaaatgtgacacctgcgatatgaacgttcacaagcaatgcgtcatcaatgtccccagcctctgcggaatggatcacactgagaagagggggcggatttacctaaaggctgaggttgctgatgaaaagctccatgtcacagtacgagatgcaaaaaatctaatccctatggatccaaacgggctttcagatccttatgtgaagctgaaacttattcctgatcccaagaatgaaagcaagcaaaaaaccaaaaccatccgctccacactaaatccgcagtggaatgagtcctttacattcaaattgaaaccttcagacaaagaccgacgactgtctgtagaaatctgggactgggatcgaacaacaaggaatgacttcatgggatccctttcctttggagtttcggagctgatgaagatgccggccagtggatggtacaagttgcttaaccaagaagaaggtgagtactacaacgtacccattccggaaggggacgaggaaggaaacatggaactcaggcagaaattcgagaaagccaaacttggccctgctggcaacaaagtcatcagtccctctgaagacaggaaacaaccttccaacaaccttgaccgagtgaaactcacggacttcaatttcctcatggtgttgggaaaggggagttttggaaaggtgatgcttgccgacaggaagggcacagaagaactgtatgcaatcaaaatcctgaagaaggatgtggtgattcaggatgatgacgtggagtgcaccatggtagaaaagcgagtcttggccctgcttgacaaacccccgttcttgacgcagctgcactcctgcttccagacagtggatcggctgtacttcgtcatggaatatgtcaacggtggggacctcatgtaccacattcagcaagtaggaaaatttaaggaaccacaagcagtattctatgcggcagagatttccatcggattgttctttcttcataaaagaggaatcatttatagggatctgaagttagataacgtcatgttggattcagaaggacatatcaaaattgctgactttgggatgtgcaaggaacacatgatggatggagtcacgaccaggaccttctgtgggactccagattatatcgccccagagataatcgcttatcagccgtatggaaaatctgtggactggtgggcctatggcgtcctgttgtatgaaatgcttgccgggcagcctccatttgatggtgaagatgaagacgagctatttcagtctatcatggagcacaacgtttcctatccaaaatccttgtccaaggaggctgtttctgtctgcaaaggactgatgaccaaacacccagccaagcggctgggctgtgggcctgagggggagagggacgtgagagagcatgccttcttccggaggatcgactgggaaaaactggagaacagggagatccagccaccattcaagcccaaagtgtgtggcaaaggagcagagaactttgacaagttcttcacacgaggacagcccgtcttaacaccacctgatcagctggttattgctaacatagaccagtctgattttgaagggttctcgtatgtcaacccccagtttgtgcaccccatcttacagagtgcagtatgaaactcaccagcgagaacaaacacctccccagcccccagccctccccgcagtgggaagtgaatccttaaccctaaaattttaaggccacggccttgtgtctgattccatatggaggcctgaaaattgtagggttattagtccaaatgtgatcaactgttcagggtctctctcttacaaccaagaacattatcttagtggaagatggtacgtcatgctcagtgtccagtttaattctgtagaagttacgtctggctctaggttaacccttcctagaaagcaagcagactgttgccccattttgggtacaatttgatatactttccataccctccatctgtggatttttcagcattggaatcccccaaccagagatgttaaagtgagcctgtcccaggaaacatctccacccaagacgtctttggaatccaagaacaggaagccaagagagtgagcagggagggattgggggtgggggaggcctcaaaataccgactgcgtccattctctgcctccatggaaacagcccctagaatctgaaaggccgggataaacctaatcactgttcccaaacattgacaaatcctaacccaaccatggtccagcagttaccagtttaaacaaaaaaacctcagatgagtgttgggtgaatctgtcatctggtaccctccttggttgataactgtcttgatacttttcattctttgtaagaggccaaatcgtctaaggacgttgctgaacaagcgtgtgaaatcatttcagatcaaggataagccagtgtgtacatatgttcattttaatctctgggagattatttttccatccagggtgccatcagtaatcatgccactactcaccagtgttgttcaccaacacccacccccacacacaccaacattttgctgcctaccttgttatccttctcaagaagctgaagtgtacgccctctccccttttgtgct

SEQ ID NO: 3313 - DNA, 7969 bp, Homo sapiens
  source 1..7969: mol_type = genomic DNA
gcgcgccgcggccgccagagccggcgcaggggaagcgcccgcggccccgggtgcagcagcggccgccgcctcccgcgcctccccggcccgcagcccgcggtcccgcggccccggggccggcacctctcgggctccggctccccgcgcgcaagatggctgacccggctgcggggccgccgccgagcgagggcgaggagagcaccgtgcgcttcgcccgcaaaggcgccctccggcagaagaacgtgcatgaggtcaagaaccacaaattcaccgcccgcttcttcaagcagcccaccttctgcagccactgcaccgacttcatctggggcttcgggaagcagggattccagtgccaagtttgctgctttgtggtgcacaagcggtgccatgaatttgtcacattctcctgccctggcgctgacaagggtccagcctccgatgacccccgcagcaaacacaagtttaagatccacacgtactccagccccacgttttgtgaccactgtgggtcactgctgtatggactcatccaccaggggatgaaatgtgacacctgcatgatgaatgtgcacaagcgctgcgtgatgaatgttcccagcctgtgtggcacggaccacacggagcgccgcggccgcatctacatccaggcccacatcgacagggacgtcctcattgtcctcgtaagagatgctaaaaaccttgtacctatggaccccaatggcctgtcagatccctacgtaaaactgaaactgattcccgatcccaaaagtgagagcaaacagaagaccaaaaccatcaaatgctccctcaaccctgagtggaatgagacatttagatttcagctgaaagaatcggacaaagacagaagactgtcagtagagatttgggattgggatttgaccagcaggaatgacttcatgggatctttgtcctttgggatttctgaacttcagaaagccagtgttgatggctggtttaagttactgagccaggaggaaggcgagtacttcaatgtgcctgtgccaccagaaggaagtgaggccaatgaagaactgcggcagaaatttgagagggccaagatcagtcagggaaccaaggtcccggaagaaaagacgaccaacactgtctccaaatttgacaacaatggcaacagagaccggatgaaactgaccgattttaacttcctaatggtgctggggaaaggcagctttggcaaggtcatgctttcagaacgaaaaggcacagatgagctctatgctgtgaagatcctgaagaaggacgttgtgatccaagatgatgacgtggagtgcactatggtggagaagcgggtgttggccctgcctgggaagccgcccttcctgacccagctccactcctgcttccagaccatggaccgcctgtactttgtgatggagtacgtgaatgggggcgacctcatgtatcacatccagcaagtcggccggttcaaggagccccatgctgtattttacgctgcagaaattgccatcggtctgttcttcttacagagtaagggcatcatttaccgtgacctaaaacttgacaacgtgatgctcgattctgagggacacatcaagattgccgattttggcatgtgtaaggaaaacatctgggatggggtgacaaccaagacattctgtggcactccagactacatcgcccccgagataattgcttatcagccctatgggaagtccgtggattggtgggcatttggagtcctgctgtatgaaatgttggctgggcaggcaccctttgaaggggaggatgaagatgaactcttccaatccatcatggaacacaacgtagcctatcccaagtctatgtccaaggaagctgtggccatctgcaaagggctgatgaccaaacacccaggcaaacgtctgggttgtggacctgaaggcgaacgtgatatcaaagagcatgcatttttccggtatattgattgggagaaacttgaacgcaaagagatccagcccccttataagccaaaagcttgtgggcgaaatgctgaaaacttcgaccgatttttcacccgccatccaccagtcctaacacctcccgaccaggaagtcatcaggaatattgaccaatcagaattcgaaggattttcctttgttaactctgaatttttaaaacccgaagtcaagagctaagtagatgtgtagatctccgtccttcatttctgtcattcaagctcaacggctattgtggtgacatttttatgtttttcattgccaagttgcatccatgtttgattttctgatgagactagagtgacagtgtttcagaacccaaatgtcctcaggtagtttggagcatctctatgagatgggattatgcagatggcctatggaaaatgcagctgcataattaacacattatcaaagtcctcttacaatttattttccgcagcatgtcagctaagtagacccaatggggagagaaaatgcctgctttctttccctctttttctgcactgccatattcacccccaaccatccaatctgtggataattggatgttagcggtactcttccacttccgggcctggagcttggcttgtatccaagtgtatggttgctttgcctaagaggaatccctctatttcacctgttctggaggcaccagaccttgaaaagaacatgctcaaaataaaatgttatctgttatttttgtaaactcaaagttaagatgatcaaagttctaaaattccaagaatgtgcttttagacggtctcaatctaaaagcacttcaaggggtcaaagggcaaccagcttgggtgctacctcagtgttgtagtttctgatactttatgtctttgctcaccctcatccccaaactacttgaaaagggcatttggcaccactctctgaaacaacacagtcactctagcaaggcccccaaagggccctggttttacattacatttcaaactttatttgctttggggttttgtttctgttgttgttcaaatgcaaaaaaaagaaaaaaaaagaaaaaaaaaggtgactcacattgttacacatgctttaaaatatgtattcaaatgttattaaccacaatgacgacctgctttgatttaaccaagaagacggctgcggagcctagcagactcaggcctgtgggaatgggatttgttacaaatctaggtttgttactggcttcagaaagctaattaagtgctctgaaaaagacaccgtttcttgaaacaaagatggttgtattcctcactttgatgttgttttgcaagatgtttgtggaaatgttcatttgtatctggatctctgttatgtgccatttttcttctagcatcgagatacaataaaaaaaaaaaaaaagaaaagaagaagaaatactatttcaaggaaaactgctctttttgagaaacgtggacctaaactacaaagtgggaactgaggagggaactcaggagaaaggaactaactgcggagctttaatcttggccccagtgttcagccactcggaggggcgggggctgtggcccattcaggggctgctggtgggctgtagtggggtgggatgacctggccagagccaacgaggatactggagcccaaagtcaagtttagagaccagctgggaacgtgaatggggctcttgattttcttatcaaaatcaccactcctcccagcttggactaaatattctttctagcaagcagctttgtgagctccctgaagcccaaggaaacccttcggtgggagaaatttcatttctgtctgagaggattaaggcagcaggtgactccccctcctcgcctgccgtgtcctgctattctcaggcagctctaaggagaattcttatcacagttcaagtgatttccagaagttccagggcttctgagagaccatcaagggaactttaacaacttgacaaatgtccttgaagtaagatgcctcatctttagggaaaaatggggtttggatttctgcttaggcaaagtctcctgcagttcatccttctctgtcctcttcttgcttcaggcttggggaccgtccctgctgtccccactgtggtggcaatcaggacctaaggtgaagcaaacttgaagttctatctgacaagtttaggcagtaagagaaggagggaaatcggagcaaagctccctcactttattgttgagaaactggcatctggaaagaggaaggaatttgcccaaagtcagtcagctgggataaaaacctgggtgtcctgtccagaaagtgcagggtgctttctgctctgtagcaaggcagcagacatctctgagccaggcccaccaacaggcccttatctggtggttggatcatgatcccattttgcttggacatgctctcaggaagataaaaaccatggagaaacactaggccattgacaaatgatctgagacaactttagaaaacaatgtaggatgaatggaaagagaaagaaaggaaagaaagaagaaaaagaaagaaggaaagaaagaaagagaaaggaaggaaggaaagaaggaaggaaaagaaggaaggaaggaaggaatatagtgttataaatactgcactcaacattttccaaattcttgccattatttttcaaaagtttaatagtttgcagaaatagatactcaagccaaagtctgttttagagaaactttccatggaaagtcagaatttctaccacttccttttctatccacatttccagtgcagaagaaactgagaaacagagctttttgaagagaggacagggccatagcaacaaggaccttcttgggggattaatgggaggtcagtagaattaataaccctccttggatgagtgctactgttttcacatggcttcagatgctatcaacctcaaagaaatgatctcaacagagaagcttattctctcccaacttctacggtaaaatccaggagtattttctctggggatctgcccacaggacaaagtccataaaagcaagtcctgtctggaccatgtggttatctgaagcattagccatcaccagcacaacaaacggggcagggctttccaaggtggggctggtcagaagggaatctttgataagaggcccacaggcagggaaagcgaaatagggttgatgagaccaggggagacctaaaaaaaaggcagctttgtgtcttctagctccaaatatacctgccttttagctcacacactgtcctggagttctcagacctttaggggccctaacacagttcagttcatacaggggttcaaaagggacagtggcccatttgggagacctttaggatcaatgggaatcaattccattgttttgcctcagagtaaagtttctggctcggggacaattataagttgcaaaaaggatagaggcatatcccaagtcttccttcattccacaaataattacaaacaacctactgtgtgccaggcactattcttagcactggaaatacactagtgaagaagcagatgaggaccctgtttattgtttctctccaagaaattctccaagaatattgtttcttggagagaaataataaataaacaagacaatttctgaaagcaataagtgcaatcaagataattaaaggatgctaaagtgtgacttgtggggattgggagagagatgcacagacaatattaaagaggaggcattcgagctttgttgtgaacaccggaagtaacatgccgagcgcctgggggatggaaactcctatagcaccccacaggctaacagcaagcaggacaagacaaaaagggcaggtgggacatggtagagatggaccctacccaggaaacagctccatcagcatcttagcctgccccactctagccacacatacccacgtgtgctcctgagttcagtgtgcccacctcactcccacaccctcacatagacttggcaagagtaaggagggaactccatagagacattttacctatctcaggggagcagccacaaagaagcaagtcttgtaaaaggtcttttgcaaaggagagtgaacccagcaatgagagatccttaacagctagtgcccattagggggctaaacctaaagcctgggtggtgatggctcaaacgctaatgagtcagtgaatccttaccgaccccctggcctttataatctgaggcaactttggctgcagcccgggaatgtgcagggcactagggaatacaaggccttcttccctggttgtcttgtaataaaacagccatggggttgtccctccagtccgagagactgtgatgaggcctacatagcagcgatgtggtcaggtaaaaatcaggaacccactgaaatcttgggcaagccaccctgcctgcttgtgcctcggttctctcatatgtcatatataggaggtgaggactccagctccacctgccccaggtgggtgtggtgatgatgaggaaagacaagaggcttgcaaggaccctgaagaggtcggagcatcatacagattcctttattagcccacattctgatgttccctggtgagacttgccccaagcaattgctagtaaatgggggttaatttcttctccacctccctactgaacaaaaaaagaaatgccagacttactaggagaatcgagttgctttgagtttcttttgttttgttttgttttgttttgttttaaggctccccttacacaccctcctttaagctttgggttttctctcttatagtttgttgacacatgctaaaaatgtctttggagagaacttctgcctgataaacacccaattctagactgtgggtggattttcgagctgacggtggtcaattcctttcattaagcagtgatctgatttctccacatggccattctgccttcttgggggcagagtagatgggcagcagttcaccttttcagagaaagaggtcttctagccacctgggctgctactgaatggttttctccaggacgctctacctaatgattatttctataacattaagcatggtaataagtagcttccaattcaattcatcctaaagccaaagaaaatacagcaacacacacacacacacacacacacacacacacacacacacacacacaccactttatggcaattcttaactgacattcaatgacttacttcttttcttagaaaatttccaccacatttctatccccaagccaacatacaatgtgaaatgaaagccagtgcgtggagtgcagctgctaaaaattttcagcacagggctctttctgactctgctcatgagatggtatcagccacccaatgactggcgtatcttggtcctgtgtctttcttcttacgctgtgttaatgtgtttactttccatttggcagagagacaagagagacacctccaacttcgacaaagagttcaccagacagcctgtggaactgacccccactgataaactcttcatcatgaacttggaccaaaatgaatttgctggcttctcttatactaacccagagtttgtcattaatgtgtaggtgaatgcaaactccatcgttgagcctggggtgtaagacttcaagccaagcgtatgtatcaattctagtcttccaggattcacggtgcacatgctggcattcaacatgtggaaagcttgtcttagagggcttttctttgtatgtgtagcttgctagtttgttttctacatttgaaaatgtttagtttagaataagcgcattatccaattatagaggtacaattttccaaacttccagaaactcatcaaatgaacagacaatgtcaaaactactgtgtctgataccaaaatgcttcagtatttgtaatttttcaagtcagaagctgatgttcctggtaaaagtttttacagttattctataatatcttctttgaatgctaagcatgagcgatatttttaaaaattgtgagtaagctttgcagttactgtgaactattgtctcttggaggaagttttttgtttaagaattgatatgattaaactgaattaatatatgcaa

SEQ ID NO: 3314 - DNA, 2689 bp, Homo sapiens
  source 1..2689: mol_type = genomic DNA
gggcgagtgacagccccggctccgcgcgccgcggccgccagagccggcgcaggggaagcgcccgcggccccgggtgcagcagcggccgccgcctcccgcgcctccccggcccgcagcccgcggtcccgcggccccggggccggcacctctcgggctccggctccccgcgcgcaagatggctgacccggctgcggggccgccgccgagcgagggcgaggagagcaccgtgcgcttcgcccgcaaaggcgccctccggcagaagaacgtgcatgaggtcaagaaccacaaattcaccgcccgcttcttcaagcagcccaccttctgcagccactgcaccgacttcatctggggcttcgggaagcagggattccagtgccaagtttgctgctttgtggtgcacaagcggtgccatgaatttgtcacattctcctgccctggcgctgacaagggtccagcctccgatgacccccgcagcaaacacaagtttaagatccacacgtactccagccccacgttttgtgaccactgtgggtcactgctgtatggactcatccaccaggggatgaaatgtgacacctgcatgatgaatgtgcacaagcgctgcgtgatgaatgttcccagcctgtgtggcacggaccacacggagcgccgcggccgcatctacatccaggcccacatcgacagggacgtcctcattgtcctcgtaagagatgctaaaaaccttgtacctatggaccccaatggcctgtcagatccctacgtaaaactgaaactgattcccgatcccaaaagtgagagcaaacagaagaccaaaaccatcaaatgctccctcaaccctgagtggaatgagacatttagatttcagctgaaagaatcggacaaagacagaagactgtcagtagagatttgggattgggatttgaccagcaggaatgacttcatgggatctttgtcctttgggatttctgaacttcagaaagccagtgttgatggctggtttaagttactgagccaggaggaaggcgagtacttcaatgtgcctgtgccaccagaaggaagtgaggccaatgaagaactgcggcagaaatttgagagggccaagatcagtcagggaaccaaggtcccggaagaaaagacgaccaacactgtctccaaatttgacaacaatggcaacagagaccggatgaaactgaccgattttaacttcctaatggtgctggggaaaggcagctttggcaaggtcatgctttcagaacgaaaaggcacagatgagctctatgctgtgaagatcctgaagaaggacgttgtgatccaagatgatgacgtggagtgcactatggtggagaagcgggtgttggccctgcctgggaagccgcccttcctgacccagctccactcctgcttccagaccatggaccgcctgtactttgtgatggagtacgtgaatgggggcgacctcatgtatcacatccagcaagtcggccggttcaaggagccccatgctgtattttacgctgcagaaattgccatcggtctgttcttcttacagagtaagggcatcatttaccgtgacctaaaacttgacaacgtgatgctcgattctgagggacacatcaagattgccgattttggcatgtgtaaggaaaacatctgggatggggtgacaaccaagacattctgtggcactccagactacatcgcccccgagataattgcttatcagccctatgggaagtccgtggattggtgggcatttggagtcctgctgtatgaaatgttggctgggcaggcaccctttgaaggggaggatgaagatgaactcttccaatccatcatggaacacaacgtagcctatcccaagtctatgtccaaggaagctgtggccatctgcaaagggctgatgaccaaacacccaggcaaacgtctgggttgtggacctgaaggcgaacgtgatatcaaagagcatgcatttttccggtatattgattgggagaaacttgaacgcaaagagatccagcccccttataagccaaaagctagagacaagagagacacctccaacttcgacaaagagttcaccagacagcctgtggaactgacccccactgataaactcttcatcatgaacttggaccaaaatgaatttgctggcttctcttatactaacccagagtttgtcattaatgtgtaggtgaatgcaaactccatcgttgagcctggggtgtaagacttcaagccaagcgtatgtatcaattctagtcttccaggattcacggtgcacatgctggcattcaacatgtggaaagcttgtcttagagggcttttctttgtatgtgtagcttgctagtttgttttctacatttgaaaatgtttagtttagaataagcgcattatccaattatagaggtacaattttccaaacttccagaaactcatcaaatgaacagacaatgtcaaaactactgtgtctgataccaaaatgcttcagtatttgtaatttttcaagtcagaagctgatgttcctggtaaaagtttttacagttattctataatatcttctttgaatgctaagcatgagcgatatttttaaaaattgtgagtaagctttgcagttactgtgaactattgtctcttggaggaagttttttgtttaagaattgatatgattaaactgaattaatatatgcaa

SEQ ID NO: 3315 - DNA, 1174 bp, Homo sapiens
  source 1..1174: mol_type = genomic DNA
aagagaccccgctgccaacatccccacgccctcgcgccctcccgccgccccagaaggccaactccgcctgcctgagtcacagctggagctggggaggagccagggaaaggaggcccctgaccgtagtgcggccagcagttgcaggcagacggagcagagcggtcagggatcatgagggagagtgcgttggagcgggggcctgtgcccgaggcgccggcggggggtcccgtgcacgccgtgacggtggtgaccctgctggagaagctggcctccatgctggagactctgcgggagcggcagggaggcctggctcgaaggcagggaggcctggcagggtccgtgcgccgcatccagagcggcctgggcgctctgagtcgcagccacgacaccaccagcaacaccttggcgcagctgctggccaaggcggagcgcgtgagctcgcacgccaacgccgcccaagagcgcgcggtgcgccgcgcagcccaggtgcagcggctggaggccaaccacgggctgctggtggcgcgcgggaagctccacgttctgctcttcaaggaggagggtgaagtcccagccagcgctttccagaaggcaccagagcccttgggcccggcggaccagtccgagctgggcccagagcagctggaggccgaagttggagagagctcggacgaggagccggtggagtccagggcccagcggctgcggcgcaccggattgcagaaggtacagagcctccgaagggccctttcgggccggaaaggccctgcagcgccaccgcccaccccggtcaagccgcctcgccttgggcctggccggagcgctgaagcccagccggaagcccagcctgcgctggagcccacgctggagccagagcctccgcaggacaccgaggaagatcccgggagacctggggctgccgaagaagctctgctccaaatggagagtgtagcctgagggctggtgttgcctgcctcccctgtgcttgtgccttgtcccaaaataaatcctttcagaatgtagcactcacgccctaataaggagcgaatcctacatccaccaaggcgggcgctctggccctcccttccttaagcccagtcctgtgtcctctgaaagaggtgcagtcactcacacctgcttgcgctcaccatcaataaaagtaatttcacccgaa

SEQ ID NO: 3316 - DNA, 5650 bp, Homo sapiens
  source 1..5650: mol_type = genomic DNA
cagcccccgcggcttgcagcggagccgacagctcgtcttctcttctggaggtgcagctggtggtcggggggagagacttgctccaaacacggacatcccccagctctcccccctccctgttttccgttaggaacccggcgaggaaatacatgcactggctgagaatcgcccgcgccagggcgcaacgccacaaggtgtagggagtgtgcggggtggggcgaaaggggacccaagagtccctgtggctcggagtgccgggccgtcggttcttcattcctgccctcggggcagacggagtgaccccggcccccactccccgccccgaccatggtagtgttcaatggccttcttaagatcaaaatctgcgaggccgtgagcttgaagcccacagcctggtcgctgcgccatgcggtgggaccccggccgcagactttccttctcgacccctacattgccctcaatgtggacgactcgcgcatcggccaaacggccaccaagcagaagaccaacagcccggcctggcacgacgagttcgtcaccgatgtgtgcaacggacgcaagatcgagctggctgtctttcacgatgcccccataggctacgacgacttcgtggccaactgcaccatccagtttgaggagctgctgcagaacgggagccgccacttcgaggactggattgatctggagccagaaggaagagtgtatgtgatcatcgatctctcagggtcgtcgggtgaagcccctaaagacaatgaagagcgtgtgttcagggaacgcatgcggccgaggaagcggcagggggccgtcaggcgcagggtccatcaggtcaacggccacaagttcatggccacctatcttcggcagcccacctactgctcccattgcagagacttcatctggggtgtcataggaaagcagggataccagtgtcaagtctgcacctgcgtggtccacaagcggtgccacgagctcataatcacaaagtgtgctgggttaaagaagcaggagacccccgaccaggtgggctcccagcggttcagcgtcaacatgccccacaagttcggtatccacaactacaaggtccctaccttctgcgatcactgtgggtccctgctctggggactcttgcggcagggtttgcagtgtaaagtctgcaaaatgaatgttcaccgtcgatgtgagaccaacgtggctcccaactgtggagtggatgccagaggaatcgccaaagtactggccgacctgggcgttaccccagacaaaatcaccaacagcggccagagaaggaaaaagctcattgctggtgccgagtccccgcagcctgcttctggaagctcaccatctgaggaagatcgatccaagtcagcacccacctccccttgtgaccaggaaataaaagaacttgagaacaacattcggaaagccttgtcatttgacaaccgaggagaggagcaccgggcagcatcgtctcctgatggccagctgatgagccccggtgagaatggcgaagtccggcaaggccaggccaagcgcctgggcctggatgagttcaacttcatcaaggtgttgggcaaaggcagctttggcaaggtcatgttggcagaactcaagggcaaagatgaagtatatgctgtgaaggtcttaaagaaggacgtcatccttcaggatgatgacgtggactgcacaatgacagagaagaggattttggctctggcacggaaacacccgtaccttacccaactctactgctgcttccagaccaaggaccgcctctttttcgtcatggaatatgtaaatggtggagacctcatgtttcagattcagcgctcccgaaaattcgacgagcctcgttcacggttctatgctgcagaggtcacatcggccctcatgttcctccaccagcatggagtcatctacagggatttgaaactggacaacatccttctggatgcagaaggtcactgcaagctggctgacttcgggatgtgcaaggaagggattctgaatggtgtgacgaccaccacgttctgtgggactcctgactacatagctcctgagatcctgcaggagttggagtatggcccctccgtggactggtgggccctgggggtgctgatgtacgagatgatggctggacagcctccctttgaggccgacaatgaggacgacctatttgagtccatcctccatgacgacgtgctgtacccagtctggctcagcaaggaggctgtcagcatcttgaaagctttcatgacgaagaatccccacaagcgcctgggctgtgtggcatcgcagaatggcgaggacgccatcaagcagcacccattcttcaaagagattgactgggtgctcctggagcagaagaagatcaagccacccttcaaaccacgcattaaaaccaaaagagacgtcaataattttgaccaagactttacccgggaagagccggtactcacccttgtggacgaagcaattgtaaagcagatcaaccaggaggaattcaaaggtttctcctactttggtgaagacctgatgccctgagagcccactgcagttggactttgccgatgctgcaagaaggggtgcagagaagactcctgtgttggagacactcagcaggtcttgaactacttctcctcctcggagccccagtcccatgtccactgtctatttattgcattcccttgccccaggccacctcctccccctcccacctggtgaccagaaggcgctctcggttcttgtctcaccagtaatgcagactcattgggtcagcaattagctgtatacactgccgtgtttggaccattggcaagcctggttccactcctcaggggctcctggcagtgaagcaacttcagttcttttactgcaaagaacagaaaaaagaaagaaagcaaacaagaagactccggctctgctatcggacacagatcctgatccctcttgcttcttttccctcctgcaccgcagcttgccatccctgcccttctgtcctggagaagagactggtgcttctccgcacacacgagggagggcgcccttgaggcatgccctctgagggagggagaccagagatgcagggattggccagctgggttggtttgctctggaatggctaactcttgcctgctttggttttagcttttcagcatgccaaagtcatgtaagtttgtgtcttgtggaagaaatcctctttgtggaaaaagaaacagggttttgaactctgttaacatttgaaaaatatattttcaaattcactttctaattggccaaaagagatgagttccagtctgaatacaggtagatattaaagggctaataaaaaatgagaaaccggtcgtccaaggtggatgctgtcaatgcccgagtgacacatgagagctgtatgaattgagagaaaaggcaacaagtagcattcttcatcattcaagttctacctggacacaaaggcgaggaccctggggttccaacaaagctcagctcccagattctctttccagtttcatcctaagttcctagcataaacactatttattttctgcagcagtgtgttatttttgcgcacttatacaaaatggtagtactactgtgttgtggtttttaaacattaaacatgtaaagttatatacgaaatatctgcttttggaataagcagaatgaggctaaacatgggttatacaaagggtatctggaaactgaagagcaacttgttagaaaactgacaatgtcgcaagatgtactcagttttgtttctgtgtgacatgcaatggcaactcatgtggacactattgaagggatgtgacattacctcctgtagatatgctaacagtgttattctttcatttccaagggttctctgtggctttgtgtatatgtttcccagaggtcatttgattacctaatttactgaactgatttagcagggaatggaatccattccaactattgcacgtggatttcccagctgcccctaaatatatatacttgtgagtggcaaagtggcactaatgaagcttttgccttttgtacatttgagatttttgtatatagtgtttgctgcaaggcctgtggaattaattcgttgcatatagaggtatcaactgctgcatgttcaggcatattataaaactttagtctatgaaagaataattataataatgtccaggtgcaatactctgtaagtctattggttcaagttaccgagagataggtgtgttcctttatgggggatgggggggtgtgttggggattctttgtattgtttatttcattttggtttattttaaaagatgtaaacatatattaagctatattaaatctcacatacagttcttctgtgctctattataccctgatagagatgggggagagaaaggaatgtttttgatggtggtttcaaagctcggacagtaactatcttgagcccattagagagtctgtgtccatatttgcatctggctggtcatagcctttgttactaatgatgacattcagttctcttttgtttttattttttaaaaactcaggtgtaattattatctgttcttaagataattgcaaatattaaatattatgatatatcaattcatgtgtttggcataccagtgaatgatgaagaacatgagattaatttaatttatcttcggtaacttgacattctggagagagactatcttctggagttgagtacaagcacagaaacatctttacggtggcatcatctcattttttaggaagacatgataatactgcccatcatattcatgtgtaactactgttctttcttctgctttcttcaccataataaactttggacaaccaagcaagctctaaccgcaatgccagatggccttgtccgagggcctagtgtttgcacggcagtgggaactgggcctttcctacaggacaactggcaagtttgctgggaagtcaaataatacattccacctggcagctgaaggcagccagtcagtctgtcccagaaagggcccttttcagcacccaaagctgggctggctgggatgcctctggctggtgaagttctcacataggctgatttaaatccagcaaaggtctatagaaaaaggcttgcgtgttcgttgagtaatcattgtttcattttcatttttacgagagtttgaaaatagacacactgttaacacttctgccagttttttctgatctttccagccccaccccctttctctttctctctctctctcaaagaaaaaaaaaatgggagtgcaaaaaaaacaaagccaaaaaatatatgaaggatagctgttcttctgtgttctctcattatggactttgtgaagtagaaacataattttttttcctccaaaggtgaaaaaacaatgcattcttgctttaaaaaaaaaaaagaaggctaaaaaattacctctttttaaattatgtgcaaaataattctggctaactgtaaaatgtattcaattttaggattttttttttttgtattgtgatgctttatttgtacatttttttcctttctggatgtaattttaatctcttgccattcattagtgttatttcattgtaaacgttattgtgccaaatgtactgtattcaaaaggatgtgaatgtgtattgtttcagaacctaataaatacaatgacgttaagtctta

SEQ ID NO: 3317 - DNA, 939 bp, Homo sapiens
  source 1..939: mol_type = genomic DNA
gcggccgcccggactccgagcccgcgcggatgtgagattccgggctcctggcgcctcccgatcgccggctccggcgcggcgctgcttcgcccaggaggcggcggccccggctggccgtggggcttgtggatttttaaaaatttggctccgaggaggaccatttcctctcgacatgcatccctccggatagactgaacatccctccgttcacccccccgccccgcgcggtcagaggcaggcgctgagtgtgcgaagaggatccgggttgaaatctgcgcccccggttctcgtccccgccccgtcccaccgccccatccccctcccggagtcgaaatttcccgggattatgtttcggaaaggaacccggcgaggaaatacatgcactggctgagaatcgcccgcgccagggcgcaacgccacaaggtgtagggagtgtgcggggtggggcgaaaggggacccaagagtccctgtggctcggagtgccgggccgtcggttcttcattcctgccctcggggcagacggagtgaccccggcccccactccccgccccgaccatggtagtgttcaatggccttcttaagatcaaaatctgcgaggccgtgagcttgaagcccacagcctggtcgctgcgccatgcggtgggaccccggccgcagactttccttctcgacccctacattgccctcaatgtggacgactcgcgcatcggccaaacggccaccaagcagaagaccaacagcccggcctggcacgacgagttcgtcaccgatgtgtgcaacggacgcaagatcgagctggctgtctttcacgatgcccccataggctacgacgacttcgtggccaactgcaccatccagtttgaggagctgctgcagaacgggagccgccacttcgaggactggattgatctggagccagaaggaagagtgtatgtgat

SEQ ID NO: 3318 - DNA, 3133 bp, Homo sapiens
  source 1..3133: mol_type = genomic DNA
cggagctggagctcccaccgccgccgcccgtgcctccggctgccggcgcccctgcctttggctcttcctccccactcgcccgctccccctggcggagccggcgcgcccggggtgccgctccctgcctggcgcgctccgcacctggaggtgccttgcccctctcctgcccacctcggaatttccctgtggctcctttgatccttcgagtctccagctcctctcccttccacctgtttcccccaagaaaggcaggatcctggtccctgctacgtttctggggccatggctggtctgggccccggcgtaggcgattcagaggggggaccccggcccctgttttgcagaaagggggccctgaggcagaaggtggtccacgaagtcaagagccacaagttcaccgctcgcttcttcaagcagcccaccttctgcagccactgcaccgacttcatctggggtatcggaaagcagggcctgcaatgtcaagtctgcagctttgtggttcatcgacgatgccacgaatttgtgaccttcgagtgtccaggcgctgggaagggcccccagacggacgacccccggaacaaacacaagttccgcctgcatagctacagcagccccaccttctgcgaccactgtggctccctcctctacgggcttgtgcaccagggcatgaaatgctcctgctgcgagatgaacgtgcaccggcgctgtgtgcgtagcgtgccctccctgtgcggtgtggaccacaccgagcgccgcgggcgcctgcagctggagatccgggctcccacagcagatgagatccacgtaactgttggcgaggcccgtaacctaattcctatggaccccaatggtctctctgatccctatgtgaaactgaagctcatcccagaccctcggaacctgacgaaacagaagacccgaacggtgaaagccacgctaaaccctgtgtggaatgagacctttgtgttcaacctgaagccaggggatgtggagcgccggctcagcgtggaggtgtgggactgggaccggacctcccgcaacgacttcatgggggccatgtcctttggcgtctcggagctgctcaaggcgcccgtggatggctggtacaagttactgaaccaggaggagggcgagtattacaatgtgccggtggccgatgctgacaactgcagcctcctccagaagtttgaggcttgtaactaccccctggaattgtatgagcgggtgcggatgggcccctcttcctctcccatcccctccccttcccctagtcccaccgaccccaagcgctgcttcttcggggcgagtccaggacgcctgcacatctccgacttcagcttcctcatggttctaggaaaaggcagttttgggaaggtgatgctggccgagcgcaggggctctgatgagctctacgccatcaagatcttgaaaaaggacgtgatcgtccaggacgacgatgtggactgcacgctggtggagaaacgtgtgctggcgctggggggccggggtcctggcggccggccccacttcctcacccagctccactccaccttccagaccccggaccgcctgtatttcgtgatggagtacgtcaccgggggagacttgatgtaccacattcaacagctgggcaagtttaaggagccccatgcagcgttctacgcggcagaaatcgctatcggcctcttcttccttcacaatcagggcatcatctacagggacctgaagctggacaatgtgatgctggatgctgagggacacatcaagatcactgactttggcatgtgtaaggagaacgtcttccccgggacgacaacccgcaccttctgcgggaccccggactacatagccccggagatcattgcctaccagccctatgggaagtctgtcgattggtggtcctttggagttctgctgtatgagatgttggcaggacagcctcccttcgatggggaggacgaggaggagctgtttcaggccatcatggaacaaactgtcacctaccccaagtcgctttcccgggaagccgtggccatctgcaaggggttcctgaccaagcacccagggaagcgcctgggctcagggcctgatggggaacctaccatccgtgcacatggctttttccgctggattgactgggagcggctggaacgattggagatcccgcctcctttcagaccccgcccgtgtggccgcagcggcgagaactttgacaagttcttcacgcgggcggcgccagcgctgacccctccagaccgcctagtcctggccagcatcgaccaggccgatttccagggcttcacctacgtgaaccccgacttcgtgcacccggatgcccgcagccccaccagcccagtgcctgtgcccgtcatgtaatctcacccgccgccactaggtgtccccaacgtcccctccgccgtgccggcggcagccccacttcacccccaacttcaccaccccctgtcccattctagatcctgcaccccagcattccagctctgcccccgcgggttctagacgcccctcccaagcgttcctggccttctgaactccatacagcctctacagccgtcccgcgttcaagacttgagcggagcccgatattctccctgaccttagcgttctggactctgccccaatcgggtccagagaccacaccactaaccatccccaactccatggggttcgagactccatcttggtagttctgtgcctccccccagaccccgcccctggggaaatagcctcacggggttggctgttccagactcaggttccagaacagccctcggcctccgaggctccccgcctccactctagttctagatgagtgggaggcgtgcccccctcctccagtacgtcccgctgctgtgctctggggatttctgggatatatggaggattctttccccagaggctcccaatcagcttttgttctagacttccccatcccgaagccatcacttctccccgcagcccgcctgccgtgcatggctcctgtctggctcggacccaccccaactctccccagtgcctgccactctctgggactctcctcctcccctcctcttcccttagcctctcccacccggccacagctgctggagaataaatttgggatgctgatgctgaa

SEQ ID NO: 3319 - DNA, 1404 bp, Homo sapiens
  source 1..1404: mol_type = genomic DNA
atttcagcaggtgccggagctggagctcccaccgccgccgcccgtgcctccggctgccggcgcccctgcctttggctcttcctccccactcgcccgctccccctggcggagccggcgcgcccggggtgccgctccctgcctggcgcgctccgcacctggaggtgccttgcccctctcctgcccacctcggaatttccctgtggctcctttgatccttcgagtctccagctcctctcccttccacctgtttcccccaagaaaggcaggatcctggtccctgctacgtttctggggccatggctggtctgggccccggcgtaggcgattcagaggggggaccccggcccctgttttgcagaaagggggccctgaggcagaaggtggtccacgaagtcaagagccacaagttcaccgctcgcttcttcaagcagcccaccttctgcagccactgcaccgacttcatctggggtatcggaaagcagggcctgcaatgtcaagtctgcagctttgtggttcatcgacgatgccacgaatttgtgaccttcgagtgtccaggcgctgggaagggcccccagacggacgacccccggaacaaacacaagttccgcctgcatagctacagcagccccaccttctgcgaccactgtggctccctcctctacgggcttgtgcaccagggcatgaaatgctcctgctgcgagatgaacgtgcaccggcgctgtgtgcgtagcgtgccctccctgtgcggtgtggaccacaccgagcgccgcgggcgcctgcagctggagatccgggctcccacagcagatgagatccacgtaactgttggcgaggcccgtaacctaattcctatggaccccaatggtctctctgatccctatgtgaaactgaagctcatcccagaccctcggaacctgacgaaacagaagacccgaacggtgaaagccacgctaaaccctgtgtggaatgagacctttgtgttcaacctgaagccaggggatgtggagcgccggctcagcgtggaggtgtgggactgggaccggacctcccgcaacgacttcatgggggccatgtcctttggcgtctcggagctgctcaaggcgcccgtggatggctggcttgtaactaccccctggaattgtatgagcgggtgcggatgggcccctcttcctctcccatcccctccccttcccctagtcccaccgaccccaagcgctgcttcttcggggcgagtccaggacgcctgcacatctccgacttcagcttcctcatggttctaggaaaaggcagttttgggaaggtgatgctggccgagcgcaggggctctgatgagctctacgccatcaagatcttgaaaaaggacgtgatcgtccaggacgacgatgtggactgcacgctggtgga

SEQ ID NO: 3320 - DNA, 2579 bp, Homo sapiens
  source 1..2579: mol_type = genomic DNA
tttcagcaggtgccggagctggagctcccaccgccgccgcccgtgcctccggctgccggcgcccctgcctttggctcttcctccccactcgcccgctccccctggcggagccggcgcgcccggggtgccgctccctgcctggcgcgctccgcacctggaggtgccttgcccctctcctgcccacctcggaatttccctgtggctcctttgatccttcgagtctccagctcctctcccttccacctgtttcccccaagaaaggcaggatcctggtccctgctacgtttctggggccatggctggtctgggccccggcgtaggcgattcagaggggggaccccggcccctgttttgcagaaagggggccctgaggcagaaggtggtccacgaagtcaagagccacaagttcaccgctcgcttcttcaagcagcccaccttctgcagccactgcaccgacttcatctggggtatcggaaagcagggcctgcaatgtcaagtctgcagctttgtggttcatcgacgatgccacgaatttgtgaccttcgagtgtccaggcgctgggaagggcccccagacggacgacccccggaacaaacacaagttccgcctgcatagctacagcagccccaccttctgcgaccactgtggctccctcctctacgggcttgtgcaccagggcatgaaatgctcctgctgcgagatgaacgtgcaccggcgctgtgtgcgtagcgtgccctccctgtgcggtgtggaccacaccgagcgccgcgggcgcctgcagctggagatccgggctcccacagcagatgagatccacgtaactgttggcgaggcccgtaacctaattcctatggaccccaatggtctctctgatccctatgtgaaactgaagctcatcccagaccctcggaacctgacgaaacagaagacccgaacggtgaaagccacgctaaaccctgtgtggaatgagacctttgtgttcaacctgaagccaggggatgtggagcgccggctcagcgtggaggtgtgggactgggaccggacctcccgcaacgacttcatgggggccatgtcctttggcgtctcggagctgctcaaggcgcccgtggatggctggtacaagttactgaaccaggaggagggcgagtattacaatgtgccggtggccgatgctgacaactgcagcctcctccagaagtttgaggcttgtaactaccccctggaattgtatgagcgggtgcggatgggcccctcttcctctcccatcccctccccttcccctagtcccaccgaccccaagcgctgcttcttcggggcgagtccaggacgcctgcacatctccgacttcagcttcctcatggttctaggaaaaggcagttttgggaaggtgatgctggccgagcgcaggggctctgatgagctctacgccatcaagatcttgaaaaaggacgtgatcgtccaggacgacgatgtggactgcacgctggtggagaaacgtgtgctggcgctggggggccggggtcctggcggccggccccacttcctcacccagctccactccaccttccagaccccggaccgcctgtatttcgtgatggagtacgtcaccgggggagacttgatgtaccacattcaacagctgggcaagtttaaggagccccatgcagcgttctacgcggcagaaatcgctatcggcctcttcttccttcacaatcagggcatcatctacagggacctgaagctggacaatgtgatgctggatgctgagggacacatcaagatcactgactttggcatgtgtaaggagaacgtcttccccgggacgacaacccgcaccttctgcgggaccccggactacatagccccggagatcattgcctaccagccctatgggaagtctgtcgattggtggtcctttggagttctgctgtatgagatgttggcaggacagcctcccttcgatggggaggacgaggaggagctgtttcaggccatcatggaacaaactgtcacctaccccaagtcgctttcccgggaagccgtggccatctgcaaggggttcctgaccaagcacccagggaagcgcctgggctcagggcctgatggggaacctaccatccgtgcacatggctttttccgctggattgactgggagcggctggaacgattggagatcccgcctcctttcagaccccgcccgtgtggccgcagcggcgagaactttgacaagttcttcacgcgggcggcgccagcgctgacccctccagaccgcctagtcctggccagcatcgaccaggccgatttccagggcttcacctacgtgaaccccgacttcgtgcacccggatgcccgcagccccaccagcccagtgcctgtgcccgtcatatcctgcaccccagcattccagctctgcccccgcgggttctagacgcccctcccaagcgttcctggccttctgaactccatacagcctctacagccgtcccgcgttcaagacttgagcggagcccgatattctccctgaccttagcgttctggactctgccccaatcgggtccagagaccacaccactaaccat

SEQ ID NO: 3321 - DNA, 1781 bp, Homo sapiens
  source 1..1781: mol_type = genomic DNA
cttgagcaccagctgctactgctgagaacagatctgcagctttgtggttcatcgacgatgccacgaatttgtgaccttcgagtgtccaggcgctgggaagggcccccagacggacgctgcgagatgaacgtgcaccggcgctgtgtgcgtagcgtgccctccctgtgcggtgtggaccacaccgagcgccgcgggcgcctgcagctggagatccgggctcccacagcagatgagatccacgtaactgttggcgaggcccgtaacctaattcctatggaccccaatggtctctctgatccctatgtgaaactgaagctcatcccagaccctcggaacctgacgaaacagaagacccgaacggtgaaagccacgctaaaccctgtgtggaatgagacctttgtgttcaacctgaagccaggggatgtggagcgccggctcagcgtggaggtgtgggactgggaccggacctcccgcaacgacttcatgggggccatgtcctttggcgtctcggagctgctcaaggcgcccgtggatggctggtacaagttactgaaccaggaggagggcgagtattacaatgtgccggtggccgatgctgacaactgcagcctcctccagaagtttgaggcttgtaactaccccctggaattgtatgagcgggtgcggatgggcccctcttcctctcccatcccctccccttcccctagtcccaccgaccccaagcgctgcttcttcggggcgagtccaggacgcctgcacatctccgacttcagcttcctcatggttctaggaaaaggcagttttgggaaggtgatgctggccgagcgcaggggctctgatgagctctacgccatcaagatcttgaaaaaggacgtgatcgtccaggacgacgatgtggactgcacgctggtggagaaacgtgtgctggcgctggggggccggggtcctggcggccggccccacttcctcacccagctccactccaccttccagaccccggaccgcctgtatttcgtgatggagtacgtcaccgggggagacttgatgtaccacattcaacagctgggcaagtttaaggagccccatgcagcgttctacgcggcagaaatcgctatcggcctcttcttccttcacaatcagggcatcatctacagggacctgaagctggacaatgtgatgctggatgctgagggacacatcaagatcactgactttggcatgtgtaaggagaacgtcttccccgggacgacaacccgcaccttctgcgggaccccggactacatagccccggagatcattgcctaccagccctatgggaagtctgtcgattggtggtcctttggagttctgctgtatgagatgttggcaggacagttcctgaccaagcacccagggaagcgcctgggctcagggcctgatggggaacctaccatccgtgcacatggctttttccgctggattgactgggagcggctggaacgattggagatcccgcctcctttcagaccccgcccgtgtggccgcagcggcgagaactttgacaagttcttcacgcgggcggcgccagcgctgacccctccagaccgcctagtcctggccagcatcgaccaggccgatttccagggcttcacctacgtgaaccccgacttcgtgcacccggatgcccgcagccccaccagcccagtgcctgtgcccgtcatgtaatctcacccgccgccactaggtgtccccaacgtcccctccgccgtgccggcggcagccccacttcacccccaacttca

SEQ ID NO: 3322 - DNA, 2326 bp, Homo sapiens
  source 1..2326: mol_type = genomic DNA
gccccgcgcgccgccggagttccgcggagttgaccgggtcggcgccgtcggtcctgagcgctgccttccgcgttccgccgcggccccacctggagcccccgccccgcgccatggccggagctcccggggcgcagcgctgacggcggcggggggagcgcgccatgcccagcaggaccggccccaagatggaagggagcggcggccgcgtccgcctcaaggcgcattacgggggggacatcttcatcaccagcgtggacgccgccacgaccttcgaggagctctgtgaggaagtgagagacatgtgtcgtctgcaccagcagcacccgctcaccctcaagtgggtggacagcgaaggtgacccttgcacggtgtcctcccagatggagctggaagaggctttccgcctggcccgtcagtgcagggatgaaggcctcatcattcatgttttcccgagcacccctgagcagcctggcctgccatgtccgggagaagacaaatctatctaccgccggggagccagaagatggaggaagctgtaccgtgccaacggccacctcttccaagccaagcgctttaacaggagagcgtactgcggtcagtgcagcgagaggatatggggcctcgcgaggcaaggctacaggtgcatcaactgcaaactgctggtccataagcgctgccacggcctcgtcccgctgacctgcaggaagcatatggattctgtcatgccttcccaagagcctccagtagacgacaagaacgaggacgccgaccttccttccgaggagacagatggaattgcttacatttcctcatcccggaagcatgacagcattaaagacgactcggaggaccttaagccagttatcgatgggatggatggaatcaaaatctctcaggggcttgggctgcaggactttgacctaatcagagtcatcgggcgcgggagctacgccaaggttctcctggtgcggttgaagaagaatgaccaaatttacgccatgaaagtggtgaagaaagagctggtgcatgatgacgaggatattgactgggtacagacagagaagcacgtgtttgagcaggcatccagcaaccccttcctggtcggattacactcctgcttccagacgacaagtcggttgttcctggtcattgagtacgtcaacggcggggacctgatgttccacatgcagaggcagaggaagctccctgaggagcacgccaggttctacgcggccgagatctgcatcgccctcaacttcctgcacgagagggggatcatctacagggacctgaagctggacaacgtcctcctggatgcggacgggcacatcaagctcacagactacggcatgtgcaaggaaggcctgggccctggtgacacaacgagcactttctgcggaaccccgaattacatcgcccccgaaatcctgcggggagaggagtacgggttcagcgtggactggtgggcgctgggagtcctcatgtttgagatgatggccgggcgctccccgttcgacatcatcaccgacaacccggacatgaacacagaggactaccttttccaagtgatcctggagaagcccatccggatcccccggttcctgtccgtcaaagcctcccatgttttaaaaggatttttaaataaggaccccaaagagaggctcggctgccggccacagactggattttctgacatcaagtcccacgcgttcttccgcagcatagactgggacttgctggagaagaagcaggcgctccctccattccagccacagatcacagacgactacggtctggacaactttgacacacagttcaccagcgagcccgtgcagctgaccccagacgatgaggatgccataaagaggatcgaccagtcagagttcgaaggctttgagtatatcaacccattattgctgtccaccgaggagtcggtgtgaggccgcgtgcgtctctgtcgtggacacgcgtgattgaccctttaactgtatccttaaccaccgcatatgcatgccaggctgggcacggctccgagggcggccagggacagacgcttgcgccgagaccgcagagggaagcgtcagcgggcgctgctgggagcagaacagtccctcacacctgggcccgggcaggccagcttcgtgctggaggaacttgctgctgtgcctgcgtcgcggcggatccgcggggaccctgccgagggggctgtcatgcggtttccaaggtgcacattttccacggaaacagaactcgatgcactgacctgctccgccaggaaagtgagcgtgtagcgtcctgaggaataaaatgttccgatgatgtggaa

SEQ ID NO: 3323 - DNA, 2009 bp, Homo sapiens
  source 1..2009: mol_type = genomic DNA
agaacatcgctcggtgccagacaggcaggacgcagcgggctggcctgcggggctcactgctgccccccggggccgagcacgaaagggagagttggagggcgcttcctcgccgggtgttgcggtgtgagcggggactggtgagtgtgtgctgtcttcagagagagaagagcagttttcaggaatctatctaccgccggggagccagaagatggaggaagctgtaccgtgccaacggccacctcttccaagccaagcgctttaacaggagagcgtactgcggtcagtgcagcgagaggatatggggcctcgcgaggcaaggctacaggtgcatcaactgcaaactgctggtccataagcgctgccacggcctcgtcccgctgacctgcaggaagcatatggattctgtcatgccttcccaagagcctccagtagacgacaagaacgaggacgccgaccttccttccgaggagacagatggaattgcttacatttcctcatcccggaagcatgacagcattaaagacgactcggaggaccttaagccagttatcgatgggatggatggaatcaaaatctctcaggggcttgggctgcaggactttgacctaatcagagtcatcgggcgcgggagctacgccaaggttctcctggtgcggttgaagaagaatgaccaaatttacgccatgaaagtggtgaagaaagagctggtgcatgatgacgaggatattgactgggtacagacagagaagcacgtgtttgagcaggcatccagcaaccccttcctggtcggattacactcctgcttccagacgacaagtcggttgttcctggtcattgagtacgtcaacggcggggacctgatgttccacatgcagaggcagaggaagctccctgaggagcacgccaggttctacgcggccgagatctgcatcgccctcaacttcctgcacgagagggggatcatctacagggacctgaagctggacaacgtcctcctggatgcggacgggcacatcaagctcacagactacggcatgtgcaaggaaggcctgggccctggtgacacaacgagcactttctgcggaaccccgaattacatcgcccccgaaatcctgcggggagaggagtacgggttcagcgtggactggtgggcgctgggagtcctcatgtttgagatgatggccgggcgctccccgttcgacatcatcaccgacaacccggacatgaacacagaggactaccttttccaagtgatcctggagaagcccatccggatcccccggttcctgtccgtcaaagcctcccatgttttaaaaggatttttaaataaggaccccaaagagaggctcggctgccggccacagactggattttctgacatcaagtcccacgcgttcttccgcagcatagactgggacttgctggagaagaagcaggcgctccctccattccagccacagatcacagacgactacggtctggacaactttgacacacagttcaccagcgagcccgtgcagctgaccccagacgatgaggatgccataaagaggatcgaccagtcagagttcgaaggctttgagtatatcaacccattattgctgtccaccgaggagtcggtgtgaggccgcgtgcgtctctgtcgtggacacgcgtgattgaccctttaactgtatccttaaccaccgcatatgcatgccaggctgggcacggctccgagggcggccagggacagacgcttgcgccgagaccgcagagggaagcgtcagcgggcgctgctgggagcagaacagtccctcacacctgggcccgggcaggccagcttcgtgctggaggaacttgctgctgtgcctgcgtcgcggcggatccgcggggaccctgccgagggggctgtcatgcggtttccaaggtgcacattttccacggaaacagaactcgatgcactgacctgctccgccaggaaagtgagcgtgtagcgtcctgaggaataaaatgttccgatgatgtgg

SEQ ID NO: 3324 - DNA, 2294 bp, Homo sapiens
  source 1..2294: mol_type = genomic DNA
ctggcaggccaacctgcaggaccccgggcttagctgggttctgttctgatgtcgcattttcaaggtccgctgagtccgagccctgcctgggtctggctgctgcccgcccgctctctggactgtgctgatgcagagatgcttgttttcctgtgacgtcagcgtcagctcctgcacatccatgccgtgttttagtttgtgcctcagctgctggctacagcttcccgggggagccgggtaccacccgggcctggagacatgaggaggcagggatgtgaggggcgggggacaggacagccggccttccgttaaatatctgctcctcgcgctcgagcctccctgcctattgtcggggccggaggcgagccgacgcagcatcagctcgtcaacgggaaggaagatgcctccctgcacgcccgccgcgcacagagcataaagaatctgcgctgaggaggcaggagaagaaagccgaatctatctaccgccggggagccagaagatggaggaagctgtaccgtgccaacggccacctcttccaagccaagcgctttaacaggagagcgtactgcggtcagtgcagcgagaggatatggggcctcgcgaggcaaggctacaggtgcatcaactgcaaactgctggtccataagcgctgccacggcctcgtcccgctgacctgcaggaagcatatggattctgtcatgccttcccaagagcctccagtagacgacaagaacgaggacgccgaccttccttccgaggagacagatggaattgcttacatttcctcatcccggaagcatgacagcattaaagacgactcggaggaccttaagccagttatcgatgggatggatggaatcaaaatctctcaggggcttgggctgcaggactttgacctaatcagagtcatcgggcgcgggagctacgccaaggttctcctggtgcggttgaagaagaatgaccaaatttacgccatgaaagtggtgaagaaagagctggtgcatgatgacgaggatattgactgggtacagacagagaagcacgtgtttgagcaggcatccagcaaccccttcctggtcggattacactcctgcttccagacgacaagtcggttgttcctggtcattgagtacgtcaacggcggggacctgatgttccacatgcagaggcagaggaagctccctgaggagcacgccaggttctacgcggccgagatctgcatcgccctcaacttcctgcacgagagggggatcatctacagggacctgaagctggacaacgtcctcctggatgcggacgggcacatcaagctcacagactacggcatgtgcaaggaaggcctgggccctggtgacacaacgagcactttctgcggaaccccgaattacatcgcccccgaaatcctgcggggagaggagtacgggttcagcgtggactggtgggcgctgggagtcctcatgtttgagatgatggccgggcgctccccgttcgacatcatcaccgacaacccggacatgaacacagaggactaccttttccaagtgatcctggagaagcccatccggatcccccggttcctgtccgtcaaagcctcccatgttttaaaaggatttttaaataaggaccccaaagagaggctcggctgccggccacagactggattttctgacatcaagtcccacgcgttcttccgcagcatagactgggacttgctggagaagaagcaggcgctccctccattccagccacagatcacagacgactacggtctggacaactttgacacacagttcaccagcgagcccgtgcagctgaccccagacgatgaggatgccataaagaggatcgaccagtcagagttcgaaggctttgagtatatcaacccattattgctgtccaccgaggagtcggtgtgaggccgcgtgcgtctctgtcgtggacacgcgtgattgaccctttaactgtatccttaaccaccgcatatgcatgccaggctgggcacggctccgagggcggccagggacagacgcttgcgccgagaccgcagagggaagcgtcagcgggcgctgctgggagcagaacagtccctcacacctgggcccgggcaggccagcttcgtgctggaggaacttgctgctgtgcctgcgtcgcggcggatccgcggggaccctgccgagggggctgtcatgcggtttccaaggtgcacattttccacggaaacagaactcgatgcactgacctgctccgccaggaaagtgagcgtgtagcgtcctgaggaataaaatgttccgatgatg

SEQ ID NO: 3325 - DNA, 1916 bp, Homo sapiens
  source 1..1916: mol_type = genomic DNA
gtgctgcaggccctgtgcgtgcggaggacggtgcccgagtcagcattttgggtctgagtcccggcgttgccgctgcctgtgcgctgcacagatgctccgggcagcaacacggctggtgccacggcccggggaaggcgtgcggctgcagcagctcccagcaatgtcaggggaaacgcagtgagaggctgttgttttgcgggtgacagatttttagaaaaataaggctgtggagggaccttctgagcgaggcaggggctgctggagggacatgctcaccccgaggacggatgaatctatctaccgccggggagccagaagatggaggaagctgtaccgtgccaacggccacctcttccaagccaagcgctttaacaggagagcgtactgcggtcagtgcagcgagaggatatggggcctcgcgaggcaaggctacaggtgcatcaactgcaaactgctggtccataagcgctgccacggcctcgtcccgctgacctgcaggaagcatatggattctgtcatgccttcccaagagcctccagtagacgacaagaacgaggacgccgaccttccttccgaggagacagatggaattgcttacatttcctcatcccggaagcatgacagcattaaagacgactcggaggaccttaagccagttatcgatgggatggatggaatcaaaatctctcaggggcttgggctgcaggactttgacctaatcagagtcatcgggcgcgggagctacgccaaggttctcctggtgcggttgaagaagaatgaccaaatttacgccatgaaagtggtgaagaaagagctggtgcatgatgacgaggatattgactgggtacagacagagaagcacgtgtttgagcaggcatccagcaaccccttcctggtcggattacactcctgcttccagacgacaagtcggttgttcctggtcattgagtacgtcaacggcggggacctgatgttccacatgcagaggcagaggaagctccctgaggagcacgccaggttctacgcggccgagatctgcatcgccctcaacttcctgcacgagagggggatcatctacagggacctgaagctggacaacgtcctcctggatgcggacgggcacatcaagctcacagactacggcatgtgcaaggaaggcctgggccctggtgacacaacgagcactttctgcggaaccccgaattacatcgcccccgaaatcctgcggggagaggagtacgggttcagcgtggactggtgggcgctgggagtcctcatgtttgagatgatggccgggcgctccccgttcgacatcatcaccgacaacccggacatgaacacagaggactaccttttccaagtgatcctggagaagcccatccggatcccccggttcctgtccgtcaaagcctcccatgttttaaaaggatttttaaataaggaccccaaagagaggctcggctgccggccacagactggattttctgacatcaagtcccacgcgttcttccgcagcatagactgggacttgctggagaagaagcaggcgctccctccattccagccacagatcacagacgactacggtctggacaactttgacacacagttcaccagcgagcccgtgcagctgaccccagacgatgaggatgccataaagaggatcgaccagtcagagttcgaaggctttgagtatatcaacccattattgctgtccaccgaggagtcggtgtgaggccgcgtgcgtctctgtcgtggacacgcgtgattgaccctttaactgtatccttaaccaccgcatatgcatgccaggctgggcacggctccgagggcggccagggacagacgcttgcgccgagaccgcagagggaagcgtcagcgggcgctgctgggagcagaacagtccctcacacctg

SEQ ID NO: 3326 - DNA, 564 bp, Homo sapiens
  source 1..564: mol_type = genomic DNA
gtcatgtgtaaatattgaggcccgtttgaactatccctgtgcggaaaaaaaggcctgtttttcacagggctgcctggggaggaggggggtggaaaggaaaacaggcaggggacagacggacccggcctgcgttggcctggggtgacttcacggctccactgtcagcaagcggccgtcccgtggtggatcctgtccgccctgcgaggacacctggctccatccacacctgggcctctgtctccagccgccgaggccgtgacaccatgaggatcataatctatctaccgccggggagccagaagatggaggaagctgtaccgtgccaacggccacctcttccaagccaagcgctttaacaggagagcgtactgcggtcagtgcagcgagaggatatggggcctcgcgaggcaaggctacaggtgcatcaactgcaaactgctggtccataagcgctgccacggcctcgtcccgctgacctgcaggaagcatatggattctgtcatgccttcccaagagcctccagtagacgacaagaacgaggacgccgaccttccttccgaggag

SEQ ID NO: 3327 - DNA, 567 bp, Homo sapiens
  source 1..567: mol_type = genomic DNA
gaattcccgatgcacctccttccagcacatggactgtcagagccctgcgttgtcgccagcacagcagatctgaaaggcactaggctgtggcctcgcgacggctgagaatctatctaccgccggggagccagaagatggaggaagctgtaccgtgccaacggccacctcttccaagccaagcgctttaacaggagagcgtactgcggtcagtgcagcgagaggatatggggcctcgcgaggcaaggctacaggtgcatcaactgcaaactgctggtccataagcgctgccacggcctcgtcccgctgacctgcaggaagcatatggattctgtcatgccttcccaagagcctccagtagacgacaagaacgaggacgccgaccttccttccgaggagacagatggaattgcttacatttcctcatcccggaagcatgacagcattaaagacgactcggaggaccttaagccagttatcgatgggatggatggaatcaaaatctctcaggggcttgggctgcaggactttgacctaatcagagtcatcgggcgcgggagctacgccaag

SEQ ID NO: 3328 - DNA, 788 bp, Homo sapiens
  source 1..788: mol_type = genomic DNA
ttttttttaaaaaaaaaaacaacaaaaaaccaaaacaacaaccagcctccccagtcaggcttgtggggagccgtgggcctggggagactgggctgctgaaggtggggactgggctgctgggggaggcggctttccctctcggggggtgctggctgctggggaggctggcagcgcgcccctcccccaggtgcgaagggacctcagcagacgcagggctgctccgcacagccagcttgggccgcaggggtccttgagtgatgaagattctgtgttgatgggaatctatctaccgccggggagccagaagatggaggaagctgtaccgtgccaacggccacctcttccaagccaagcgctttaacaggagagcgtactgcggtcagtgcagcgagaggatatggggcctcgcgaggcaaggctacaggtgcatcaactgcaaactgctggtccataagcgctgccacggcctcgtcccgctgacctgcaggaagcatatggattctgtcatgccttcccaagagcctccagtagacgacaagaacgaggacgccgaccttccttccgaggagacagatggaattgcttacatttcctcatcccggaagcatgacagcattaaagacgactcggaggaccttaagccagttatcgatgggatggatggaatcaaaatctctcaggggcttgggctgcaggactttgacctaatcagagtcatcgggcgcgggagctacgccaaggttctcctggtgcggttgaagaagaatgaccaaatttacgccatgaaa

SEQ ID NO: 3329 - DNA, 706 bp, Homo sapiens
  source 1..706: mol_type = genomic DNA
ggcggggctgctgccggcctggactcaggaccctcaccctccagcccgcaccctcgactccccaccagccagaccctctgtcctggtgtggacagcacccacatcctggctccacccttgtttcttgccctttgacctacagcctcaggacgtgcaggagggagaatctatctaccgccggggagccagaagatggaggaagctgtaccgtgccaacggccacctcttccaagccaagcgctttaacaggagagcgtactgcggtcagtgcagcgagaggatatggggcctcgcgaggcaaggctacaggtgcatcaactgcaaactgctggtccataagcgctgccacggcctcgtcccgctgacctgcaggaagcatatggattctgtcatgccttcccaagagcctccagtagacgacaagaacgaggacgccgaccttccttccgaggagacagatggaattgcttacatttcctcatcccggaagcatgacagcattaaagacgactcggaggaccttaagccagttatcgatgggatggatggaatcaaaatctctcaggggcttgggctgcaggactttgacctaatcagagtcatcgggcgcgggagctacgccaaggttctcctggtgcggttgaagaagaatgaccaaatttacgccatgaaagtggtgaagaaagagctggtgcatgatgacgag

SEQ ID NO: 3330 - DNA, 716 bp, Homo sapiens
  source 1..716: mol_type = genomic DNA
gtccgtccctcggttccgcccccggctgcgcgtctgtccctcgactcggcccctcagctgtgcgccactttctctgtggcccacagtacctccgtctccgccgcttcacacccttctctttctttctctcttcagagagggttgttgggcaggcagagcatcccccgaggggacaagtcaggcctacggactcctggagccaggacctgccgtaggctggttagggcaggatgcgccctgtcttcgtgggtagagccacatgaggggtcacccgaccccctcagggctgaggggcacaggggccgaaagtgtggccgcccctgggggtctgcgcctcttgtggagcccaggcctggcgcccagaatctatctaccgccggggagccagaagatggaggaagctgtaccgtgccaacggccacctcttccaagccaagcgctttaacaggagagcgtactgcggtcagtgcagcgagaggatatggggcctcgcgaggcaaggctacaggtgcatcaactgcaaactgctggtccataagcgctgccacggcctcgtcccgctgacctgcaggaagcatatggattctgtcatgccttcccaagagcctccagtagacgacaagaacgaggacgccgaccttccttccgaggagacagatggaattgcttacatttcctcatcccggaagcatgacagcattaaagacgactcggag

SEQ ID NO: 3331 - DNA, 614 bp, Homo sapiens
  source 1..614: mol_type = genomic DNA
agaacatcgctcggtgccagacaggcaggacgcagcgggctggcctgcggggctcactgctgccccccggggccgagcacgaaagggagagttggagggcgcttcctcgccgggtgttgcggtgtgagcggggactggtgagtgtgtgctgtcttcagagagagaagagcagttttcaggaatctatctaccgccggggagccagaagatggaggaagctgtaccgtgccaacggccacctcttccaagccaagcgctttaacaggagagcgtactgcggtcagtgcagcgagaggatatggggcctcgcgaggcaaggctacaggtgcatcaactgcaaactgctggtccataagcgctgccacggcctcgtcccgctgacctgcaggaagcatatggattctgtcatgccttcccaagagcctccagtagacgacaagaacgaggacgccgaccttccttccgaggagacagatggaattgcttacatttcctcatcccggaagcatgacagcattaaagacgactcggaggaccttaagccagttatcgatgggatggatggaatcaaaatctctcaggggcttgggctgcaggactttgacctaatcaga

SEQ ID NO: 3332 - DNA, 698 bp, Homo sapiens
  source 1..698: mol_type = genomic DNA
gaggaggcagggatgtgaggggcgggggacaggacagccggccttccgttaaatatctgctcctcgcgctcgagcctccctgcctattgtcggggccggaggcgagccgacgcagcatcagctcgtcaacgggaaggaagatgcctccctgcacgcccgccgcgcacagagcataaagaatctgcgctgaggaggcaggagaagaaagccggagcggtgccgctggcctgtggcttctgcagggacaagtagtggctgtggccgggaggcgttcggcagctgtgcttcagccccggccccagcttcagctcttcgagttgctggcttctctaaggcctgtcctgaagtggcctggagactgctgagttacttctggaatctgcaccgtgaaagtgaaacctggaccatgatgtgaggctgaatctatctaccgccggggagccagaagatggaggaagctgtaccgtgccaacggccacctcttccaagccaagcgctttaacaggagagcgtactgcggtcagtgcagcgagaggatatggggcctcgcgaggcaaggctacaggtgcatcaactgcaaactgctggtccataagcgctgccacggcctcgtcccgctgacctgcaggaagcatatggattctgtcatgccttcccaagagcctccagtagacgacaagaacgaggacgccgacctt

SEQ ID NO: 3333 - DNA, 563 bp, Homo sapiens
  source 1..563: mol_type = genomic DNA
tttcgtgtgagcccacgctggccatgcacagctggcacgatcccttgcggtgtgaatacactgctggggtgggagcgccgtggccagggtcaggattcgagcggttactggcttttggtctgatggccctcggtggaatctatctaccgccggggagccagaagatggaggaagctgtaccgtgccaacggccacctcttccaagccaagcgctttaacaggagagcgtactgcggtcagtgcagcgagaggatatggggcctcgcgaggcaaggctacaggtgcatcaactgcaaactgctggtccataagcgctgccacggcctcgtcccgctgacctgcaggaagcatatggattctgtcatgccttcccaagagcctccagtagacgacaagaacgaggacgccgaccttccttccgaggagacagatggaattgcttacatttcctcatcccggaagcatgacagcattaaagacgactcggaggaccttaagccagttatcgatgggatggatggaatcaaaatctctcaggggcttgggctgcaggactttgacct

SEQ ID NO: 3334 - DNA, 2610 bp, Homo sapiens
  source 1..2610: mol_type = genomic DNA
agcgcctcgtcctgggcctggccctgggcggccggctgctgactgcgactgcgcgctccgaggcctgcagagacggcccggggcacctgttaccgcaccgctcaagaccggaagcggaaatggaatcgagatagcctcgcgcgtttagctggccgccgccacctccacgccctaggccgggccgacttacggagtcgccggaagcggaagtcgctgaggggtggtgaagcggttgggaaagtgtcggtttatcttcgcgccccttgcgttcttgccgcggcttgcctgggcaggtaaagcgcgattgcgagagctcggcaaccctgccgactcagccggaaccggctcccggcccgaggggcgtggtgtcctggtgctccgactccttccgcaggctccttgggacccgcggttccgggagtcccttgctcagggtccctttcctgcagtgaggcgccgtccgccttccctgtgtccccgcagacccccatcatgggcaataccagcagtgagcgcgccgcgctggagcggcatggtggccataagacgccccggagggacagctcggggggcaccaaggacggggacaggcccaagatcctgatggacagccccgaagacgccgacctcttccactccgaggaaatcaaggcaccagagaaggaggaattcctggcctggcagcatgatctggaagtgaatgataaagctcccgcccaggctcggccaacggtgtttcgatggacggggggcggaaaggaagtttacttatctgggtccttcaacaactggagtaaacttcccctcaccagaagccacaataactttgtagccatcctggatctgccggaaggagagcatcagtacaagttctttgtggatggtcagtggacgcacgacccttccgagcccatagtaaccagccagcttggcacagttaacaacatcattcaagtgaagaaaactgactttgaagtatttgatgctttaatggtggattcccaaaagtgctccgatgtgtctgagctgtccagttctcccccaggaccctaccatcaggagccctacgtctgcaaacccgaagagcgctttcgggcaccccctattctccccccacatctcctccaggtcatcctgaacaaggacacggggatttcctgtgatccagctttgcttcctgagcccaatcacgtcatgctgaaccacctatacgcgctgtctatcaaggatggagtgatggtgctcagcgcaacccaccggtacaagaagaagtacgtcaccaccttgttatacaagcccatatgaagagctgggggcggatggtggcccaggagacagcacaccaccaggctccacacgtgcatgctttccccaagagggaatggactgtacattgctcatttcacactcttcagaagacatttcatacctgccctggtcctgcttgaaggtttgtccaggcagagcagctcctgcagcgcctcggtctgtgacagtcctcctagcacccccatggctttgagcctcggggactcatcaagtccaagaaaagagggaggggtggcagaggatctgcagccctggccccgcggtgcatgaggctgggtgcagttctaaacctacattctcgatttttcttaagccaaaaatgaatgctaactcctttgccagtaaaattctgggaaacagggactgaggccacacatcatttccagtcatctgtgtgtttttaaggccagccacttgtccctgttgaggcctggctatggaactaaatacagtgttggtcttgcctgtccttcaaaatcaacaacagattgtctctcggctccagggaggtgtcatttctatagaaattagaagctttctgatttctagatgaggttttacaattgtttcttacagtcatgtgcactaagtactctttttgtaagcagaggtggctggctctgcagccttaaggccattttttaagtcaccacgtctagaagtcacatgaactctgctcagcaataatctgttctcagaacagacttttcaacctgctgccggatttctccattcagctggatgatcctcaggactgaccagttagctggcaggttgtccagctttttattccagtcataataggtgacagtgttaaccgtgaaaacttgagaggcactctgccctcttccctataaaatcacacagcgtgattttacaaggtcccgtggcaccttgctcaggacctctgcccctagttagcaagactgcagcagttgctgttgcttattctgaaaggaatgtagaacttgacagcagccttctgagtctgggtcaggaagatgtcctttggaccaaagcagacttctttatacgcagctcagtttcccgggagtcgccacagatgtacccactagcccaggttgctgtgagtcagcggaagctcccgttatgccctttgctcctggtgggagagggaggagtgagctccctgggttccagtatttacttggtatacctgagtttgggggtacccttttttgtgacttttcaaaacagtgaattactgtcaccttgatggacaagtttcaataaaactttgtaaaaataattggacatgtg

SEQ ID NO: 3335 - DNA, 1011 bp, Homo sapiens
  source 1..1011: mol_type = genomic DNA
atcttcgcgccccttgcgttcttgccgcggcttgcctgggcaggtaaagcgcgattgcgagagctcggcaaccctgccgactcagccggaaccggctcccggcccgaggggcgtggtgtcctggtgctccgactccttccgcaggctccttgggacccgcggttccgggagtcccttgctcagggtccctttcctgcagtgaggcgccgtccgccttccctgtgtccccgcagacccccatcatgatggacagccccgaagacgccgacctcttccactccgaggaaatcaaggcaccagagaaggaggaattcctggcctggcagcatgatctggaagtgaatgataaagctcccgcccaggctcggccaacggtgtttcgatggacggggggcggaaaggaagtttacttatctgggtccttcaacaactggagtaaacttcccctcaccagaagccacaataactttgtagccatcctggatctgccggaaggagagcatcagtacaagttctttgtggatggtcagtggacgcacgacccttccgagcccatagtaaccagccagcttggcacagttaacaacatcattcaagtgaagaaaactgactttgaagtatttgatgctttaatggtggattcccaaaagtgctccgatgtgtctgagctgtccagttctcccccaggaccctaccatcaggagccctacgtctgcaaacccgaagagcgctttcgggcaccccctattctccccccacatctcctccaggtcatcctgaacaaggacacggggatttcctgtgatccagctttgcttcctgagcccaatcacgtcatgctgaaccacctatacgcgctgtctatcaaggatggagtgatggtgctcagcgcaacccaccggtacaagaagaagtacgtcaccaccttgttatacaagcccatatgaagagctgggggcggatggtggcccaggagacagcacaccaccaggctccacacgtgcatgcttt

SEQ ID NO: 3336 - DNA, 2303 bp, Homo sapiens
  source 1..2303: mol_type = genomic DNA
aagcggaaatggaatcgagatagcctcgcgcgtttagctggccgccgccacctccacgccctaggccgggccgacttacggagtcgccggaagcggaagtcgctgaggggtggtgaagcggttgggaaagtgtcggtttatcttcgcgccccttgcgttcttgccgcggcttgcctgggcagacccccatcatgggcaataccagcagtgagcgcgccgcgctggagcggcatggtggccataagacgccccggagggacagctcggggggcaccaaggacggggacaggcccaagatcctgatggacagccccgaagacgccgacctcttccactccgaggaaatcaaggcaccagagaaggaggaattcctggcctggcagcatgatctggaagtgaatgataaagctcccgcccaggctcggccaacggtgtttcgatggacggggggcggaaaggaagtttacttatctgggtccttcaacaactggagtaaacttcccctcaccagaagccacaataactttgtagccatcctggatctgccggaaggagagcatcagtacaagttctttgtggatggtcagtggacgcacgacccttccgagcccatagtaaccagccagcttggcacagttaacaacatcattcaagtgaagaaaactgactttgaagtatttgatgctttaatggtggattcccaaaagtgctccgatgtgtctgagctgtccagttctcccccaggaccctaccatcaggagccctacgtctgcaaacccgaagagcgctttcgggcaccccctattctccccccacatctcctccaggtcatcctgaacaaggacacggggatttcctgtgatccagctttgcttcctgagcccaatcacgtcatgctgaaccacctatacgcgctgtctatcaaggatggagtgatggtgctcagcgcaacccaccggtacaagaagaagtacgtcaccaccttgttatacaagcccatatgaagagctgggggcggatggtggcccaggagacagcacaccaccaggctccacacgtgcatgctttccccaagagggaatggactgtacattgctcatttcacactcttcagaagacatttcatacctgccctggtcctgcttgaaggtttgtccaggcagagcagctcctgcagcgcctcggtctgtgacagtcctcctagcacccccatggctttgagcctcggggactcatcaagtccaagaaaagagggaggggtggcagaggatctgcagccctggccccgcggtgcatgaggctgggtgcagttctaaacctacattctcgatttttcttaagccaaaaatgaatgctaactcctttgccagtaaaattctgggaaacagggactgaggccacacatcatttccagtcatctgtgtgtttttaaggccagccacttgtccctgttgaggcctggctatggaactaaatacagtgttggtcttgcctgtccttcaaaatcaacaacagattgtctctcggctccagggaggtgtcatttctatagaaattagaagctttctgatttctagatgaggttttacaattgtttcttacagtcatgtgcactaagtactctttttgtaagcagaggtggctggctctgcagccttaaggccattttttaagtcaccacgtctagaagtcacatgaactctgctcagcaataatctgttctcagaacagacttttcaacctgctgccggatttctccattcagctggatgatcctcaggactgaccagttagctggcaggttgtccagctttttattccagtcataataggtgacagtgttaaccgtgaaaacttgagaggcactctgccctcttccctataaaatcacacagcgtgattttacaaggtcccgtggcaccttgctcaggacctctgcccctagttagcaagactgcagcagttgctgttgcttattctgaaaggaatgtagaacttgacagcagccttctgagtctgggtcaggaagatgtcctttggaccaaagcagacttctttatacgcagctcagtttcccgggagtcgccacagatgtacccactagcccaggttgctgtgagtcagcggaagctcccgttatgccctttgctcctggtgggagagggaggagtgagctccctgggttccagtatttacttggtatacctgagtttgggggtacccttttttgtgacttttcaaaacagtgaattactgtcaccttgatggacaagtttcaataaaactttgtaaaaataattgga

SEQ ID NO: 3337 - DNA, 13506 bp, Homo sapiens
  source 1..13506: mol_type = genomic DNA
ggggcatttccgggtccgggccgagcgggcgcacgcgcgggagcgggactcggcggcatggcgggctccggagccggtgtgcgttgctccctgctgcggctgcaggagaccttgtccgctgcggaccgctgcggtgctgccctggccggtcatcaactgatccgcggcctggggcaggaatgcgtcctgagcagcagccccgcggtgctggcattacagacatctttagttttttccagagatttcggtttgcttgtatttgtccggaagtcactcaacagtattgaatttcgtgaatgtagagaagaaatcctaaagtttttatgtattttcttagaaaaaatgggccagaagatcgcaccttactctgttgaaattaagaacacttgtaccagtgtttatacaaaagatagagctgctaaatgtaaaattccagccctggaccttcttattaagttacttcagacttttagaagttctagactcatggatgaatttaaaattggagaattatttagtaaattctatggagaacttgcattgaaaaaaaaaataccagatacagttttagaaaaagtatatgagctcctaggattattgggtgaagttcatcctagtgagatgataaataatgcagaaaacctgttccgcgcttttctgggtgaacttaagacccagatgacatcagcagtaagagagcccaaactacctgttctggcaggatgtctgaaggggttgtcctcacttctgtgcaacttcactaagtccatggaagaagatccccagacttcaagggagatttttaattttgtactaaaggcaattcgtcctcagattgatctgaagagatatgctgtgccctcagctggcttgcgcctatttgccctgcatgcatctcagtttagcacctgccttctggacaactacgtgtctctatttgaagtcttgttaaagtggtgtgcccacacaaatgtagaattgaaaaaagctgcactttcagccctggaatcctttctgaaacaggtttctaatatggtggcgaaaaatgcagaaatgcataaaaataaactgcagtactttatggagcagttttatggaatcatcagaaatgtggattcgaacaacaaggagttatctattgctatccgtggatatggactttttgcaggaccgtgcaaggttataaacgcaaaagatgttgacttcatgtacgttgagctcattcagcgctgcaagcagatgttcctcacccagacagacactggtgacgaccgtgtttatcagatgccaagcttcctccagtctgttgcaagcgtcttgctgtaccttgacacagttcctgaggtgtatactccagttctggagcacctcgtggtgatgcagatagacagtttcccacagtacagtccaaaaatgcagctggtgtgttgcagagccatagtgaaggtgttcctagctttggcagcaaaagggccagttctcaggaattgcattagtactgtggtgcatcagggtttaatcagaatatgttctaaaccagtggtccttccaaagggccctgagtctgaatctgaagaccaccgtgcttcaggggaagtcagaactggcaaatggaaggtgcccacatacaaagactacgtggatctcttcagacatctcctgagctctgaccagatgatggattctattttagcagatgaagcatttttctctgtgaattcctccagtgaaagtctgaatcatttactttatgatgaatttgtaaaatccgttttgaagattgttgagaaattggatcttacacttgaaatacagactgttggggaacaagagaatggagatgaggcgcctggtgtttggatgatcccaacttcagatccagcggctaacttgcatccagctaaacctaaagatttttcggctttcattaacctggtggaattttgcagagagattctccctgagaaacaagcagaattttttgaaccatgggtgtactcattttcatatgaattaattttgcaatctacaaggttgcccctcatcagtggtttctacaaattgctttctattacagtaagaaatgccaagaaaataaaatatttcgagggagttagtccaaagagtctgaaacactctcctgaagacccagaaaagtattcttgctttgctttatttgtgaaatttggcaaagaggtggcagttaaaatgaagcagtacaaagatgaacttttggcctcttgtttgacctttcttctgtccttgccacacaacatcattgaactcgatgttagagcctacgttcctgcactgcagatggctttcaaactgggcctgagctatacccccttggcagaagtaggcctgaatgctctagaagaatggtcaatttatattgacagacatgtaatgcagccttattacaaagacattctcccctgcctggatggatacctgaagacttcagccttgtcagatgagaccaagaataactgggaagtgtcagctctttctcgggctgcccagaaaggatttaataaagtggtgttaaagcatctgaagaagacaaagaacctttcatcaaacgaagcaatatccttagaagaaataagaattagagtagtacaaatgcttggatctctaggaggacaaataaacaaaaatcttctgacagtcacgtcctcagatgagatgatgaagagctatgtggcctgggacagagagaagcggctgagctttgcagtgccctttagagagatgaaacctgtcattttcctggatgtgttcctgcctcgagtcacagaattagcgctcacagccagtgacagacaaactaaagttgcagcctgtgaacttttacatagcatggttatgtttatgttgggcaaagccacgcagatgccagaagggggacagggagccccacccatgtaccagctctataagcggacgtttcctgtgctgcttcgacttgcgtgtgatgttgatcaggtgacaaggcaactgtatgagccactagttatgcagctgattcactggttcactaacaacaagaaatttgaaagtcaggatactgttgccttactagaagctatattggatggaattgtggaccctgttgacagtactttaagagatttttgtggtcggtgtattcgagaattccttaaatggtccattaagcaaataacaccacagcagcaggagaagagtccagtaaacaccaaatcgcttttcaagcgactttatagccttgcgcttcaccccaatgctttcaagaggctgggagcatcacttgcctttaataatatctacagggaattcagggaagaagagtctctggtggaacagtttgtgtttgaagccttggtgatatacatggagagtctggccttagcacatgcagatgagaagtccttaggtacaattcaacagtgttgtgatgccattgatcacctatgccgcatcattgaaaagaagcatgtttctttaaataaagcaaagaaacgacgtttgccgcgaggatttccaccttccgcatcattgtgtttattggatctggtcaagtggcttttagctcattgtgggaggccccagacagaatgtcgacacaaatccattgaactcttttataaattcgttcctttattgccaggcaacagatcccctaatttgtggctgaaagatgttctcaaggaagaaggtgtctcttttctcatcaacacctttgaggggggtggctgtggccagccctcgggcatcctggcccagcccaccctcttgtaccgggggccattcagcctgcaggccacgctatgctggctggacctgctcctggccgcgttggagtgctacaacacgttcattggcgagagaactgtaggagcgctccaggtcctaggtactgaagcccagtcttcacttttgaaagcagtggctttcttcttagaaagcattgccatgcatgacattatagcagcagaaaagtgctttggcactggggcagcaggtaacagaacaagcccacaagagggagaaaggtacaactacagcaaatgcaccgttgtggtccggattatggagtttaccacgactctgctaaacacctccccggaaggatggaagctcctgaagaaggacttgtgtaatacacacctgatgagagtcctggtgcagacgctgtgtgagcccgcaagcataggtttcaacatcggagacgtccaggttatggctcatcttcctgatgtttgtgtgaatctgatgaaagctctaaagatgtccccatacaaagatatcctagagacccatctgagagagaaaataacagcacagagcattgaggagctttgtgccgtcaacttgtatggccctgacgcgcaagtggacaggagcaggctggctgctgttgtgtctgcctgtaaacagcttcacagagctgggcttctgcataatatattaccgtctcagtccacagatttgcatcattctgttggcacagaacttctttccctggtttataaaggcattgcccctggagatgagagacagtgtctgccttctctagacctcagttgtaagcagctggccagcggacttctggagttagcctttgcttttggaggactgtgtgagcgccttgtgagtcttctcctgaacccagcggtgctgtccacggcgtccttgggcagctcacagggcagcgtcatccacttctcccatggggagtatttctatagcttgttctcagaaacgatcaacacggaattattgaaaaatctggatcttgctgtattggagctcatgcagtcttcagtggataataccaaaatggtgagtgccgttttgaacggcatgttagaccagagcttcagggagcgagcaaaccagaaacaccaaggactgaaacttgcgactacaattctgcaacactggaagaagtgtgattcatggtgggccaaagattcccctctcgaaactaaaatggcagtgctggccttactggcaaaaattttacagattgattcatctgtatcttttaatacaagtcatggttcattccctgaagtctttacaacatatattagtctacttgctgacacaaagctggatctacatttaaagggccaagctgtcactcttcttccattcttcaccagcctcactggaggcagtctggaggaacttagacgtgttctggagcagctcatcgttgctcacttccccatgcagtccagggaatttcctccaggaactccgcggttcaataattatgtggactgcatgaaaaagtttctagatgcattggaattatctcaaagccctatgttgttggaattgatgacagaagttctttgtcgggaacagcagcatgtcatggaagaattatttcaatccagtttcaggaggattgccagaaggggttcatgtgtcacacaagtaggccttctggaaagcgtgtatgaaatgttcaggaaggatgacccccgcctaagtttcacacgccagtcctttgtggaccgctccctcctcactctgctgtggcactgtagcctggatgctttgagagaattcttcagcacaattgtggtggatgccattgatgtgttgaagtccaggtttacaaagctaaatgaatctacctttgatactcaaatcaccaagaagatgggctactataagattctagacgtgatgtattctcgccttcccaaagatgatgttcatgctaaggaatcaaaaattaatcaagttttccatggctcgtgtattacagaaggaaatgaacttacaaagacattgattaaattgtgctacgatgcatttacagagaacatggcaggagagaatcagctgctggagaggagaagactttaccattgtgcagcatacaactgcgccatatctgtcatctgctgtgtcttcaatgagttaaaattttaccaaggttttctgtttagtgaaaaaccagaaaagaacttgcttatttttgaaaatctgatcgacctgaagcgccgctataattttcctgtagaagttgaggttcctatggaaagaaagaaaaagtacattgaaattaggaaagaagccagagaagcagcaaatggggattcagatggtccttcctatatgtcttccctgtcatatttggcagacagtaccctgagtgaggaaatgagtcaatttgatttctcaaccggagttcagagctattcatacagctcccaagaccctagacctgccactggtcgttttcggagacgggagcagcgggaccccacggtgcatgatgatgtgctggagctggagatggacgagctcaatcggcatgagtgcatggcgcccctgacggccctggtcaagcacatgcacagaagcctgggcccgcctcaaggagaagaggattcagtgccaagagatcttccttcttggatgaaattcctccatggcaaactgggaaatccaatagtaccattaaatatccgtctcttcttagccaagcttgttattaatacagaagaggtctttcgcccttacgcgaagcactggcttagccccttgctgcagctggctgcttctgaaaacaatggaggagaaggaattcactacatggtggttgagatagtggccactattctttcatggacaggcttggccactccaacaggggtccctaaagatgaagtgttagcaaatcgattgcttaatttcctaatgaaacatgtctttcatccaaaaagagctgtgtttagacacaaccttgaaattataaagacccttgtcgagtgctggaaggattgtttatccatcccttataggttaatatttgaaaagttttccggtaaagatcctaattctaaagacaactcagtagggattcaattgctaggcatcgtgatggccaatgacctgcctccctatgacccacagtgtggcatccagagtagcgaatacttccaggctttggtgaataatatgtcctttgtaagatataaagaagtgtatgccgctgcagcagaagttctaggacttatacttcgatatgttatggagagaaaaaacatactggaggagtctctgtgtgaactggttgcgaaacaattgaagcaacatcagaatactatggaggacaagtttattgtgtgcttgaacaaagtgaccaagagcttccctcctcttgcagacaggttcatgaatgctgtgttctttctgctgccaaaatttcatggagtgttgaaaacactctgtctggaggtggtactttgtcgtgtggagggaatgacagagctgtacttccagttaaagagcaaggacttcgttcaagtcatgagacatagagatgatgaaagacaaaaagtatgtttggacataatttataagatgatgccaaagttaaaaccagtagaactccgagaacttctgaaccccgttgtggaattcgtttcccatccttctacaacatgtagggaacaaatgtataatattctcatgtggattcatgataattacagagatccagaaagtgagacagataatgactcccaggaaatatttaagttggcaaaagatgtgctgattcaaggattgatcgatgagaaccctggacttcaattaattattcgaaatttctggagccatgaaactaggttaccttcaaataccttggaccggttgctggcactaaattccttatattctcctaagatagaagtgcactttttaagtttagcaacaaattttctgctcgaaatgaccagcatgagcccagattatccaaaccccatgttcgagcatcctctgtcagaatgcgaatttcaggaatataccattgattctgattggcgtttccgaagtactgttctcactccgatgtttgtggagacccaggcctcccagggcactctccagacccgtacccaggaagggtccctctcagctcgctggccagtggcagggcagataagggccacccagcagcagcatgacttcacactgacacagactgcagatggaagaagctcatttgattggctgaccgggagcagcactgacccgctggtcgaccacaccagtccctcatctgactccttgctgtttgcccacaagaggagtgaaaggttacagagagcacccttgaagtcagtggggcctgattttgggaaaaaaaggctgggccttccaggggacgaggtggataacaaagtgaaaggtgcggccggccggacggacctactacgactgcgcagacggtttatgagggaccaggagaagctcagtttgatgtatgccagaaaaggcgttgctgagcaaaaacgagagaaggaaatcaagagtgagttaaaaatgaagcaggatgcccaggtcgttctgtacagaagctaccggcacggagaccttcctgacattcagatcaagcacagcagcctcatcaccccgttacaggccgtggcccagagggacccaataattgcaaaacagctctttagcagcttgttttctggaattttgaaagagatggataaatttaagacactgtctgaaaaaaacaacatcactcaaaagttgcttcaagacttcaatcgttttcttaataccaccttctctttctttccaccctttgtctcttgtattcaggacattagctgtcagcacgcagccctgctgagcctcgacccagcggctgttagcgctggttgcctggccagcctacagcagcccgtgggcatccgcctgctagaggaggctctgctccgcctgctgcctgctgagctgcctgccaagcgagtccgtgggaaggcccgcctccctcctgatgtcctcagatgggtggagcttgctaagctgtatagatcaattggagaatacgacgtcctccgtgggatttttaccagtgagataggaacaaagcaaatcactcagagtgcattattagcagaagccagaagtgattattctgaagctgctaagcagtatgatgaggctctcaataaacaagactgggtagatggtgagcccacagaagccgagaaggatttttgggaacttgcatcccttgactgttacaaccaccttgctgagtggaaatcacttgaatactgttctacagccagtatagacagtgagaaccccccagacctaaataaaatctggagtgaaccattttatcaggaaacatatctaccttacatgatccgcagcaagctgaagctgctgctccagggagaggctgaccagtccctgctgacatttattgacaaagctatgcacggggagctccagaaggcgattctagagcttcattacagtcaagagctgagtctgctttacctcctgcaagatgatgttgacagagccaaatattacattcaaaatggcattcagagttttatgcagaattattctagtattgatgtcctcttacaccaaagtagactcaccaaattgcagtctgtacaggctttaacagaaattcaggagttcatcagctttataagcaaacaaggcaatttatcatctcaagttccccttaagagacttctgaacacctggacaaacagatatccagatgctaaaatggacccaatgaacatctgggatgacatcatcacaaatcgatgtttctttctcagcaaaatagaggagaagcttacccctcttccagaagataatagtatgaatgtggatcaagatggagaccccagtgacaggatggaagtgcaagagcaggaagaagatatcagctccctgatcaggagttgcaagttttccatgaaaatgaagatgatagacagtgcccggaagcagaacaatttctcacttgctatgaaactactgaaggagctgcataaagagtcaaaaaccagagacgattggctggtgagctgggtgcagagctactgccgcctgagccactgccggagccggtcccagggctgctctgagcaggtgctcactgtgctgaaaacagtctctttgttggatgagaacaacgtgtcaagctacttaagcaaaaatattctggctttccgtgaccagaacattctcttgggtacaacttacaggatcatagcgaatgctctcagcagtgagccagcctgccttgctgaaatcgaggaggacaaggctagaagaatcttagagctttctggatccagttcagaggattcagagaaggtgatcgcgggtctgtaccagagagcattccagcacctctctgaggctgtgcaggcggctgaggaggaggcccagcctccctcctggagctgtgggcctgcagctggggtgattgatgcttacatgacgctggcagatttctgtgaccaacagctgcgcaaggaggaagagaatgcatcagttattgattctgcagaactgcaggcgtatccagcacttgtggtggagaaaatgttgaaagctttaaaattaaattccaatgaagccagattgaagtttcctagattacttcagattatagaacggtatccagaggagactttgagcctcatgacaaaagagatctcttccgttccctgctggcagttcatcagctggatcagccacatggtggccttactggacaaagaccaagccgttgctgttcagcactctgtggaagaaatcactgataactacccgcaggctattgtttatcccttcatcataagcagcgaaagctattccttcaaggatacttctactggtcataagaataaggagtttgtggcaaggattaaaagtaagttggatcaaggaggagtgattcaagattttattaatgccttagatcagctctctaatcctgaactgctctttaaggattggagcaatgatgtaagagctgaactagcaaaaacccctgtaaataaaaaaaacattgaaaaaatgtatgaaagaatgtatgcagccttgggtgacccaaaggctccaggcctgggggcctttagaaggaagtttattcagacttttggaaaagaatttgataaacattttgggaaaggaggttctaaactactgagaatgaagctcagtgacttcaacgacattaccaacatgctacttttaaaaatgaacaaagactcaaagccccctgggaatctgaaagaatgttcaccctggatgagcgacttcaaagtggagttcctgagaaatgagctggagattcccggtcagtatgacggtaggggaaagccattgccagagtaccacgtgcgaatcgccgggtttgatgagcgggtgacagtcatggcgtctctgcgaaggcccaagcgcatcatcatccgtggccatgacgagagggaacaccctttcctggtgaagggtggcgaggacctgcggcaggaccagcgcgtggagcagctcttccaggtcatgaatgggatcctggcccaagactccgcctgcagccagagggccctgcagctgaggacctatagcgttgtgcccatgacctccaggttaggattaattgagtggcttgaaaatactgttaccttgaaggaccttcttttgaacaccatgtcccaagaggagaaggcggcttacctgagtgatcccagggcaccgccgtgtgaatataaagattggctgacaaaaatgtcaggaaaacatgatgttggagcttacatgctaatgtataagggcgctaatcgtactgaaacagtcacgtcttttagaaaacgagaaagtaaagtgcctgctgatctcttaaagcgggccttcgtgaggatgagtacaagccctgaggctttcctggcgctccgctcccacttcgccagctctcacgctctgatatgcatcagccactggatcctcgggattggagacagacatctgaacaactttatggtggccatggagactggcggcgtgatcgggatcgactttgggcatgcgtttggatccgctacacagtttctgccagtccctgagttgatgccttttcggctaactcgccagtttatcaatctgatgttaccaatgaaagaaacgggccttatgtacagcatcatggtacacgcactccgggccttccgctcagaccctggcctgctcaccaacaccatggatgtgtttgtcaaggagccctcctttgattggaaaaattttgaacagaaaatgctgaaaaaaggagggtcatggattcaagaaataaatgttgctgaaaaaaattggtacccccgacagaaaatatgttacgctaagagaaagttagcaggtgccaatccagcagtcattacttgtgatgagctactcctgggtcatgagaaggcccctgccttcagagactatgtggctgtggcacgaggaagcaaagatcacaacattcgtgcccaagaaccagagagtgggctttcagaagagactcaagtgaagtgcctgatggaccaggcaacagaccccaacatccttggcagaacctgggaaggatgggagccctggatgtgaggtctgtgggagtctgcagatagaaagcattacattgtttaaagaatctactatactttggttggcagcattccatgagctgattttcctgaaacactaaagagaaatgtcttttgtgctacagtttcgtagcatgagtttaaatcaagattatgatgagtaaatgtgtatgggttaaatcaaagataaggttatagtaacatcaaagattaggtgaggtttatagaaagatagatatccaggcttaccaaagtattaagtcaagaatataatatgtgatcagctttcaaagcatttacaagtgctgcaagttagtgaaacagctgtctccgtaaatggaggaaatgtggggaagccttggaatgcccttctggttctggcacattggaaagcacactcagaaggcttcatcaccaagattttgggagagtaaagctaagtatagttgatgtaacattgtagaagcagcataggaacaataagaacaataggtaaagctataattatggcttatatttagaaatgactgcatttgatattttaggatatttttctaggttttttcctttcattttattctcttctagttttgacattttatgatagatttgctctctagaaggaaacgtctttatttaggagggcaaaaattttggtcatagcattcacttttgctattccaatctacaactggaagatacataaaagtgctttgcattgaatttgggataacttcaaaaatcccatggttgttgttagggatagtactaagcatttcagttccaggagaataaaagaaattcctatttgaaatgaattcctcatttggaggaaaaaaagcatgcattctagcacaacaagatgaaattatggaatacaaaagtggctccttcccatgtgcagtccctgtccccccccgccagtcctccacacccaaactgtttctgattggcttttagctttttgttgtttttttttttccttctaacacttgtatttggaggctcttctgtgattttgagaagtatactcttgagtgtttaataaagtttttttccaaaagta

SEQ ID NO: 3338 - DNA, 13413 bp, Homo sapiens
  source 1..13413: mol_type = genomic DNA
ggggcatttccgggtccgggccgagcgggcgcacgcgcgggagcgggactcggcggcatggcgggctccggagccggtgtgcgttgctccctgctgcggctgcaggagaccttgtccgctgcggaccgctgcggtgctgccctggccggtcatcaactgatccgcggcctggggcaggaatgcgtcctgagcagcagccccgcggtgctggcattacagacatctttagttttttccagagatttcggtttgcttgtatttgtccggaagtcactcaacagtattgaatttcgtgaatgtagagaagaaatcctaaagtttttatgtattttcttagaaaaaatgggccagaagatcgcaccttactctgttgaaattaagaacacttgtaccagtgtttatacaaaagatagagctgctaaatgtaaaattccagccctggaccttcttattaagttacttcagacttttagaagttctagactcatggatgaatttaaaattggagaattatttagtaaattctatggagaacttgcattgaaaaaaaaaataccagatacagttttagaaaaagtatatgagctcctaggattattgggtgaagttcatcctagtgagatgataaataatgcagaaaacctgttccgcgcttttctgggtgaacttaagacccagatgacatcagcagtaagagagcccaaactacctgttctggcaggatgtctgaaggggttgtcctcacttctgtgcaacttcactaagtccatggaagaagatccccagacttcaagggagatttttaattttgtactaaaggcaattcgtcctcagattgatctgaagagatatgctgtgccctcagctggcttgcgcctatttgccctgcatgcatctcagtttagcacctgccttctggacaactacgtgtctctatttgaagtcttgttaaagtggtgtgcccacacaaatgtagaattgaaaaaagctgcactttcagccctggaatcctttctgaaacaggtttctaatatggtggcgaaaaatgcagaaatgcataaaaataaactgcagtactttatggagcagttttatggaatcatcagaaatgtggattcgaacaacaaggagttatctattgctatccgtggatatggactttttgcaggaccgtgcaaggttataaacgcaaaagatgttgacttcatgtacgttgagctcattcagcgctgcaagcagatgttcctcacccagacagacactggtgacgaccgtgtttatcagatgccaagcttcctccagtctgttgcaagcgtcttgctgtaccttgacacagttcctgaggtgtatactccagttctggagcacctcgtggtgatgcagatagacagtttcccacagtacagtccaaaaatgcagctggtgtgttgcagagccatagtgaaggtgttcctagctttggcagcaaaagggccagttctcaggaattgcattagtactgtggtgcatcagggtttaatcagaatatgttctaaaccagtggtccttccaaagggccctgagtctgaatctgaagaccaccgtgcttcaggggaagtcagaactggcaaatggaaggtgcccacatacaaagactacgtggatctcttcagacatctcctgagctctgaccagatgatggattctattttagcagatgaagcatttttctctgtgaattcctccagtgaaagtctgaatcatttactttatgatgaatttgtaaaatccgttttgaagattgttgagaaattggatcttacacttgaaatacagactgttggggaacaagagaatggagatgaggcgcctggtgtttggatgatcccaacttcagatccagcggctaacttgcatccagctaaacctaaagatttttcggctttcattaacctggtggaattttgcagagagattctccctgagaaacaagcagaattttttgaaccatgggtgtactcattttcatatgaattaattttgcaatctacaaggttgcccctcatcagtggtttctacaaattgctttctattacagtaagaaatgccaagaaaataaaatatttcgagggagttagtccaaagagtctgaaacactctcctgaagacccagaaaagtattcttgctttgctttatttgtgaaatttggcaaagaggtggcagttaaaatgaagcagtacaaagatgaacttttggcctcttgtttgacctttcttctgtccttgccacacaacatcattgaactcgatgttagagcctacgttcctgcactgcagatggctttcaaactgggcctgagctatacccccttggcagaagtaggcctgaatgctctagaagaatggtcaatttatattgacagacatgtaatgcagccttattacaaagacattctcccctgcctggatggatacctgaagacttcagccttgtcagatgagaccaagaataactgggaagtgtcagctctttctcgggctgcccagaaaggatttaataaagtggtgttaaagcatctgaagaagacaaagaacctttcatcaaacgaagcaatatccttagaagaaataagaattagagtagtacaaatgcttggatctctaggaggacaaataaacaaaaatcttctgacagtcacgtcctcagatgagatgatgaagagctatgtggcctgggacagagagaagcggctgagctttgcagtgccctttagagagatgaaacctgtcattttcctggatgtgttcctgcctcgagtcacagaattagcgctcacagccagtgacagacaaactaaagttgcagcctgtgaacttttacatagcatggttatgtttatgttgggcaaagccacgcagatgccagaagggggacagggagccccacccatgtaccagctctataagcggacgtttcctgtgctgcttcgacttgcgtgtgatgttgatcaggtgacaaggcaactgtatgagccactagttatgcagctgattcactggttcactaacaacaagaaatttgaaagtcaggatactgttgccttactagaagctatattggatggaattgtggaccctgttgacagtactttaagagatttttgtggtcggtgtattcgagaattccttaaatggtccattaagcaaataacaccacagcagcaggagaagagtccagtaaacaccaaatcgcttttcaagcgactttatagccttgcgcttcaccccaatgctttcaagaggctgggagcatcacttgcctttaataatatctacagggaattcagggaagaagagtctctggtggaacagtttgtgtttgaagccttggtgatatacatggagagtctggccttagcacatgcagatgagaagtccttaggtacaattcaacagtgttgtgatgccattgatcacctatgccgcatcattgaaaagaagcatgtttctttaaataaagcaaagaaacgacgtttgccgcgaggatttccaccttccgcatcattgtgtttattggatctggtcaagtggcttttagctcattgtgggaggccccagacagaatgtcgacacaaatccattgaactcttttataaattcgttcctttattgccaggcaacagatcccctaatttgtggctgaaagatgttctcaaggaagaaggtgtctcttttctcatcaacacctttgaggggggtggctgtggccagccctcgggcatcctggcccagcccaccctcttgtaccgggggccattcagcctgcaggccacgctatgctggctggacctgctcctggccgcgttggagtgctacaacacgttcattggcgagagaactgtaggagcgctccaggtcctaggtactgaagcccagtcttcacttttgaaagcagtggctttcttcttagaaagcattgccatgcatgacattatagcagcagaaaagtgctttggcactggggcagcaggtaacagaacaagcccacaagagggagaaaggtacaactacagcaaatgcaccgttgtggtccggattatggagtttaccacgactctgctaaacacctccccggaaggatggaagctcctgaagaaggacttgtgtaatacacacctgatgagagtcctggtgcagacgctgtgtgagcccgcaagcataggtttcaacatcggagacgtccaggttatggctcatcttcctgatgtttgtgtgaatctgatgaaagctctaaagatgtccccatacaaagatatcctagagacccatctgagagagaaaataacagcacagagcattgaggagctttgtgccgtcaacttgtatggccctgacgcgcaagtggacaggagcaggctggctgctgttgtgtctgcctgtaaacagcttcacagagctgggcttctgcataatatattaccgtctcagtccacagatttgcatcattctgttggcacagaacttctttccctggtttataaaggcattgcccctggagatgagagacagtgtctgccttctctagacctcagttgtaagcagctggccagcggacttctggagttagcctttgcttttggaggactgtgtgagcgccttgtgagtcttctcctgaacccagcggtgctgtccacggcgtccttgggcagctcacagggcagcgtcatccacttctcccatggggagtatttctatagcttgttctcagaaacgatcaacacggaattattgaaaaatctggatcttgctgtattggagctcatgcagtcttcagtggataataccaaaatggtgagtgccgttttgaacggcatgttagaccagagcttcagggagcgagcaaaccagaaacaccaaggactgaaacttgcgactacaattctgcaacactggaagaagtgtgattcatggtgggccaaagattcccctctcgaaactaaaatggcagtgctggccttactggcaaaaattttacagattgattcatctgtatcttttaatacaagtcatggttcattccctgaagtctttacaacatatattagtctacttgctgacacaaagctggatctacatttaaagggccaagctgtcactcttcttccattcttcaccagcctcactggaggcagtctggaggaacttagacgtgttctggagcagctcatcgttgctcacttccccatgcagtccagggaatttcctccaggaactccgcggttcaataattatgtggactgcatgaaaaagtttctagatgcattggaattatctcaaagccctatgttgttggaattgatgacagaagttctttgtcgggaacagcagcatgtcatggaagaattatttcaatccagtttcaggaggattgccagaaggggttcatgtgtcacacaagtaggccttctggaaagcgtgtatgaaatgttcaggaaggatgacccccgcctaagtttcacacgccagtcctttgtggaccgctccctcctcactctgctgtggcactgtagcctggatgctttgagagaattcttcagcacaattgtggtggatgccattgatgtgttgaagtccaggtttacaaagctaaatgaatctacctttgatactcaaatcaccaagaagatgggctactataagattctagacgtgatgtattctcgccttcccaaagatgatgttcatgctaaggaatcaaaaattaatcaagttttccatggctcgtgtattacagaaggaaatgaacttacaaagacattgattaaattgtgctacgatgcatttacagagaacatggcaggagagaatcagctgctggagaggagaagactttaccattgtgcagcatacaactgcgccatatctgtcatctgctgtgtcttcaatgagttaaaattttaccaaggttttctgtttagtgaaaaaccagaaaagaacttgcttatttttgaaaatctgatcgacctgaagcgccgctataattttcctgtagaagttgaggttcctatggaaagaaagaaaaagtacattgaaattaggaaagaagccagagaagcagcaaatggggattcagatggtccttcctatatgtcttccctgtcatatttggcagacagtaccctgagtgaggaaatgagtcaatttgatttctcaaccggagttcagagctattcatacagctcccaagaccctagacctgccactggtcgttttcggagacgggagcagcgggaccccacggtgcatgatgatgtgctggagctggagatggacgagctcaatcggcatgagtgcatggcgcccctgacggccctggtcaagcacatgcacagaagcctgggcccgcctcaaggagaagaggattcagtgccaagagatcttccttcttggatgaaattcctccatggcaaactgggaaatccaatagtaccattaaatatccgtctcttcttagccaagcttgttattaatacagaagaggtctttcgcccttacgcgaagcactggcttagccccttgctgcagctggctgcttctgaaaacaatggaggagaaggaattcactacatggtggttgagatagtggccactattctttcatggacaggcttggccactccaacaggggtccctaaagatgaagtgttagcaaatcgattgcttaatttcctaatgaaacatgtctttcatccaaaaagagctgtgtttagacacaaccttgaaattataaagacccttgtcgagtgctggaaggattgtttatccatcccttataggttaatatttgaaaagttttccggtaaagatcctaattctaaagacaactcagtagggattcaattgctaggcatcgtgatggccaatgacctgcctccctatgacccacagtgtggcatccagagtagcgaatacttccaggctttggtgaataatatgtcctttgtaagatataaagaagtgtatgccgctgcagcagaagttctaggacttatacttcgatatgttatggagagaaaaaacatactggaggagtctctgtgtgaactggttgcgaaacaattgaagcaacatcagaatactatggaggacaagtttattgtgtgcttgaacaaagtgaccaagagcttccctcctcttgcagacaggttcatgaatgctgtgttctttctgctgccaaaatttcatggagtgttgaaaacactctgtctggaggtggtactttgtcgtgtggagggaatgacagagctgtacttccagttaaagagcaaggacttcgttcaagtcatgagacatagagatgatgaaagacaaaaagtatgtttggacataatttataagatgatgccaaagttaaaaccagtagaactccgagaacttctgaaccccgttgtggaattcgtttcccatccttctacaacatgtagggaacaaatgtataatattctcatgtggattcatgataattacagagatccagaaagtgagacagataatgactcccaggaaatatttaagttggcaaaagatgtgctgattcaaggattgatcgatgagaaccctggacttcaattaattattcgaaatttctggagccatgaaactaggttaccttcaaataccttggaccggttgctggcactaaattccttatattctcctaagatagaagtgcactttttaagtttagcaacaaattttctgctcgaaatgaccagcatgagcccagattatccaaaccccatgttcgagcatcctctgtcagaatgcgaatttcaggaatataccattgattctgattggcgtttccgaagtactgttctcactccgatgtttgtggagacccaggcctcccagggcactctccagacccgtacccaggaagggtccctctcagctcgctggccagtggcagggcagataagggccacccagcagcagcatgacttcacactgacacagactgcagatggaagaagctcatttgattggctgaccgggagcagcactgacccgctggtcgaccacaccagtccctcatctgactccttgctgtttgcccacaagaggagtgaaaggttacagagagcacccttgaagtcagtggggcctgattttgggaaaaaaaggctgggccttccaggggacgaggtggataacaaagtgaaaggtgcggccggccggacggacctactacgactgcgcagacggtttatgagggaccaggagaagctcagtttgatgtatgccagaaaaggcgttgctgagcaaaaacgagagaaggaaatcaagagtgagttaaaaatgaagcaggatgcccaggtcgttctgtacagaagctaccggcacggagaccttcctgacattcagatcaagcacagcagcctcatcaccccgttacaggccgtggcccagagggacccaataattgcaaaacagctctttagcagcttgttttctggaattttgaaagagatggataaatttaagacactgtctgaaaaaaacaacatcactcaaaagttgcttcaagacttcaatcgttttcttaataccaccttctctttctttccaccctttgtctcttgtattcaggacattagctgtcagcacgcagccctgctgagcctcgacccagcggctgttagcgctggttgcctggccagcctacagcagcccgtgggcatccgcctgctagaggaggctctgctccgcctgctgcctgctgagctgcctgccaagcgagtccgtgggaaggcccgcctccctcctgatgtcctcagatgggtggagcttgctaagctgtatagatcaattggagaatacgacgtcctccgtgggatttttaccagtgagataggaacaaagcaaatcactcagagtgcattattagcagaagccagaagtgattattctgaagctgctaagcagtatgatgaggctctcaataaacaagactgggtagatggtgagcccacagaagccgagaaggatttttgggaacttgcatcccttgactgttacaaccaccttgctgagtggaaatcacttgaatactgttctacagccagtatagacagtgagaaccccccagacctaaataaaatctggagtgaaccattttatcaggaaacatatctaccttacatgatccgcagcaagctgaagctgctgctccagggagaggctgaccagtccctgctgacatttattgacaaagctatgcacggggagctccagaaggcgattctagagcttcattacagtcaagagctgagtctgctttacctcctgcaagatgatgttgacagagccaaatattacattcaaaatggcattcagagttttatgcagaattattctagtattgatgtcctcttacaccaaagtagactcaccaaattgcagtctgtacaggctttaacagaaattcaggagttcatcagctttataagcaaacaaggcaatttatcatctcaagttccccttaagagacttctgaacacctggacaaacagatatccagatgctaaaatggacccaatgaacatctgggatgacatcatcacaaatcgatgtttctttctcagcaaaatagaggagaagcttacccctcttccagaagataatagtatgaatgtggatcaagatggagaccccagtgacaggatggaagtgcaagagcaggaagaagatatcagctccctgatcaggagttgcaagttttccatgaaaatgaagatgatagacagtgcccggaagcagaacaatttctcacttgctatgaaactactgaaggagctgcataaagagtcaaaaaccagagacgattggctggtgagctgggtgcagagctactgccgcctgagccactgccggagccggtcccagggctgctctgagcaggtgctcactgtgctgaaaacagtctctttgttggatgagaacaacgtgtcaagctacttaagcaaaaatattctggctttccgtgaccagaacattctcttgggtacaacttacaggatcatagcgaatgctctcagcagtgagccagcctgccttgctgaaatcgaggaggacaaggctagaagaatcttagagctttctggatccagttcagaggattcagagaaggtgatcgcgggtctgtaccagagagcattccagcacctctctgaggctgtgcaggcggctgaggaggaggcccagcctccctcctggagctgtgggcctgcagctggggtgattgatgcttacatgacgctggcagatttctgtgaccaacagctgcgcaaggaggaagagaatgcatcagttattgattctgcagaactgcaggcgtatccagcacttgtggtggagaaaatgttgaaagctttaaaattaaattccaatgaagccagattgaagtttcctagattacttcagattatagaacggtatccagaggagactttgagcctcatgacaaaagagatctcttccgttccctgctggcagttcatcagctggatcagccacatggtggccttactggacaaagaccaagccgttgctgttcagcactctgtggaagaaatcactgataactacccgcaggctattgtttatcccttcatcataagcagcgaaagctattccttcaaggatacttctactggtcataagaataaggagtttgtggcaaggattaaaagtaagttggatcaaggaggagtgattcaagattttattaatgccttagatcagctctctaatcctgaactgctctttaaggattggagcaatgatgtaagagctgaactagcaaaaacccctgtaaataaaaaaaacattgaaaaaatgtatgaaagaatgtatgcagccttgggtgacccaaaggctccaggcctgggggcctttagaaggaagtttattcagacttttggaaaagaatttgataaacattttgggaaaggaggttctaaactactgagaatgaagctcagtgacttcaacgacattaccaacatgctacttttaaaaatgaacaaagactcaaagccccctgggaatctgaaagaatgttcaccctggatgagcgacttcaaagtggagttcctgagaaatgagctggagattcccggtcagtatgacggtaggggaaagccattgccagagtaccacgtgcgaatcgccgggtttgatgagcgggtgacagtcatggcgtctctgcgaaggcccaagcgcatcatcatccgtggccatgacgagagggaacaccctttcctggtgaagggtggcgaggacctgcggcaggaccagcgcgtggagcagctcttccaggtcatgaatgggatcctggcccaagactccgcctgcagccagagggccctgcagctgaggacctatagcgttgtgcccatgacctccagtgatcccagggcaccgccgtgtgaatataaagattggctgacaaaaatgtcaggaaaacatgatgttggagcttacatgctaatgtataagggcgctaatcgtactgaaacagtcacgtcttttagaaaacgagaaagtaaagtgcctgctgatctcttaaagcgggccttcgtgaggatgagtacaagccctgaggctttcctggcgctccgctcccacttcgccagctctcacgctctgatatgcatcagccactggatcctcgggattggagacagacatctgaacaactttatggtggccatggagactggcggcgtgatcgggatcgactttgggcatgcgtttggatccgctacacagtttctgccagtccctgagttgatgccttttcggctaactcgccagtttatcaatctgatgttaccaatgaaagaaacgggccttatgtacagcatcatggtacacgcactccgggccttccgctcagaccctggcctgctcaccaacaccatggatgtgtttgtcaaggagccctcctttgattggaaaaattttgaacagaaaatgctgaaaaaaggagggtcatggattcaagaaataaatgttgctgaaaaaaattggtacccccgacagaaaatatgttacgctaagagaaagttagcaggtgccaatccagcagtcattacttgtgatgagctactcctgggtcatgagaaggcccctgccttcagagactatgtggctgtggcacgaggaagcaaagatcacaacattcgtgcccaagaaccagagagtgggctttcagaagagactcaagtgaagtgcctgatggaccaggcaacagaccccaacatccttggcagaacctgggaaggatgggagccctggatgtgaggtctgtgggagtctgcagatagaaagcattacattgtttaaagaatctactatactttggttggcagcattccatgagctgattttcctgaaacactaaagagaaatgtcttttgtgctacagtttcgtagcatgagtttaaatcaagattatgatgagtaaatgtgtatgggttaaatcaaagataaggttatagtaacatcaaagattaggtgaggtttatagaaagatagatatccaggcttaccaaagtattaagtcaagaatataatatgtgatcagctttcaaagcatttacaagtgctgcaagttagtgaaacagctgtctccgtaaatggaggaaatgtggggaagccttggaatgcccttctggttctggcacattggaaagcacactcagaaggcttcatcaccaagattttgggagagtaaagctaagtatagttgatgtaacattgtagaagcagcataggaacaataagaacaataggtaaagctataattatggcttatatttagaaatgactgcatttgatattttaggatatttttctaggttttttcctttcattttattctcttctagttttgacattttatgatagatttgctctctagaaggaaacgtctttatttaggagggcaaaaattttggtcatagcattcacttttgctattccaatctacaactggaagatacataaaagtgctttgcattgaatttgggataacttcaaaaatcccatggttgttgttagggatagtactaagcatttcagttccaggagaataaaagaaattcctatttgaaatgaattcctcatttggaggaaaaaaagcatgcattctagcacaacaagatgaaattatggaatacaaaagtggctccttcccatgtgcagtccctgtccccccccgccagtcctccacacccaaactgtttctgattggcttttagctttttgttgtttttttttttccttctaacacttgtatttggaggctcttctgtgattttgagaagtatactcttgagtgtttaataaagtttttttccaaaagta

SEQ ID NO: 3339 - DNA, 710 bp, Homo sapiens
  source 1..710: mol_type = genomic DNA
gcctcaagccgacgcagcggcctactctcgcactgcagacggggaaactgaggcctgaggcggccggggtggggcagacctcccggcgagcccgagcccccgcccccggctagccccgccctggcccgtaagaagcacccggggcgcgaggcgaaggcgcacagcgcggggccaggctgggtccagcagcgcgatggcagctcagcggctgggcaagcgcgtgctgagcaagctgcagtctccatcgcgggcccgcgggccagggggcagtcccggggggctgcagaagcggcacgcgcgcgtcaccgtcaagtatgaccggcgggagctgcagcggcggctggacgtggagaagtggatcgacgggcgcctggaggagctgtaccgcggcatggaggcagacatgcccgatgagatcaacattgatgaattgttggagttagagagtgaagaggagagaagccggaaaatccagggactcctgaagtcatgtgggaaacctgtcgaggacttcatccaggagctgctggcaaagcttcaaggcctccacaggcagcccggcctccgccagccaagcccctcccacgacggcagcctcagccccctccaggaccgggcccggactgctcacccctgaccctcttgcactctccctgccccccggacgccgcccagcttgcttgtgtataagttgtatttaatggttctgt

SEQ ID NO: 3340 - DNA, 696 bp, Homo sapiens
  source 1..696: mol_type = genomic DNA
gcagggacccgcccgggactctgggtccccgcccatacctcaacttcgcacgactgcgtgcctcaagccgacgcagcggcctactctcgcactgcagacggggaaactgaggcctgaggcggccggggtggggcagacctcccggcgagcccgagcccccgcccccggctagccccgccctggcccgtaagaagcacccggggcgcgaggcgaaggcgcacagcgcggggccaggctgggtccagcagcgcgatggcagctcagcggctgggcaagcgcgtgctgagcaagctgcagtctccatcgcgggcccgcgggccagggggcagtcccggggggctgcagaagcggcacgcgcgcgtcaccgtcaagtatgaccggcgggagctgcagcggcggctggacgtggagaagtggatcgacgggcgcctggaggagctgtaccgcggcatgggactcctgaagtcatgtgggaaacctgtcgaggacttcatccaggagctgctggcaaagcttcaaggcctccacaggcagcccggcctccgccagccaagcccctcccacgacggcagcctcagccccctccaggaccgggcccggactgctcacccctgaccctcttgcactctccctgccccccggacgccgcccagcttgcttgtgtataagttgtatttaatggttctgtaacaataa

SEQ ID NO: 3341 - DNA, 2382 bp, Homo sapiens
  source 1..2382: mol_type = genomic DNA
ataaaagcctagtggccattgtgttcgttgctcttatcggttcccatcccagttgttgatcttatgcaagacgctgcacgaccccgcgcccgcttgtcgccacggcacttgaggcagccggagatactctgagttactcggagcccgacgcctgagggtgagatgaacgcgctggcctccctaaccgtccggacctgtgatcgcttctggcagaccgaaccggcgctcctgcccccggggtgacgcgcagctcccagccgcccagacacatggccccaggccaagcaccccatcaggctaccccgtggagggatgcccaccctttcttcctcctgtccccagtgatgggcctcctcagccgcgcctggagccgcctgaggggcctgggacctctagagccctggctggtggaagcagtaaaaggagcagctctggtagaagctggcctggagggagaagctaggactcctctggcaatcccccataccccttggggcagacgccctgaagaggaggctgaagacagtggaggccctggagaggacagagaaacactggggctgaaaaccagcagttcccttcctgaagcctggggacttttggatgatgatgatggcatgtatggtgagcgagaggcaaccagtgtccctagagggcagggaagtcaatttgcagatggccagcgtgctcccctgtctcccagccttctgataaggacactgcaaggttctgataagaacccaggggaggagaaagccgaggaagagggagttgctgaagaggagggagttaacaagttctcttatccaccatcacaccgggagtgttgtccagccgtggaggaggaggacgatgaagaagctgtaaagaaagaagctcacagaacctctacttctgccttgtctccaggatccaagcccagcacttgggtgtcttgcccaggggaggaagagaatcaagccacggaggataaaagaacagaaagaagtaaaggagccaggaagacctccgtgtccccccgatcttcaggctccgaccccaggtcctgggagtatcgttcaggagaggcgtccgaggagaaggaggaaaaggcacacaaagaaactgggaaaggagaagctgccccagggccgcaatcctcagccccagcccagaggccccagctcaagtcctggtggtgccaacccagtgatgaagaggagggtgaggtcaaggctttgggggcagctgagaaggatggagaagctgagtgtcctccctgcatccccccaccaagtgccttcctgaaggcctgggtgtattggccaggagaggacacagaggaagaggaagatgaggaagaagatgaggacagtgactctggatcagatgaggaagagggagaagctgaggcttcctcttccactcctgctacaggtgtcttcttgaagtcctgggtctatcagccaggagaggacacagaggaggaggaagatgaggacagtgatacaggatcagccgaggatgaaagagaagctgagacttctgcttccacaccccctgcaagtgctttcttgaaggcctgggtgtatcggccaggagaggacacggaggaggaggaagatgaggatgtggatagtgaggataaggaagatgattcagaagcagccttgggagaagctgagtcagacccacatccctcccacccggaccagagggcccacttcaggggctggggatatcgacctggaaaagagacagaggaagaggaagctgctgaggactggggagaagctgagccctgccccttccgagtggccatctatgtacctggagagaagccaccgcctccctgggctcctcctaggctgcccctccgactgcaaaggcggctcaagcgcccagaaacccctactcatgatccggaccctgagactcccctaaaggccagaaaggtgcgcttctccgagaaggtcactgtccatttcctggctgtctgggcagggccggcccaggccgcccgccagggcccctgggagcagcttgctcgggatcgcagccgcttcgcacgccgcatcacccaggcccaggaggagctgagcccctgcctcacccctgctgcccgggccagagcctgggcacgcctcaggaacccacctttagcccccatccctgccctcacccagaccttgccttcctcctctgtcccttcgtccccagtccagaccacgcccttgagccaagctgtggccacaccttcccgctcgtctgctgctgcagcggctgccctggacctcagtgggaggcgtggctgagaccaactggtttgcctataatttattaactatttattttttctaagtgtgggtttatataaggaataaagccttttgatttgtagcg

SEQ ID NO: 3342 - DNA, 1667 bp, Homo sapiens
  source 1..1667: mol_type = genomic DNA
gctcttatcggttcccatcccagttgttgatcttatgaaagccgaggaagagggagttgctgaagaggagggagttaacaagttctcttatccaccatcacaccgggagtgttgtccagccgtggaggaggaggacgatgaagaagctgtaaagaaagaagctcacagaacctctacttctgccttgtctccaggatccaagcccagcacttgggtgtcttgcccaggggaggaagagaatcaagccacggaggataaaagaacagaaagaagtaaaggagccaggaagacctccgtgtccccccgatcttcaggctccgaccccaggtcctgggagtatcgttcaggagaggcgtccgaggagaaggaggaaaaggcacacaaagaaactgggaaaggagaagctgccccagggccgcaatcctcagccccagcccagaggccccagctcaagtcctggtggtgccaacccagtgatgaagaggagggtgaggtcaaggctttgggggcagctgagaaggatggagaagctgagtgtcctccctgcatccccccaccaagtgccttcctgaaggcctgggtgtattggccaggagaggacacagaggaagaggaagatgaggaagaagatgaggacagtgactctggatcagatgaggaagagggagaagctgaggcttcctcttccactcctgctacaggtgtcttcttgaagtcctgggtctatcagccaggagaggacacagaggaggaggaagatgaggacagtgatacaggatcagccgaggatgaaagagaagctgagacttctgcttccacaccccctgcaagtgctttcttgaaggcctgggtgtatcggccaggagaggacacggaggaggaggaagatgaggatgtggatagtgaggataaggaagatgattcagaagcagccttgggagaagctgagtcagacccacatccctcccacccggaccagagggcccacttcaggggctggggatatcgacctggaaaagagacagaggaagaggaagctgctgaggactggggagaagctgagccctgccccttccgagtggccatctatgtacctggagagaagccaccgcctccctgggctcctcctaggctgcccctccgactgcaaaggcggctcaagcgcccagaaacccctactcatgatccggaccctgagactcccctaaaggccagaaaggtgcgcttctccgagaaggtcactgtccatttcctggctgtctgggcagggccggcccaggccgcccgccagggcccctgggagcagcttgctcgggatcgcagccgcttcgcacgccgcatcacccaggcccaggaggagctgagcccctgcctcacccctgctgcccgggccagagcctgggcacgcctcaggaacccacctttagcccccatccctgccctcacccagaccttgccttcctcctctgtcccttcgtccccagtccagaccacgcccttgagccaagctgtggccacaccttcccgctcgtctgctgctgcagcggctgccctggacctcagtgggaggcgtggctgagaccaactggtttgcctataatttattaactatttattttttctaagtgtgggtttatataaggaataaagccttttgatttgtagcg

SEQ ID NO: 3343 - DNA, 2266 bp, Homo sapiens
  source 1..2266: mol_type = genomic DNA
gctcttatcggttcccatcccagttgttgatcttatgcaagacgctgcacgaccccgcgcccgcttgtcgccacggcacttgaggcagccggagatactctgagttactcggagcccgacgcctgagggtgagatgaacgcgctggcctccctaaccgtccggacctgtgatcgcttctggcagaccgaaccggcgctcctgcccccggggtgacgcgcagctcccagccgcccagacacatggccccaggccaagcaccccatcaggctaccccgtggagggatgccctggctggtggaagcagtaaaaggagcagctctggtagaagctggcctggagggagaagctaggactcctctggcaatcccccataccccttggggcagacgccctgaagaggaggctgaagacagtggaggccctggagaggacagagaaacactggggctgaaaaccagcagttcccttcctgaagcctggggacttttggatgatgatgatggcatgtatggtgagcgagaggcaaccagtgtccctagagggcagggaagtcaatttgcagatggccagcgtgctcccctgtctcccagccttctgataaggacactgcaaggttctgataagaacccaggggaggagaaagccgaggaagagggagttgctgaagaggagggagttaacaagttctcttatccaccatcacaccgggagtgttgtccagccgtggaggaggaggacgatgaagaagctgtaaagaaagaagctcacagaacctctacttctgccttgtctccaggatccaagcccagcacttgggtgtcttgcccaggggaggaagagaatcaagccacggaggataaaagaacagaaagaagtaaaggagccaggaagacctccgtgtccccccgatcttcaggctccgaccccaggtcctgggagtatcgttcaggagaggcgtccgaggagaaggaggaaaaggcacacaaagaaactgggaaaggagaagctgccccagggccgcaatcctcagccccagcccagaggccccagctcaagtcctggtggtgccaacccagtgatgaagaggagggtgaggtcaaggctttgggggcagctgagaaggatggagaagctgagtgtcctccctgcatccccccaccaagtgccttcctgaaggcctgggtgtattggccaggagaggacacagaggaagaggaagatgaggaagaagatgaggacagtgactctggatcagatgaggaagagggagaagctgaggcttcctcttccactcctgctacaggtgtcttcttgaagtcctgggtctatcagccaggagaggacacagaggaggaggaagatgaggacagtgatacaggatcagccgaggatgaaagagaagctgagacttctgcttccacaccccctgcaagtgctttcttgaaggcctgggtgtatcggccaggagaggacacggaggaggaggaagatgaggatgtggatagtgaggataaggaagatgattcagaagcagccttgggagaagctgagtcagacccacatccctcccacccggaccagagggcccacttcaggggctggggatatcgacctggaaaagagacagaggaagaggaagctgctgaggactggggagaagctgagccctgccccttccgagtggccatctatgtacctggagagaagccaccgcctccctgggctcctcctaggctgcccctccgactgcaaaggcggctcaagcgcccagaaacccctactcatgatccggaccctgagactcccctaaaggccagaaaggtgcgcttctccgagaaggtcactgtccatttcctggctgtctgggcagggccggcccaggccgcccgccagggcccctgggagcagcttgctcgggatcgcagccgcttcgcacgccgcatcacccaggcccaggaggagctgagcccctgcctcacccctgctgcccgggccagagcctgggcacgcctcaggaacccacctttagcccccatccctgccctcacccagaccttgccttcctcctctgtcccttcgtccccagtccagaccacgcccttgagccaagctgtggccacaccttcccgctcgtctgctgctgcagcggctgccctggacctcagtgggaggcgtggctgagaccaactggtttgcctataatttattaactatttattttttctaagtgtgggtttatataaggaataaagccttttgatttgt

SEQ ID NO: 3344 - DNA, 1953 bp, Homo sapiens
  source 1..1953: mol_type = genomic DNA
aaagaacatggcgggcgcatcagagctcgggaccggcccaggagcagcgggtggagatggagatgattcgctatacccgatcgcggttttaatcgacgagctccgcaatgaagacgtgcagctccgactcaacagtattaagaagttatcaacaattgccctagcacttggagtagaaaggacccgaagtgaattgttgccatttcttacagatacaatttatgatgaagatgaggtactattagctcttgctgagcagctgggaaatttcactggcctagtgggaggtcctgactttgcccactgtctgctgcctcctttggaaaatctggcaactgtggaagagactgttgttcgtgacaaggctgtggagtccctgagacagatctcccaggagcatactcctgttgctctggaagcttattttgtacctctggtgaaacgcttagcaagtggggattggttcacctctcgcacatctgcatgtggtttgttcagcgtttgctatcccagggcatcaaatgctgttaaagcagaaatcagacagcaattccgttccttgtgctcagatgacacaccaatggtacgacgtgctgctgcttccaaattgggtgaatttgcaaaagttttggaattagacagtgtgaaaagtgaaattgttccactgttcactagtctagcttcagatgaacaggattcagtgcgcctccttgctgtggaagcttgtgtcagtattgcccagttattgtctcaggatgaccttgagactttggtgatgcctacacttcgacaagcagcagaagataaatcttggcgcgttcgctatatggtggctgacagattttcagagctccagaaagccatgggtcctaaaatcaccctaaatgacctcatccccgcctttcagaacctacttaaagactgtgaagctgaagtccgggcagctgctgcccacaaagtaaaagaacttggtgagaacttgcccattgaagatagagagaccataattatgaatcaaattctgccttatataaagtgtcctgacgttcgtttgaatatcatctccaatttggattgtgtaaatgaagtgattggaatccgtcagctctctcagtctctccttcctgccatagtggagctggcagaagatgccaaatggagggtccgcctggccatcattgagtatatgccgctgctggcaggccagctgggtgtggaattctttgatgaaaagctgaattctttatgtatggcttggctcgtggaccatgtatacgccatccgagaagctgccaccaacaacctcatgaaactagttcagaagtttggtacagagtgggcccaaaatactattgttcccaaagtgttagtaatggcaaatgatcctaattacttgcatagaatgaccactttattctgcattaatgcactgtctgaggcctgtggtcaggaaataactactaagcaaatgctgcccatcgtattaaaaatggcaggagaccaagtagcaaatgttcgcttcaatgtggccaaatctctacaaaagattggaccaattctagataccaatgctttacagggagaagtgaagccagtactacagaagttaggtcaagatgaagacatggatgtcaaatactttgcacaggaagctataagtgttcttgcattggcataatgaggagcaggagggaaaaggcctttactagattcttgtcacaaatttctagtcaatgtgttcttaactgggtggagaaagaatggaaaaccttcaagatctcatccaagcaaatggcaacaacttagaagaaatcatttagtgacttaattctttctaaagatgaaatgggattgttttttactcgtcttccttgttaaatcattatttaagccgttcttattgaccaattcctgacacttgattgtctcctaatgctttatccatcaccacct

SEQ ID NO: 3345 - DNA, 3281 bp, Homo sapiens
  source 1..3281: mol_type = genomic DNA
ccccccacgtttcagcacagcgctggccgcagtctgacaggaaagggacggagccaagatggcggcggccgacggcgacgactcgctgtaccccatcgcggtgctcatagacgaactccgcaatgaggacgttcagcttcgcctcaacagcatcaagaagctgtccaccatcgccttggcccttggggttgaaaggacccgaagtgagcttctgcctttccttacagataccatctatgatgaagatgaggtcctcctggccctggcagaacagctgggaaccttcactaccctggtgggaggcccagagtacgtgcactgcctgctgccaccgctggagtcgctggccacagtggaggagacagtggtgcgggacaaggcagtggagtccttacgggccatctcacacgagcactcgccctctgacctggaggcgcactttgtgccgctagtgaagcggctggcgggcggcgactggttcacctcccgcacctcggcctgcggcctcttctccgtctgctacccccgagtgtccagtgctgtgaaggcggaacttcgacagtacttccggaacctgtgctcagatgacacccccatggtgcggcgggccgcagcctccaagctgggggagtttgccaaggtgctggagctggacaacgtcaagagtgagatcatccccatgttctccaacctggcctctgacgagcaggactcggtgcggctgctggcggtggaggcgtgcgtgaacatcgcccagcttctgccccaggaggatctggaggccctggtgatgcccactctgcgccaggccgctgaagacaagtcctggcgcgtccgctacatggtggctgacaagttcacagagctccagaaagcagtggggcctgagatcaccaagacagacctggtccctgccttccagaacctgatgaaagactgtgaggccgaggtgagggccgcagcctcccacaaggtcaaagagttctgtgaaaacctctcagctgactgtcgggagaatgtgatcatgtcccagatcttgccctgcatcaaggagctggtgtccgatgccaaccaacatgtcaagtctgccctggcctcagtcatcatgggtctctctcccatcttgggcaaagacaacaccatcgagcacctcttgcccctcttcctggctcagctgaaggatgagtgccctgaggtacggctgaacatcatctctaacctggactgtgtgaacgaggtgattggcatccggcagctgtcccagtccctgctccctgccattgtggagctggctgaggacgccaagtggcgggtgcggctggccatcattgagtacatgcccctcctggctggacagctgggagtggagttctttgatgagaaacttaactccttgtgcatggcctggcttgtggatcatgtatatgccatccgcgaggcagccaccagcaacctgaagaagctagtggaaaagtttgggaaggagtgggcccatgccacaatcatccccaaggtcttggccatgtccggagaccccaactacctgcaccgcatgactacgctcttctgcatcaatgtgctgtctgaggtctgtgggcaggacatcaccaccaagcacatgctacccacggttctgcgcatggctggggacccggttgccaatgtccgcttcaatgtggccaagtctctgcagaagatagggcccatcctggacaacagcaccttgcagagtgaagtcaagcccatcctagagaagctgacccaggaccaggatgtggacgtcaaatactttgcccaggaggctctgactgttctgtctctcgcctgatgctggaagaggagcaaacactggcctctggtgtccaccctccaacccccacaagtccctctttggggagacactggggggcctttggctgtcactccctgtgcatggtctgaccccaggccccttcccccagcacggttcctcctctccccagcctgggaagatgtctcactgtccacctcccaacgggctaggggagcacggggttggacaggacagtgaccttgggaggaaggggctactccgcccacgtcagggagagatgtgagcatcccgggtcactggatcctgctgctgtaatgggaacccctcccccatttacttctccacctcccgtcctccccatcattggtttttttttgtgtgtcaactgtgccgtttttattttattccttttattttcccccttttcacagagaaataaaggtctagaagtagttggtcctctggccttagtcatcagcttggaggagggggcaccaccccagagccacaacatctgcgcttttctctggagaagatcttgttacaggacccattatacccctatgtcccgaaagaatactctggggatccccccaggagtgctgctggcctttggggtagagggtccatgaggtgctctgggtggtgtcctgtagtgcagttcagattcatagatgtcggccgagtatttggggggttaagagcaggtgccttggaaccagactgcctgggtccaaattgtggctccttcagttaatagacgtgtgactaggagtagcttgttaagtctttatgagctcagttttgtattgtgtaaaatgagagttacagtaatacctagattgcagggtgggtggcgaggaccaagtgaattagtacctggaaagtgtgtaacagtttcaacatgagaagtacacaacatgagaagcagagttagctgtacattgccagagaaccccctgtgggccatttcctgtgttcttgaagaagacttgggcttggaccctgtccccaggaggtctcagagtaatcaggacggtactagggagagaactgtggcaagatagatcagttatctcggtatctattctccccttcctaatgtagaagctctgatttttaactgggcagatgactacatggattcaaggtattttcctagtgtctcttgaaattaggtgtggtattgtgaccaaattctagccaaaaagatgttgaacagaagtggtatatgcagcttctaggaagtgttcttaagggggaaggcgtcatcccccacctttcctccttcctgcactctggaatgtggaccagatggctggagtaggagctgccacctggggccagaaaatgatcttaggcgtgaaggtcaagtaaggcaggacaagagagaaggagcctgcctccccgaggctgtgaagagccatgccagtactgtcacctgggagaattaaactggtcaagtgcc

SEQ ID NO: 3346 - DNA, 1896 bp, Homo sapiens
  source 1..1896: mol_type = genomic DNA
cttctcccagcattgccccccccacgtttcagcacagcgctggccgcagtctgacaggaaagggacggagccaagatggcggcggccgacggcgacgactcgctgtaccccatcgcggtgctcatagacgaactccgcaatgaggacgttcagcttcgcctcaacagcatcaagaagctgtccaccatcgccttggcccttggggttgaaaggacccgaagtgagcttctgcctttccttacagataccatctatgatgaagatgaggtcctcctggccctggcagaacagctgggaaccttcactaccctggtgggaggcccagagtacgtgcactgcctgctgccaccgctggagtcgctggccacagtggagtccttacgggccatctcacacgagcactcgccctctgacctggaggcgcactttgtgccgctagtgaagcggctggcgggcggcgactggttcacctcccgcacctcggcctgcggcctcttctccgtctgctacccccgagtgtccagtgctgtgaaggcggaacttcgacagtacttccggaacctgtgctcagatgacacccccatggtgcggcgggccgcagcctccaagctgggggagtttgccaaggtgctggagctggacaacgtcaagagtgagatcatccccatgttctccaacctggcctctgacgagcaggactcggtgcggctgctggcggtggaggcgtgcgtgaacatcgcccagcttctgccccaggaggatctggaggccctggtgatgcccactctgcgccaggccgctgaagacaagtcctggcgcgtccgctacatggtggctgacaagttcacagagctccagaaagcagtggggcctgagatcaccaagacagacctggtccctgccttccagaacctgatgaaagactgtgaggccgaggtgagggccgcagcctcccacaaggtcaaagagttctgtgaaaacctctcagctgactgtcgggagaatgtgatcatgtcccagatcttgccctgcatcaaggagctggtgtccgatgccaaccaacatgtcaagtctgccctggcctcagtcatcatgggtctctctcccatcttgggcaaagacaacaccatcgagcacctcttgcccctcttcctggctcagctgaaggatgagtgccctgaggtacggctgaacatcatctctaacctggactgtgtgaacgaggtgattggcatccggcagctgtcccagtccctgctccctgccattgtggagctggctgaggacgccaagtggcgggtgcggctggccatcattgagtacatgcccctcctggctggacagctgggagtggagttctttgatgagaaacttaactccttgtgcatggcctggcttgtggatcatgtatatgccatccgcgaggcagccaccagcaacctgaagaagctagtggaaaagtttgggaaggagtgggcccatgccacaatcatccccaaggtcttggccatgtccggagaccccaactacctgcaccgcatgactacgctcttctgcatcaatgtgctgtctgaggtctgtgggcaggacatcaccaccaagcacatgctacccacggttctgcgcatggctggggacccggttgccaatgtccgcttcaatgtggccaagtctctgcagaagatagggcccatcctggacaacagcaccttgcagagtgaagtcaagcccatcctagagaagctgacccaggaccaggatgtggacgtcaaatactttgcccaggaggctctgactgttctgtctctcgcctgatgctggaagaggagcaaacactggcctctggtgtccaccctccaacccccacaagtccctctttggggagacactgggggg

SEQ ID NO: 3347 - DNA, 948 bp, Homo sapiens
  source 1..948: mol_type = genomic DNA
cagcgctggccgcagtctgacaggaaagggacggagccaagatggcggcggccgacggcgacgactcgctgtaccccatcgcggtgctcatagacgaactccgcaatgaggacgttcagcttcgcctcaacagcaacctgaagaagctagtggaaaagtttgggaaggagtgggcccatgccacaatcatccccaaggtcttggccatgtccggagaccccaactacctgcaccgcatgactacgctcttctgcatcaatgtgctgtctgaggtctgtgggcaggacatcaccaccaagcacatgctacccacggttctgcgcatggctggggacccggttgccaatgtccgcttcaatgtggccaagtctctgcagaagatagggcccatcctggacaacagcaccttgcagagtgaagtcaagcccatcctagagaagctgacccaggaccaggatgtggacgtcaaatactttgcccaggaggctctgactgttctgtctctcgcctgatgctggaagaggagcaaacactggcctctggtgtccaccctccaacccccacaagtccctctttggggagacactggggggcctttggctgtcactccctgtgcatggtctgaccccaggccccttcccccagcacggttcctcctctccccagcctgggaagatgtctcactgtccacctcccaacgggctaggggagcacggggttggacaggacagtgaccttgggaggaaggggctactccgcccacgtcagggagagatgtgagcatcccgggtcactggatcctgctgctgtaatgggaacccctcccccatttacttctccacctcccgtcctccccatcattggtttttttttgtgtgtcaactgtgccgtttttattttattccttttattttcccccttttcacagagaaataaaggtctagaagt

SEQ ID NO: 3348 - DNA, 1944 bp, Homo sapiens
  source 1..1944: mol_type = genomic DNA
aggaaagggacggagccaagatggcggcggccgacggcgacgactcgctgtaccccatcgcggtgctcatagacgaactccgcaatgaggacgttcagcttcgcctcaacagcatcaagaagctgtccaccatcgccttggcccttggggttgaaaggacccgaagtgagcttctgcctttccttacagccaccgctggagtcgctggccacagtggaggagacagtggtgcgggacaaggcagtggagtccttacgggccatctcacacgagcactcgccctctgacctggaggcgcactttgtgccgctagtgaagcggctggcgggcggcgactggttcacctcccgcacctcggcctgcggcctcttctccgtctgctacccccgagtgtccagtgctgtgaaggcggaacttcgacagtacttccggaacctgtgctcagatgacacccccatggtgcggcgggccgcagcctccaagctgggggagtttgccaaggtgctggagctggacaacgtcaagagtgagatcatccccatgttctccaacctggcctctgacgagcaggactcggtgcggctgctggcggtggaggcgtgcgtgaacatcgcccagcttctgccccaggaggatctggaggccctggtgatgcccactctgcgccaggccgctgaagacaagtcctggcgcgtccgctacatggtggctgacaagttcacagagctccagaaagcagtggggcctgagatcaccaagacagacctggtccctgccttccagaacctgatgaaagactgtgaggccgaggtgagggccgcagcctcccacaaggtcaaagagttctgtgaaaacctctcagctgactgtcgggagaatgtgatcatgtcccagatcttgccctgcatcaaggagctggtgtccgatgccaaccaacatgtcaagtctgccctggcctcagtcatcatgggtctctctcccatcttgggcaaagacaacaccatcgagcacctcttgcccctcttcctggctcagctgaaggatgagtgccctgaggtacggctgaacatcatctctaacctggactgtgtgaacgaggtgattggcatccggcagctgtcccagtccctgctccctgccattgtggagctggctgaggacgccaagtggcgggtgcggctggccatcattgagtacatgcccctcctggctggacagctgggagtggagttctttgatgagaaacttaactccttgtgcatggcctggcttgtggatcatgtatatgccatccgcgaggcagccaccagcaacctgaagaagctagtggaaaagtttgggaaggagtgggcccatgccacaatcatccccaaggtcttggccatgtccggagaccccaactacctgcaccgcatgactacgctcttctgcatcaatgtgctgtctgaggtctgtgggcaggacatcaccaccaagcacatgctacccacggttctgcgcatggctggggacccggttgccaatgtccgcttcaatgtggccaagtctctgcagaagatagggcccatcctggacaacagcaccttgcagagtgaagtcaagcccatcctagagaagctgacccaggaccaggatgtggacgtcaaatactttgcccaggaggctctgactgttctgtctctcgcctgatgctggaagaggagcaaacactggcctctggtgtccaccctccaacccccacaagtccctctttggggagacactggggggcctttggctgtcactccctgtgcatggtctgaccccaggccccttcccccagcacggttcctcctctccccagcctgggaagatgtctcactgtccacctcccaacgggctaggggagcacggggttggacaggacagtgaccttgggaggaaggggctactccgcccacgtca

SEQ ID NO: 3349 - DNA, 2082 bp, Homo sapiens
  source 1..2082: mol_type = genomic DNA
agcagcaggaggagaaagaacatggcgggcgcatcagagctcgggaccggcccaggagcagcgggtggagatggagatgattcgctatacccgatcgcggttttaatcgacgagctccgcaatgaagacgtgcagctccgactcaacagtattaagaagttatcaacaattgccctagcacttggagtagaaaggacccgaagtgaattgttgccatttcttacagatacaatttatgatgaagatgaggtactattagctcttgctgagcagctgggaaatttcactggcctagtgggaggtcctgactttgcccactgtctgctgcctcctttggaaaatctggcaactgtggaagagactgttgttcgtgacaaggctgtggagtccctgagacagatctcccaggagcatactcctgttgctctggaagcttattttgtacctctggtgaaacgcttagcaagtggggattggttcacctctcgcacatctgcatgtggtttgttcagcgtttgctatcccagggcatcaaatgctgttaaagcagaaatcagacagcaattccgttccttgtgctcagatgacacaccaatggtacgacgtgctgctgcttccaaattgggtgaatttgcaaaagttttggaattagacagtgtgaaaagtgaaattgttccactgttcactagtctagcttcagatgaacaggattcagtgcgcctccttgctgtggaagcttgtgtcagtattgcccagttattgtctcaggatgaccttgagactttggtgatgcctacacttcgacaagcagcagaagataaatcttggcgcgttcgctatatggtggctgacagattttcagagctccagaaagccatgggtcctaaaatcaccctaaatgacctcatccccgcctttcagaacctacttaaagactgtgaagctgaagtccgggcagctgctgcccacaaagtaaaagaacttggtgagaacttgcccattgaagatagagagaccataattatgaatcaaattctgccttatataaaggaattagtatccgataccaatcaacatgtcaaatcggctctagcttctgtaattatgggattgtctactattttgggcaaagaaaataccattgaacatcttctacctcttttcttagctcagttaaaggatgagtgtcctgacgttcgtttgaatatcatctccaatttggattgtgtaaatgaagtgattggaatccgtcagctctctcagtctctccttcctgccatagtggagctggcagaagatgccaaatggagggtccgcctggccatcattgagtatatgccgctgctggcaggccagctgggtgtggaattctttgatgaaaagctgaattctttatgtatggcttggctcgtggaccatgtatacgccatccgagaagctgccaccaacaacctcatgaaactagttcagaagtttggtacagagtgggcccaaaatactattgttcccaaagtgttagtaatggcaaatgatcctaattacttgcatagaatgaccactttattctgcattaatgcactgtctgaggcctgtggtcaggaaataactactaagcaaatgctgcccatcgtattaaaaatggcaggagaccaagtagcaaatgttcgcttcaatgtggccaaatctctacaaaagattggaccaattctagataccaatgctttacagggagaagtgaagccagtactacagaagttaggtcaagatgaagacatggatgtcaaatactttgcacaggaagctataagtgtggtggcacaaaggctgaggaagctagaatttcctgtgaaggacagtggagaacccagtgtccctcgggctgacaagaaccacttcccaagacccacagtgcctggagaggacatggggaagggaccagtgtatcagttgcgtggagatactagagacacacttgcccagctgggaattgcagagctagtgcatttctcccaaagcacagactaataccccagatttaaaaaaagaacataaaaaataaagtaccacacatattgcactttt

SEQ ID NO: 3350 - DNA, 1525 bp, Homo sapiens
  source 1..1525: mol_type = genomic DNA
agcagcaggaggagaaagaacatggcgggcgcatcagagctcgggaccggcccaggagcagcgggtggagatggagatgattcgctatacccgatcgcggttttaatcgacgagctccgcaatgaagacgtgcagctccgactcaacagtattaagaagttatcaacaattgccctagcacttggagtagaaaggacccgaagtgaattgttgccatttcttacagatacaatttatgatgaagatgaggtactattagctcttgctgagcagctgggaaatttcactggcctagtgggaggtcctgactttgcccactgtctgctggattcagtgcgcctccttgctgtggaagcttgtgtcagtattgcccagttattgtctcaggatgaccttgagactttggtgatgcctacacttcgacaagcagcagaagataaatcttggcgcgttcgctatatggtggctgacagattttcagagctccagaaagccatgggtcctaaaatcaccctaaatgacctcatccccgcctttcagaacctacttaaagactgtgaagctgaagtccgggcagctgctgcccacaaagtaaaagaacttggtgagaacttgcccattgaagatagagagaccataattatgaatcaaattctgccttatataaaggaattagtatccgataccaatcaacatgtcaaatcggctctagcttctgtaattatgggattgtctactattttgggcaaagaaaataccattgaacatcttctacctcttttcttagctcagttaaaggatgagtgtcctgacgttcgtttgaatatcatctccaatttggattgtgtaaatgaagtgattggaatccgtcagctctctcagtctctccttcctgccatagtggagctggcagaagatgccaaatggagggtccgcctggccatcattgagtatatgccgctgctggcaggccagctgggtgtggaattctttgatgaaaagctgaattctttatgtatggcttggctcgtggaccatgtatacgccatccgagaagctgccaccaacaacctcatgaaactagttcagaagtttggtacagagtgggcccaaaatactattgttcccaaagtgttagtaatggcaaatgatcctaattacttgcatagaatgaccactttattctgcattaatgcactgtctgaggcctgtggtcaggaaataactactaagcaaatgctgcccatcgtattaaaaatggcaggagaccaagtagcaaatgttcgcttcaatgtggccaaatctctacaaaagattggaccaattctagataccaatgctttacagggagaagtgaagccagtactacagaagttaggtcaagatgaagacatggatgtcaaatactttgcacaggaagctataagtgttcttgcattggcataatgaggagcaggagggaaaaggcctttactagattcttgtcacaaatttctagtcaatgtgttcttaactgggtggagaa

SEQ ID NO: 3351 - DNA, 1762 bp, Homo sapiens
  source 1..1762: mol_type = genomic DNA
ggccttcgtccctactgcctgggcgcggggcggggcctgggcgcggggcgggaggcggtgaccagcagcaggaggagaaagaacatggcgggcgcatcagagctcgggaccggcccaggagcagcgggtggagatggagatgattcgctatacccgatcgcggttttaatcgacgagctccgcaatgaagacgtgcagctccgactcaacagtattaagaagttatcaacaattgccctagcacttggagtagaaaggacccgaagtgaattgttgccatttcttacagatacaatttatgatgaagatgaggtactattagctcttgctgagcagctgggaaatttcactggcctagtgggaggtcctgactttgcccactgtctgctggattcagtgcgcctccttgctgtggaagcttgtgtcagtattgcccagttattgtctcaggatgaccttgagactttggtgatgcctacacttcgacaagcagcagaagataaatcttggcgcgttcgctatatggtggctgacagattttcagagctccagaaagccatgggtcctaaaatcaccctaaatgacctcatccccgcctttcagaacctacttaaagactgtgaagctgaagtccgggcagctgctgcccacaaagtaaaagaacttggtgagaacttgcccattgaagatagagagaccataattatgaatcaaattctgccttatataaaggaattagtatccgataccaatcaacatgtcaaatcggctctagcttctgtaattatgggattgtctactattttgggcaaagaaaataccattgaacatcttctacctcttttcttagctcagttaaaggatgagtgtcctgacgttcgtttgaatatcatctccaatttggattgtgtaaatgaagtgattggaatccgtcagctctctcagtctctccttcctgccatagtggagctggcagaagatgccaaatggagggtccgcctggccatcattgagtatatgccgctgctggcaggccagctgggtgtggaattctttgatgaaaagctgaattctttatgtatggcttggctcgtggaccatgtatacgccatccgagaagctgccaccaacaacctcatgaaactagttcagaagtttggtacagagtgggcccaaaatactattgttcccaaagtgttagtaatggcaaatgatcctaattacttgcatagaatgaccactttattctgcattaatgcactgtctgaggcctgtggtcaggaaataactactaagcaaatgctgcccatcgtaaaaaatggcaggagaccaagtagcaaatgttcgcttcaatgtggccaaatctctacaaaagattggaccaattctagataccaatgctttacagggagaagtgaagccagtactacagaagttaggtcaagatgaagacatggatgtcaaatactttgcacaggaagctataagtgtggtggcacaaaggctgaggaagctagaatttcctgtgaaggacagtggagaacccagtgtccctcgggctgacaagaaccacttcccaagacccacagtgcctggagaggacatggggaagggaccagtgtatcagttgcgtggagatactagagacacacttgcccagctgggaattgcagagctagtgcatttctcccaaagcacagactaataccccagatttaaaaaaagaacataaaaaataaagtaccacacatattgcactttt

SEQ ID NO: 3352 - DNA, 1888 bp, Homo sapiens
  source 1..1888: mol_type = genomic DNA
gaccagcagcaggaggagaaagaacatggcgggcgcatcagagctcgggaccggcccaggagcagcgggtggagatggagatgattcgctatacccgatcgcggttttaatcgacgagctccgcaatgaagacgtgcagcctcctttggaaaatctggcaactgtggaagagactgttgttcgtgacaaggctgtggagtccctgagacagatctcccaggagcatactcctgttgctctggaagcttattttgtacctctggtgaaacgcttagcaagtggggattggttcacctctcgcacatctgcatgtggtttgttcagcgtttgctatcccagggcatcaaatgctgttaaagcagaaatcagacagcaattccgttccttgtgctcagatgacacaccaatggtacgacgtgctgctgcttccaaattgggtgaatttgcaaaagttttggaattagacagtgtgaaaagtgaaattgttccactgttcactagtctagcttcagatgaacaggattcagtgcgcctccttgctgtggaagcttgtgtcagtattgcccagttattgtctcaggatgaccttgagactttggtgatgcctacacttcgacaagcagcagaagataaatcttggcgcgttcgctatatggtggctgacagattttcagagctccagaaagccatgggtcctaaaatcaccctaaatgacctcatccccgcctttcagaacctacttaaagactgtgaagctgaagtccgggcagctgctgcccacaaagtaaaagaacttggtgagaacttgcccattgaagatagagagaccataattatgaatcaaattctgccttatataaaggaattagtatccgataccaatcaacatgtcaaatcggctctagcttctgtaattatgggattgtctactattttgggcaaagaaaataccattgaacatcttctacctcttttcttagctcagttaaaggatgagtgtcctgacgttcgtttgaatatcatctccaatttggattgtgtaaatgaagtgattggaatccgtcagctctctcagtctctccttcctgccatagtggagctggcagaagatgccaaatggagggtccgcctggccatcattgagtatatgccgctgctggcaggccagctgggtgtggaattctttgatgaaaagctgaattctttatgtatggcttggctcgtggaccatgtatacgccatccgagaagctgccaccaacaacctcatgaaactagttcagaagtttggtacagagtgggcccaaaatactattgttcccaaagtgttagtaatggcaaatgatcctaattacttgcatagaatgaccactttattctgcattaatgcactgtctgaggcctgtggtcaggaaataactactaagcaaatgctgcccatcgtattaaaaatggcaggagaccaagtagcaaatgttcgcttcaatgtggccaaatctctacaaaagattggaccaattctagataccaatgctttacagggagaagtgaagccagtactacagaagttaggtcaagatgaagacatggatgtcaaatactttgcacaggaagctataagtgtggtggcacaaaggctgaggaagctagaatttcctgtgaaggacagtggagaacccagtgtccctcgggctgacaagaaccacttcccaagacccacagtgcctggagaggacatggggaagggaccagtgtatcagttgcgtggagatactagagacacacttgcccagctgggaattgcagagctagtgcatttctcccaaagcacagactaataccccagatttaaaaaaagaacataaaaaataaagtaccacacatattgc

SEQ ID NO: 3353 - DNA, 2294 bp, Homo sapiens
  source 1..2294: mol_type = genomic DNA
aaagaacatggcgggcgcatcagagctcgggaccggcccaggagcagcgggtggagatggagatgattcgctatacccgatcgcggttttaatcgacgagctccgcaatgaagacgtgcagctccgactcaacagtattaagaagttatcaacaattgccctagcacttggagtagaaaggacccgaagtgaattgttgccatttcttacagatacaatttatgatgaagatgaggtactattagctcttgctgagcagctgggaaatttcactggcctagtgggaggtcctgactttgcccactgtctgctgacaccatctgggaattgccatctgggacacgagatcttggcttttctacagaagtcgtgtctttgggttggccgcaccatatgttatcactgtgtgagctgaaagtaaccatttggtatgatgcagctaacattctggttacgtgtaccacctcccttcagtcactttaaaaggcaattccgttccttgtgctcagatgacacaccaatggtacgacgtgctgctgcttccaaattgggtgaatttgcaaaagttttggaattagacagtgtgaaaagtgaaattgttccactgttcactagtctagcttcagatgaacaggattcagtgcgcctccttgctgtggaagcttgtgtcagtattgcccagttattgtctcaggatgaccttgagactttggtgatgcctacacttcgacaagcagcagaagataaatcttggcgcgttcgctatatggtggctgacagattttcagagctccagaaagccatgggtcctaaaatcaccctaaatgacctcatccccgcctttcagaacctacttaaagactgtgaagctgaagtccgggcagctgctgcccacaaagtaaaagaacttggtgagaacttgcccattgaagatagagagaccataattatgaatcaaattctgccttatataaaggaattagtatccgataccaatcaacatgtcaaatcggctctagcttctgtaattatgggattgtctactattttgggcaaagaaaataccattgaacatcttctacctcttttcttagctcagttaaaggatgagtgtcctgacgttcgtttgaatatcatctccaatttggattgtgtaaatgaagtgattggaatccgtcagctctctcagtctctccttcctgccatagtggagctggcagaagatgccaaatggagggtccgcctggccatcattgagtatatgccgctgctggcaggccagctgggtgtggaattctttgatgaaaagctgaattctttatgtatggcttggctcgtggaccatgtatacgccatccgagaagctgccaccaacaacctcatgaaactagttcagaagtttggtacagagtgggcccaaaatactattgttcccaaagtgttagtaatggcaaatgatcctaattacttgcatagaatgaccactttattctgcattaatgcactgtctgaggcctgtggtcaggaaataactactaagcaaatgctgcccatcgtattaaaaatggcaggagaccaagtagcaaatgttcgcttcaatgtggccaaatctctacaaaagattggaccaattctagataccaatgctttacagggagaagtgaagccagtactacagaagttaggtcaagatgaagacatggatgtcaaatactttgcacaggaagctataagtgttcttgcattggcataatgaggagcaggagggaaaaggcctttactagattcttgtcacaaatttctagtcaatgtgttcttaactgggtggagaaagaatggaaaaccttcaagatctcatccaagcaaatggcaacaacttagaagaaatcatttagtgacttaattctttctaaagatgaaatgggattgttttttactcgtcttccttgttaaatcattatttaagccgttcttattgaccaattcctgacacttgattgtctcctaatgctttatccatcaccacctgggctcctgcatcctcactgtggaatcaggcaccagccacataatgttccagacaaagcctggaagggtgtggacccagacgtggagtggagtgattctcttgacgtttacatatatctctgtgtctctccatcattccaaagctaaatgtacatgtttagaataacttattttataaactcttcgggagacatgttgagatttgaccgtaatgaaagccacattttcctgaattatgatggtctgcattagtctcatgtgaaagg

SEQ ID NO: 3354 - DNA, 5587 bp, Homo sapiens
  source 1..5587: mol_type = genomic DNA
ctgggcgcggggcggggcctgggcgcggggcgggaggcggtgaccagcagcaggaggagaaagaacatggcgggcgcatcagagctcgggaccggcccaggagcagcgggtggagatggagatgattcgctatacccgatcgcggttttaatcgacgagctccgcaatgaagacgtgcagctccgactcaacagtattaagaagttatcaacaattgccctagcacttggagtagaaaggacccgaagtgaattgttgccatttcttacagatacaatttatgatgaagatgaggtactattagctcttgctgagcagctgggaaatttcactggcctagtgggaggtcctgactttgcccactgtctgctgcctcctttggaaaatctggcaactgtggaagagactgttgttcgtgacaaggctgtggagtccctgagacagatctcccaggagcatactcctgttgctctggaagcttattttgtacctctggtgaaacgcttagcaagtggggattggttcacctctcgcacatctgcatgtggtttgttcagcgtttgctatcccagggcatcaaatgctgttaaagcagaaatcagacagcaattccgttccttgtgctcagatgacacaccaatggtacgacgtgctgctgcttccaaattgggtgaatttgcaaaagttttggaattagacagtgtgaaaagtgaaattgttccactgttcactagtctagcttcagatgaacaggattcagtgcgcctccttgctgtggaagcttgtgtcagtattgcccagttattgtctcaggatgaccttgagactttggtgatgcctacacttcgacaagcagcagaagataaatcttggcgcgttcgctatatggtggctgacagattttcagagctccagaaagccatgggtcctaaaatcaccctaaatgacctcatccccgcctttcagaacctacttaaagactgtgaagctgaagtccgggcagctgctgcccacaaagtaaaagaacttggtgagaacttgcccattgaagatagagagaccataattatgaatcaaattctgccttatataaaggaattagtatccgataccaatcaacatgtcaaatcggctctagcttctgtaattatgggattgtctactattttgggcaaagaaaataccattgaacatcttctacctcttttcttagctcagttaaaggatgagtgtcctgacgttcgtttgaatatcatctccaatttggattgtgtaaatgaagtgattggaatccgtcagctctctcagtctctccttcctgccatagtggagctggcagaagatgccaaatggagggtccgcctggccatcattgagtatatgccgctgctggcaggccagctgggtgtggaattctttgatgaaaagctgaattctttatgtatggcttggctcgtggaccatgtatacgccatccgagaagctgccaccaacaacctcatgaaactagttcagaagtttggtacagagtgggcccaaaatactattgttcccaaagtgttagtaatggcaaatgatcctaattacttgcatagaatgaccactttattctgcattaatgcactgtctgaggcctgtggtcaggaaataactactaagcaaatgctgcccatcgtattaaaaatggcaggagaccaagtagcaaatgttcgcttcaatgtggccaaatctctacaaaagattggaccaattctagataccaatgctttacagggagaagtgaagccagtactacagaagttaggtcaagatgaagacatggatgtcaaatactttgcacaggaagctataagtgttcttgcattggcataatgaggagcaggagggaaaaggcctttactagattcttgtcacaaatttctagtcaatgtgttcttaactgggtggagaaagaatggaaaaccttcaagatctcatccaagcaaatggcaacaacttagaagaaatcatttagtgacttaattctttctaaagatgaaatgggattgttttttactcgtcttccttgttaaatcattatttaagccgttcttattgaccaattcctgacacttgattgtctcctaatgctttatccatcaccacctgggctcctgcatcctcactgtggaatcaggcaccagccacataatgttccagacaaagcctggaagggtgtggacccagacgtggagtggagtgattctcttgacgtttacatatatctctgtgtctctccatcattccaaagctaaatgtacatgtttagaataacttattttataaactcttcgggagacatgttgagatttgaccgtaatgaaagccacattttcctgaattatgatggtctgcattagtctcatgtgaaaggggaatgtggaagctcagggttaatgtagtggttgttttggtttttatttgctcaattttgtctgtactcatgtcattcagaaacctgaagtgtggctgcatcttgctgctaatgtgtgatgttgacgcctaactgaatttgaacagctcaccactgtgcctacatttaaaaatacttctctctcttttctaaaaagctttaactgtagtgcctcctaataagcagtatgtttgtttcattgtgagattgcagttctgtatttcgaatgagtctaagaaccacagggataatactgtgcagatttcctgttctttacctggctctgcttccagcagtattgacacctagtccttgctgcattgtacagtagcttttcaaactgcagttttattgctaagtttttagtatgggtgatactggagtcttatcatttgaagtgtttgcttttctacttttacagtaaaacctcattaattctgaaatttaagataatgagttaagctgaagagtttactgaagcaaattaatagtgaggaagcctatttgaactacttaaacagtattaaagccctttttaaaaagcacctatttgggatcatttgaggtcaagaattcgagatcagcctgaccaacatggtgaaaccccatctctactaaaaatacaaaaaagttagctgggcgtggtggcacacacctgtagtcccagctactcaggaggctgaggcaggagaattgcttgaacctgggaggtagaggttgcactgagccgagatcgcgccactgcactctagcctgggccatagagcgagagtccatctcaaaaaaaaacaactatttttcacataatcaaactcaccttgtctcatgacttttggttaagggggttttcccatagtttatttttctctcagtgcatcttgctatgaggtttgcttgttacccttttggtttttgaattgttgattttgttcacaacctcttttaaatctaacaagtcctgttctgtttagtgaaggcccaaagactcctctaagactttgtatatttgttacataaaaccaagttttactaaatactttaaaatttgtcctacattcgaaaaatagaaattgtaaatcagaggttatctgtctgcattttaaactgccaaattaccttatagtaagtttctattttatgactttgggccaagaattaagtattttcctaagcacaaatctttttctatattctcattttaatatcttatgctattattctgtaaacattttaattttagtttcatgagtctttattttttgttacctgcaagttatgttcttcttcattgaatttcatatttgagagacatttgtcttcatgaagcagatttgcactggaaccattgctttactctggttggaaatgccattgttttggggacagacttttaaaatgcccttgtgtctcccagtgaggagccctaagcattgacttctctaccctaaaactgtttgagagagggagagtgggccctggctttctcaagcatgggtcgggggttcagcggggcctctgtcttttgtggtgacccctcaggggtttcattgtttccttctgacttaagcaatagagagagaatttgttttggtactcttcagaggaattgtgctttggctcataacttggccatgttctccatgaattagttctcctatttttttttttaactaccttaaacttaagggaaaagttctcctatcttgatttcactggaatataggctttaggagctctgtaaggctggtatttttgtctgttttatcttctactgtatcgccagtgcctggaacagtgtctggtgcacataataggtgctcaataaaaatgtgttcaatggatgaatttctaaaatatcctccaatgtgtgcatggaacaaataatcaaaagaaccagactgtgtcttattctcccactgacagaaagattttcctgctttcaggaaacaagctttatgtggcccttttctggtcccctggcttagactacagttctgtgtggatttgtctgattgcttcagacatgtaatgttgtttttcatccttggcagcttacatcagttgtttgtttgattagaaaaatgaagcagacacacacacacacacacacacacacacacacacacacacacaaacatataacctatgccaataaaaatgtctcagcaacagtggaattcaccttggtgtttctctctgtaatttgtgtggggtttacccctcacaggtttaagagaccaggtcttgtttctctctctgtgctaccaagaagatgtgaacctgaggatgcatcttgtttcataagaaggaaggcaggtgaatatgtggtttctaacgaggtcttgttgaaataacgggctgccctcagctcacagaaataccacagctcagccactgtgatgcagagccccaggggtctttgccagacaacttgtcctgactcaacagagacggcagcctgacctttgagctggcttgtccaggcattcaggttgcttgcgtagacttccagggaagcaagcctgtccttcctgacccggcggttaacctggtgcacttttgttcctttgttaactgttgtgttgtcactaaactgaaaggctggggcttgcccttagacgtcacattggctctgtccctgtggcgatggcagggcagggtggccaaacaggtcaggtgcttgttctgtcctcttgccttttacttaaattcctctgacttttaaaaatggtgacactcttatcgtaaagcttcttatttttctccactgcttggatatgaaactgtagagggagaggccctgttgcccagtgttctcctggtttagcagctgaggtgactgcagtctgatgtgatgtaactgtttccctttgattctccagtattcctgtttccatccagttccttactctcctctttcctcttccctcgcatgtctccctccagtcctctgtacctagaatagtctcactgtcccccgtttgcctccacgagcctgctgtttccaggaaattacataacgttcagttgggatggaaatcttccggaggacgaatagagtttaattactcattgcgtcggaaagccaagccatttctgtctccagagttgttctcttaaactgatatgagttct

SEQ ID NO: 3355 - DNA, 553 bp, Homo sapiens
  source 1..553: mol_type = genomic DNA
acctctctagtaaccttgcttcggaccccctgaggcgtccgcccggagccttgcccttcccgggcggttgtcggggaacccgcttcccgcctgggcgccccatccgggccgtgaggtggccgcgtctcttgggcgagggagcaggagaagcgcggtgccaggccgagacggggctggagcggctgaggggcgcaggatgcccagaagccctttgaagtgcccctggatcccttcatctcggcttggaactggctcggcttgttggctccgactcaacagtattaagaagttatcaacaattgccctagcacttggagtagaaaggacccgaagtgaattgttgccatttcttacagatacaatttatgatgaagatgaggtactattagctcttgctgagcagctgggaaatttcactggcctagtgggaggtcctgactttgcccactgtctgctgcctcctttggaaaatctggcaactgtggaagagactgttgttcgtgacaaggctgtggagtccctgagacagatctcccaggagcatactcctgtt

SEQ ID NO: 3356 - DNA, 670 bp, Homo sapiens
  source 1..670: mol_type = genomic DNA
gaacctacttaaagactgtgaagctgaagtccgggcagctgctgcccacaaagtaaaagaacttggtgagaacttgcccattgaagatagagagaccataattatgaatcaaattctgccttatataaaggaattagtatccgataccaatcaacatgtcaaatcggctctagcttctgtaattatgggattgtctactattttgggcaaagaaaataccattgaacatcttctacctcttttcttagctcagttaaaggatgagtgtcctgacgttcgtttgaatatcatctccaatttggattgtgtaaatgaagtgattggaatccgtcagctctctcagtctctccttcctgccatagtggagctggcagaagatgccaaatggagggtccgcctggccatcattgagtatatgccgctgctggcaggccagctggcactgtctgaggcctgtggtcaggaaataactactaagcaaatgctgcccatcgtattaaaaatggcaggagaccaagtagcaaatgttcgcttcaatgtggccaaatctctacaaaagattggaccaattctagataccaatgctttacagggagaagtgaagccagtactacagaagttaggtcaagatgaagacatggatgtcaaatactttgcacaggaagctata

SEQ ID NO: 3357 - DNA, 2094 bp, Homo sapiens
  source 1..2094: mol_type = genomic DNA
agcggtcgcggtcggtgccgaagcggtgttccccgccttagccgctggcgcctcccaagagagcggccggtgggccctcgtcctgtcagtggcgtcggaggccggcgctgcggtggccgcgcccttctggtgctcggacaccgctgaggagccggggccgggcacggctggctgacggctccgggcagctaaggctgcccgaggagaaggcggcggccgcggcgtaggcgcacgtccggcgggctcctggagcctggaggaggccgaggggaccatgtccgggaggcgcttccacctctccaccaccgaccgcgtcatcaaagctgtcccctttcctccaacccaacggcttactttcaaggaagtatttgagaatgggaaacctaaagttgatgttttaaaaaaccatttggtaaaggaaggacgactggaagaggaagtagccttaaagataatcaatgatggggctgccatcctgaggcaagagaagactatgatagaagtagatgctccaatcacagtatgtggtgatattcatggacaattctttgacctaatgaagttatttgaagttggaggatcacctagtaacacacgctacctctttctgggtgactatgtggacagaggctatttcagtatagagtgtgtgctgtatttatggagtttaaagattaatcatcccaaaacattgtttctgcttcggggaaatcatgaatgcaggcatcttacagactatttcaccttcaaacaggaatgtcgaatcaaatattcggaacaggtgtatgatgcctgtatggagacatttgactgtcttcctcttgctgccctcttaaaccagcagtttctctgtgtacatggaggaatgtcacctgaaattacttctttagatgacattaggaaattagacaggtttacggaacctcccgcctttggacctgtgtgtgacctgctttggtctgatccctcagaggattatggcaatgagaagaccttggagcactatacccacaacactgtccgagggtgctcttatttctacagttaccctgcagtttgtgaatttttgcagaacaataatttactatcaattatcagagcccatgaagcccaagatgctgggtatcgaatgtacaggaagagccaagccacaggctttccatcacttattacaattttctctgcccccaattacctagatgtctataacaataaagctgctgtgttgaaatatgaaaacaatgtcatgaatatcaggcagtttaactgttctccacacccctactggcttccaaactttatggatgttttcacatggtctttgccttttgttggggaaaaagtcacagagatgctggtaaatgtgctcaacatatgctctgatgacgaactgatttctgatgatgaagcagaagatcactacattccaagctatcagaaaggaagcactacagttcgtaaggagatcatcaggaataagatcagagccattgggaagatggcacgggtcttttcaattcttcggcaagaaagtgagagtgtgctgactctcaagggcctgactcccacaggcacactccctctgggcgtcctctcaggaggcaagcagactatcgagacagccacagtagaagcggtagaggcccgggaagccatcagagggttctcgcttcagcacaagatccggagttttgaagaagcgcgaggtctggaccgaattaatgagcgaatgccaccccgaaaggatagcatacacgctggtgggccaatgaaatctgtaacctcagcacactcacatgctgcgcacaggagcgaccaagggaagaaagcccattcatgacttagagtcctgccgtggctcaggtggatctaaaactcaagaacaaattctatttatttattattggaaaatgaaaagcaactcaaaacaacttcaacgtggaggtgcatttataattcagtctgcatttattctgtaaaaaggtggctgttttataaattcttttaatttatgttcaatatatataaaaagtgcatctgttttgtttttcccttttttctccataattttaagaaatgaatctgattgttgtc

SEQ ID NO: 3358 - DNA, 4519 bp, Homo sapiens
  source 1..4519: mol_type = genomic DNA
aggagcggcgcggggaggcagaggcgagcgcgggcgatcgcggcggcgggacgtctccggcggccgcggcaccagcggcggcgctctgtgtggagaagcaggggcagcggcagcagcaacagcggcagcggcagcagcagcggcagcagcggcggccgcctctccgccgccggggacgccaaggtgcggctggtggcactgacatcggcggccctgcctctcctccctcgcccccggccttccccatgtgatcggtcttaatcctggccgtgtgtgcgcgcgtggggctccattccgcggtgctgggtctccgtgccggggtgggtgctcgtgtgtgcgcttctcctccccatcccccttcccccaagaataaaagaagaaccgggaggcgtgctcagaaaataaataaataaccaccacacacgcgcagcccggagcgagtcggcggggctggcggcagcggcggaggaggagtgaaggcggcggcggcggaggagggacgcgcggaaaaggcagcaactttaaagccagctcagagcctagacctccagccgagcggtttgcagcgcggcggcggcggcggcggcggcggcgttgagtgtctggcccgccggtccggtcggggtgtgcagtcggacggacgagcagcgcgtcgctgtcctccggcagctggagatgtccgagcccaaggcaattgatcccaagttgtcgacgaccgacagggtggtgaaagctgttccatttcctccaagtcaccggcttacagcaaaagaagtgtttgataatgatggaaaacctcgtgtggatatcttaaaggcgcatcttatgaaggagggaaggctggaagagagtgttgcattgagaataataacagagggtgcatcaattcttcgacaggaaaaaaatttgctggatattgatgcgccagtcactgtttgtggggacattcatggacaattctttgatttgatgaagctctttgaagtcgggggatctcctgccaacactcgctacctcttcttaggggactatgttgacagagggtacttcagtattgaatgtgtgctgtatttgtgggccttgaaaattctctaccccaaaacactgtttttacttcgtggaaatcatgaatgtagacatctaacagagtatttcacatttaaacaagaatgtaaaataaagtattcagaacgcgtatatgatgcctgtatggatgcctttgactgccttcccctggctgccctgatgaaccaacagttcctgtgtgtgcatggtggtttgtctccagagattaacactttagatgatatcagaaaattagaccgattcaaagaaccacctgcatatggacctatgtgtgatatcctgtggtcagaccccctggaagattttggaaatgagaagactcaggaacatttcactcacaacacagtcagggggtgttcatacttctacagttacccggctgtatgtgaattcttacagcacaataacttgttatctatactccgagcccacgaagcccaagatgcagggtaccgcatgtacaggaaaagccaaacaacaggcttcccttctctaattacaattttttcagcaccaaattacttagatgtatacaataacaaagtgactgagatgctggtaaatgtcctcaacatctgctcagatgatgaactagggtcagaagaagatggatttgatggtgcaacagctgcagcccggaaagaggtgataaggaacaagatccgagcaataggcaaaatggccagagtgttctcagtgctcagagaagagagtgagagtgtgctgacgctgaaaggcttgaccccaactggcatgctccccagcggagtactttctggagggaagcaaaccctgcaaagcgctatcaaaggattttcaccacaacataagatcactagcttcgaggaagccaagggcttagaccgaattaatgagaggatgccgcctcgcagagatgccatgccctctgacgccaaccttaactccatcaacaaggctctcacctcagagactaacggcacggacagcaatggcagtaatagcagcaatattcagtgaccacttcctgttcactttttttttttttttttttttttttttttgagctgcggggcatgatggggattgctgcatatcagcagttggatgttcttgcctctgacagtagcttatttgctctgggggccaggaattggattcagtttacactatcattaaaaaagagggagagagataataaactatattttggtggggatggtgattaaacacctcttttgggtatgccttttaaaaatgcttatagagaaaaaaaattttaaaaagaaagctaatgctagtatatactgcaatgttaggggaatgaacatgttttcctactgcattggggacttctagataggttaatgaaaggccttttattctgttactggacatgaaaactttgtctaatttcttactctattgtacgtttacagtcgcagcactaaaaatggatgacatcaaacatttttaacaaaatgatgtacaaactaaggactatttattgataatgttttgctactcttgtcagacaatggctataaactgaattaggcagtcttaaaaaaaaaaaaaaacagaaaaagaaaaaaaagaacgttgcaaatttgttaaaatgccaaaaaggacagtttaattttgtacagattatgcttacctcaggtttctttagtgtgcttgaatgcccttctttccatataacacttatcttcttcttaattcggcaatggaatatcttttaagttttaaaaaaactggaataattatatctatcttttttgccgtttatatttaggggtttttgttgataaaatcaagtcttggttgtggcttgctgaattaaatatttatgagtggtgcatttttaagtatagtgaacaagacaccatattaagtacagtgataaagcatctatattctgtaaaaaaaaaaaaaatctgcctatgcatgttttttaagaaaaaaaaaatggctgtatcggcctgtatgggactgtaatgcgcttagtggtctgacatatactggaaatgtatgtatactggcgtactttatattctctaaaatgcttaatgcctttgaaattttgtaatcaaaaaaaagctttgaaaaaatctaaaggggagagtattctttaaagtttttaacataagcttgtcaatgcacatgtagatggttagcatgtttagcaaaccttgtgaaattataataagtttgtagttacatgtgaaactctaaatgcatggcaactgttaatgtcataacagtttagttattttgttctgttctgtcatgtgccacaaaatatgtacttttttcacttttttccctttgtatatcagttacgggttacaactggttcattctgaaaacaacaacaacaaaagtccattcatattttttaacaattgtataagtgcccaagtaattcactacagcctaaagccttgcctttgtaatttgacttctgacatgttggcaatcaaagcatgcacttgtaacaatgaaaaagaaaaagcattttatattactactcaataaaatgtgcatgaacttacagaattctcatccttccactgagtccgctgaagggatttatgtgcacaaccaccatgtgtcttctaggtgctggcccaccaccacacatcacaggctgatttccacaggcttcttcctaggggcctcgtgatctgaggggtggtgcctacttccactgtaagaaagaatcttggtggatttgtgtctcaaatcagataagagaagcctgtttaaagagcagatgccatcttctggcttcctcaaggagccagttaaaaaaccagagcattcctttttattgaaaaataaaattaatttgttatcaggttgtttcagttgtattggatgccctatctatctgctaaagcaaaaagtactaggctactaagtgcattttcatcacagaaaagagttgcatttgtattaacaagaaatttgtatacccacgcttcagctactatctaatcatcacccgaagatttaagatacaccaaatttcagtttgtttgtaacattgttcatctttagtgcactttgttttatataataaagtatgcctgttatattaaataataagaatatggcaattagcgatatagcatacccaaacaaagatgttctcgatacagtctggcaaagactatcccaaggttattttaatgaattcagacattttttcctgtggatatttctccatcctaaaaaaagtggcaaccaaggaaaatatttagatgcaacttactagagtgatgatgtgaaagaaatggtgattctggtatcatggtgtttattttctttcttataactgcagagaaaatatcctgactaaaaaaaattcatttttttggattcctttcttttacaaattgtgctgaggcaactatggcatagaaataaacatttgacattaaaataa

SEQ ID NO: 3359 - DNA, 3604 bp, Homo sapiens
  source 1..3604: mol_type = genomic DNA
agcagcggcggccgcctctccgccgccggggacgccaaggtgcggctggtggcactgacatcggcggccctgcctctcctccctcgcccccggccttccccatgtgatcggtcttaatcctggccgtgtgtgcgcgcgtggggctccattccgcggtgctgggtctccgtgccggggtgggtgctcgtgtgtgcgcttctcctccccatcccccttcccccaagaataaaagaagaaccgggaggcgtgctcagaaaataaataaataaccaccacacacgcgcagcccggagcgagtcggcggggctggcggcagcggcggaggaggagtgaaggcggcggcggcggaggagggacgcgcggaaaaggcagcaactttaaagccagctcagagcctagacctccagccgagcggtttgcagcgcggcggcggcggcggcggcggcggcgttgagtgtctggcccgccggtccggtcggggtgtgcagtcggacggacgagcagcgcgtcgctgtcctccggcagctggagatgtccgagcccaaggcaattgatcccaagttgtcgacgaccgacagggtggtgaaagctgttccatttcctccaagtcaccggcttacagcaaaagaagtgtttgataatgatggaaaacctcgtgtggatatcttaaaggcgcatcttatgaaggagggaaggctggaagagagtgttgcattgagaataataacagagggtgcatcaattcttcgacaggaaaaaaatttgctggatattgatgcgccagtcactgtttgtggggacattcatggacaattctttgatttgatgaagctctttgaagtcgggggatctcctgccaacactcgctacctcttcttaggggactatgttgacagagggtacttcagtattgaatgtgtgctgtatttgtgggccttgaaaattctctaccccaaaacactgtttttacttcgtggaaatcatgaatgtagacatctaacagagtatttcacatttaaacaagaatgtaaaataaagtattcagaacgcgtatatgatgcctgtatggatgcctttgactgccttcccctggctgccctgatgaaccaacagttcctgtgtgtgcatggtggtttgtctccagagattaacactttagatgatatcagaaaattagaccgattcaaagaaccacctgcatatggacctatgtgtgatatcctgtggtcagaccccctggaagattttggaaatgagaagactcaggaacatttcactcacaacacagtcagggggtgttcatacttctacagttacccggctgtatgtgaattcttacagcacaataacttgttatctatactccgagcccacgaagcccaagatgcagggtaccgcatgtacaggaaaagccaaacaacaggcttcccttctctaattacaattttttcagcaccaaattacttagatgtatacaataacaaagctgcagtattgaagtatgagaacaatgttatgaatatcaggcaattcaactgttctcctcatccatactggcttccaaatttcatggatgtttttacttggtcccttccatttgttggggaaaaagtgactgagatgctggtaaatgtcctcaacatctgctcagatgatgaactagggtcagaagaagatggatttgatggtgcaacagctgcagcccggaaagaggtgataaggaacaagatccgagcaataggcaaaatggccagagtgttctcagtgctcagagaagagagtgagagtgtgctgacgctgaaaggcttgaccccaactggcatgctccccagcggagtactttctggagggaagcaaaccctgcaaagcgctatcaaaggattttcaccacaacataagatcactagcttcgaggaagccaagggcttagaccgaattaatgagaggatgccgcctcgcagagatgccatgccctctgacgccaaccttaactccatcaacaaggctctcacctcagagactaacggcacggacagcaatggcagtaatagcagcaatattcagtgaccacttcctgttcactttttttttttttttttttttttttttttgagctgcggggcatgatggggattgctgcatatcagcagttggatgttcttgcctctgacagtagcttatttgctctgggggccaggaattggattcagtttacactatcattaaaaaagagggagagagataataaactatattttggtggggatggtgattaaacacctcttttgggtatgccttttaaaaatgcttatagagaaaaaaaattttaaaaagaaagctaatgctagtatatactgcaatgttaggggaatgaacatgttttcctactgcattggggacttctagataggttaatgaaaggccttttattctgttactggacatgaaaactttgtctaatttcttactctattgtacgtttacagtcgcagcactaaaaatggatgacatcaaacatttttaacaaaatgatgtacaaactaaggactatttattgataatgttttgctactcttgtcagacaatggctataaactgaattaggcagtcttaaaaaaaaaaaaaaacagaaaaagaaaaaaaagaacgttgcaaatttgttaaaatgccaaaaaggacagtttaattttgtacagattatgcttacctcaggtttctttagtgtgcttgaatgcccttctttccatataacacttatcttcttcttaattcggcaatggaatatcttttaagttttaaaaaaactggaataattatatctatcttttttgccgtttatatttaggggtttttgttgataaaatcaagtcttggttgtggcttgctgaattaaatatttatgagtggtgcatttttaagtatagtgaacaagacaccatattaagtacagtgataaagcatctatattctgtaaaaaaaaaaaaaatctgcctatgcatgttttttaagaaaaaaaaaatggctgtatcggcctgtatgggactgtaatgcgcttagtggtctgacatatactggaaatgtatgtatactggcgtactttatattctctaaaatgcttaatgcctttgaaattttgtaatcaaaaaaaagctttgaaaaaatctaaaggggagagtattctttaaagtttttaacataagcttgtcaatgcacatgtagatggttagcatgtttagcaaaccttgtgaaattataataagtttgtagttacatgtgaaactctaaatgcatggcaactgttaatgtcataacagtttagttattttgttctgttctgtcatgtgccacaaaatatgtacttttttcacttttttccctttgtatatcagttacgggttacaactggttcattctgaaaacaacaacaacaaaagtccattcatattttttaacaattgtataagtgcccaagtaattcactacagcctaaagccttgcctttgtaatttgacttctgacatgttggcaatcaaagcatgcacttgtaacaatgaaaaagaaaaagcattttatattactactcaataaaatgtgcatgaactta

SEQ ID NO: 3360 - DNA, 4685 bp, Homo sapiens
  source 1..4685: mol_type = genomic DNA
ggtgagtggaggagcggcgcggggaggcagaggcgagcgcgggcgatcgcggcggcgggacgtctccggcggccgcggcaccagcggcggcgctctgtgtggagaagcaggggcagcggcagcagcaacagcggcagcggcagcagcagcggcagcagcggcggccgcctctccgccgccggggacgccaaggtgcggctggtggcactgacatcggcggccctgcctctcctccctcgcccccggccttccccatgtgatcggtcttaatcctggccgtgtgtgcgcgcgtggggctccattccgcggtgctgggtctccgtgccggggtgggtgctcgtgtgtgcgcttctcctccccatcccccttcccccaagaataaaagaagaaccgggaggcgtgctcagaaaataaataaataaccaccacacacgcgcagcccggagcgagtcggcggggctggcggcagcggcggaggaggagtgaaggcggcggcggcggaggagggacgcgcggaaaaggcagcaactttaaagccagctcagagcctagacctccagccgagcggtttgcagcgcggcggcggcggcggcggcggcggcgttgagtgtctggcccgccggtccggtcggggtgtgcagtcggacggacgagcagcgcgtcgctgtcctccggcagctggagatgtccgagcccaaggcaattgatcccaagttgtcgacgaccgacagggtggtgaaagctgttccatttcctccaagtcaccggcttacagcaaaagaagtgtttgataatgatggaaaacctcgtgtggatatcttaaaggcgcatcttatgaaggagggaaggctggaagagagtgttgcattgagaataataacagagggtgcatcaattcttcgacaggaaaaaaatttgctggatattgatgcgccagtcactgtttgtggggacattcatggacaattctttgatttgatgaagctctttgaagtcgggggatctcctgccaacactcgctacctcttcttaggggactatgttgacagagggtacttcagtattgaatgtgtgctgtatttgtgggccttgaaaattctctaccccaaaacactgtttttacttcgtggaaatcatgaatgtagacatctaacagagtatttcacatttaaacaagaatgtaaaataaagtattcagaacgcgtatatgatgcctgtatggatgcctttgactgccttcccctggctgccctgatgaaccaacagttcctgtgtgtgcatggtggtttgtctccagagattaacactttagatgatatcagaaaattagaccgattcaaagaaccacctgcatatggacctatgtgtgatatcctgtggtcagaccccctggaagattttggaaatgagaagactcaggaacatttcactcacaacacagtcagggggtgttcatacttctacagttacccggctgtatgtgaattcttacagcacaataacttgttatctatactccgagcccacgaagcccaagatgcagggtaccgcatgtacaggaaaagccaaacaacaggcttcccttctctaattacaattttttcagcaccaaattacttagatgtatacaataacaaagctgcagtattgaagtatgagaacaatgttatgaatatcaggcaattcaactgttctcctcatccatactggcttccaaatttcatggatgtttttacttggtcccttccatttgttggggaaaaagtgactgagatgctggtaaatgtcctcaacatctgctcagatgatgaactagggtcagaagaagatggatttgatggtgcaacagctgcagcccggaaagaggtgataaggaacaagatccgagcaataggcaaaatggccagagtgttctcagtgctcagagaagagagtgagagtgtgctgacgctgaaaggcttgaccccaactggcatgctccccagcggagtactttctggagggaagcaaaccctgcaaagcgctactgttgaggctattgaggctgatgaagctatcaaaggattttcaccacaacataagatcactagcttcgaggaagccaagggcttagaccgaattaatgagaggatgccgcctcgcagagatgccatgccctctgacgccaaccttaactccatcaacaaggctctcacctcagagactaacggcacggacagcaatggcagtaatagcagcaatattcagtgaccacttcctgttcactttttttttttttttttttttttttttttgagctgcggggcatgatggggattgctgcatatcagcagttggatgttcttgcctctgacagtagcttatttgctctgggggccaggaattggattcagtttacactatcattaaaaaagagggagagagataataaactatattttggtggggatggtgattaaacacctcttttgggtatgccttttaaaaatgcttatagagaaaaaaaattttaaaaagaaagctaatgctagtatatactgcaatgttaggggaatgaacatgttttcctactgcattggggacttctagataggttaatgaaaggccttttattctgttactggacatgaaaactttgtctaatttcttactctattgtacgtttacagtcgcagcactaaaaatggatgacatcaaacatttttaacaaaatgatgtacaaactaaggactatttattgataatgttttgctactcttgtcagacaatggctataaactgaattaggcagtcttaaaaaaaaaaaaaaacagaaaaagaaaaaaaagaacgttgcaaatttgttaaaatgccaaaaaggacagtttaattttgtacagattatgcttacctcaggtttctttagtgtgcttgaatgcccttctttccatataacacttatcttcttcttaattcggcaatggaatatcttttaagttttaaaaaaactggaataattatatctatcttttttgccgtttatatttaggggtttttgttgataaaatcaagtcttggttgtggcttgctgaattaaatatttatgagtggtgcatttttaagtatagtgaacaagacaccatattaagtacagtgataaagcatctatattctgtaaaaaaaaaaaaaatctgcctatgcatgttttttaagaaaaaaaaaatggctgtatcggcctgtatgggactgtaatgcgcttagtggtctgacatatactggaaatgtatgtatactggcgtactttatattctctaaaatgcttaatgcctttgaaattttgtaatcaaaaaaaagctttgaaaaaatctaaaggggagagtattctttaaagtttttaacataagcttgtcaatgcacatgtagatggttagcatgtttagcaaaccttgtgaaattataataagtttgtagttacatgtgaaactctaaatgcatggcaactgttaatgtcataacagtttagttattttgttctgttctgtcatgtgccacaaaatatgtacttttttcacttttttccctttgtatatcagttacgggttacaactggttcattctgaaaacaacaacaacaaaagtccattcatattttttaacaattgtataagtgcccaagtaattcactacagcctaaagccttgcctttgtaatttgacttctgacatgttggcaatcaaagcatgcacttgtaacaatgaaaaagaaaaagcattttatattactactcaataaaatgtgcatgaacttacagaattctcatccttccactgagtccgctgaagggatttatgtgcacaaccaccatgtgtcttctaggtgctggcccaccaccacacatcacaggctgatttccacaggcttcttcctaggggcctcgtgatctgaggggtggtgcctacttccactgtaagaaagaatcttggtggatttgtgtctcaaatcagataagagaagcctgtttaaagagcagatgccatcttctggcttcctcaaggagccagttaaaaaaccagagcattcctttttattgaaaaataaaattaatttgttatcaggttgtttcagttgtattggatgccctatctatctgctaaagcaaaaagtactaggctactaagtgcattttcatcacagaaaagagttgcatttgtattaacaagaaatttgtatacccacgcttcagctactatctaatcatcacccgaagatttaagatacaccaaatttcagtttgtttgtaacattgttcatctttagtgcactttgttttatataataaagtatgcctgttatattaaataataagaatatggcaattagcgatatagcatacccaaacaaagatgttctcgatacagtctggcaaagactatcccaaggttattttaatgaattcagacattttttcctgtggatatttctccatcctaaaaaaagtggcaaccaaggaaaatatttagatgcaacttactagagtgatgatgtgaaagaaatggtgattctggtatcatggtgtttattttctttcttataactgcagagaaaatatcctgactaaaaaaaattcatttttttggattcctttcttttacaaattgtgctgaggcaactatggcatagaaataaacatttgacattaaaataag

SEQ ID NO: 3361 - DNA, 1958 bp, Homo sapiens
  source 1..1958: mol_type = genomic DNA
cagtcggacggacgagcagcgcgtcgctgtcctccggcagctggagatgtccgagcccaaggcaattgatcccaagttgtcgacgaccgacagggtggtgaaagtttgtggggacattcatggacaattctttgatttgatgaagctctttgaagtcgggggatctcctgccaacactcgctacctcttcttaggggactatgttgacagagggtacttcagtattgaatgtgtgctgtatttgtgggccttgaaaattctctaccccaaaacactgtttttacttcgtggaaatcatgaatgtagacatctaacagagtatttcacatttaaacaagaatgtaaaataaagtattcagaacgcgtatatgatgcctgtatggatgcctttgactgccttcccctggctgccctgatgaaccaacagttcctgtgtgtgcatggtggtttgtctccagagattaacactttagatgatatcagaaaattagaccgattcaaagaaccacctgcatatggacctatgtgtgatatcctgtggtcagaccccctggaagattttggaaatgagaagactcaggaacatttcactcacaacacagtcagggggtgttcatacttctacagttacccggctgtatgtgaattcttacagcacaataacttgttatctatactccgagcccacgaagcccaagatgcagggtaccgcatgtacaggaaaagccaaacaacaggcttcccttctctaattacaattttttcagcaccaaattacttagatgtatacaataacaaagctgcagtattgaagtatgagaacaatgttatgaatatcaggcaattcaactgttctcctcatccatactggcttccaaatttcatggatgtttttacttggtcccttccatttgttggggaaaaagtgactgagatgctggtaaatgtcctcaacatctgctcagatgatgaactagggtcagaagaagatggatttgatggtgcaacagctgcagcccggaaagaggtgataaggaacaagatccgagcaataggcaaaatggccagagtgttctcagtgctcagagaagagagtgagagtgtgctgacgctgaaaggcttgaccccaactggcatgctccccagcggagtactttctggagggaagcaaaccctgcaaagcgctactgttgaggctattgaggctgatgaagctatcaaaggattttcaccacaacataagatcactagcttcgaggaagccaagggcttagaccgaattaatgagaggatgccgcctcgcagagatgccatgccctctgacgccaaccttaactccatcaacaaggctctcacctcagagactaacggcacggacagcaatggcagtaatagcagcaatattcagtgaccacttcctgttcactttttttttttttttttttttttttttttgagctgcggggcatgatggggattgctgcatatcagcagttggatgttcttgcctctgacagtagcttatttgctctgggggccaggaattggattcagtttacactatcattaaaaaagagggagagagataataaactatattttggtggggatggtgattaaacacctcttttgggtatgccttttaaaaatgcttatagagaaaaaaaattttaaaaagaaagctaatgctagtatatactgcaatgttaggggaatgaacatgttttcctactgcattggggacttctagataggttaatgaaaggccttttattctgttactggacatgaaaactttgtctaatttcttactctattgtacgtttacagtcgcagcactaaaaatggatgacatcaaacatttttaacaaaatgatgtacaaactaaggactatttattgataatgttttgctactcttgtcagacaatggctataaactgaattaggcagtcttaa

SEQ ID NO: 3362 - DNA, 4007 bp, Homo sapiens
  source 1..4007: mol_type = genomic DNA
gagtggaggagcggcgcggggaggcagaggcgagcgcgggcgatcgcggcggcgggacgtctccggcggccgcggcaccagcggcggcgctctgtgtggagaagcaggggcagcggcagcagcaacagcggcagcggcagcagcagcggcagcagcggcggccgcctctccgccgccggggacgccaaggtgcggctggtggcactgacatcggcggccctgcctctcctccctcgcccccggccttccccatgtgatcggtcttaatcctggccgtgtgtgcgcgcgtggggctccattccgcggtgctgggtctccgtgccggggtgggtgctcgtgtgtgcgcttctcctccccatcccccttcccccaagaataaaagaagaaccgggaggcgtgctcagaaaataaataaataaccaccacacacgcgcagcccggagcgagtcggcggggctggcggcagcggcggaggaggagtgaaggcggcggcggcggaggagggacgcgcggaaaaggcagcaactttaaagccagctcagagcctagacctccagccgagcggtttgcagcgcggcggcggcggcggcggcggcggcgttgagtgtctggcccgccggtccggtcggggtgtgcagtcggacggacgagcagcgcgtcgctgtcctccggcagctggagatgtccgagcccaaggcaattgatcccaagttgtcgacgaccgacagggtggtgaaagctgttccatttcctccaagtcaccggcttacagcaaaagaagtgtttgataatgatggaaaacctcgtgtggatatcttaaaggcgcatcttatgaaggagggaaggctggaagagagtgttgcattgagaataataacagagggtgcatcaattcttcgacaggaaaaaaatttgctggatattgatgcgccagtcactgctgcagtattgaagtatgagaacaatgttatgaatatcaggcaattcaactgttctcctcatccatactggcttccaaatttcatggatgtttttacttggtcccttccatttgttggggaaaaagtgactgagatgctggtaaatgtcctcaacatctgctcagatgatgaactagggtcagaagaagatggatttgatggtgcaacagctgcagcccggaaagaggtgataaggaacaagatccgagcaataggcaaaatggccagagtgttctcagtgctcagagaagagagtgagagtgtgctgacgctgaaaggcttgaccccaactggcatgctccccagcggagtactttctggagggaagcaaaccctgcaaagcgctactgttgaggctattgaggctgatgaagctatcaaaggattttcaccacaacataagatcactagcttcgaggaagccaagggcttagaccgaattaatgagaggatgccgcctcgcagagatgccatgccctctgacgccaaccttaactccatcaacaaggctctcacctcagagactaacggcacggacagcaatggcagtaatagcagcaatattcagtgaccacttcctgttcactttttttttttttttttttttttttttttgagctgcggggcatgatggggattgctgcatatcagcagttggatgttcttgcctctgacagtagcttatttgctctgggggccaggaattggattcagtttacactatcattaaaaaagagggagagagataataaactatattttggtggggatggtgattaaacacctcttttgggtatgccttttaaaaatgcttatagagaaaaaaaattttaaaaagaaagctaatgctagtatatactgcaatgttaggggaatgaacatgttttcctactgcattggggacttctagataggttaatgaaaggccttttattctgttactggacatgaaaactttgtctaatttcttactctattgtacgtttacagtcgcagcactaaaaatggatgacatcaaacatttttaacaaaatgatgtacaaactaaggactatttattgataatgttttgctactcttgtcagacaatggctataaactgaattaggcagtcttaaaaaaaaaaaaaaacagaaaaagaaaaaaaagaacgttgcaaatttgttaaaatgccaaaaaggacagtttaattttgtacagattatgcttacctcaggtttctttagtgtgcttgaatgcccttctttccatataacacttatcttcttcttaattcggcaatggaatatcttttaagttttaaaaaaactggaataattatatctatcttttttgccgtttatatttaggggtttttgttgataaaatcaagtcttggttgtggcttgctgaattaaatatttatgagtggtgcatttttaagtatagtgaacaagacaccatattaagtacagtgataaagcatctatattctgtaaaaaaaaaaaaaatctgcctatgcatgttttttaagaaaaaaaaaatggctgtatcggcctgtatgggactgtaatgcgcttagtggtctgacatatactggaaatgtatgtatactggcgtactttatattctctaaaatgcttaatgcctttgaaattttgtaatcaaaaaaaagctttgaaaaaatctaaaggggagagtattctttaaagtttttaacataagcttgtcaatgcacatgtagatggttagcatgtttagcaaaccttgtgaaattataataagtttgtagttacatgtgaaactctaaatgcatggcaactgttaatgtcataacagtttagttattttgttctgttctgtcatgtgccacaaaatatgtacttttttcacttttttccctttgtatatcagttacgggttacaactggttcattctgaaaacaacaacaacaaaagtccattcatattttttaacaattgtataagtgcccaagtaattcactacagcctaaagccttgcctttgtaatttgacttctgacatgttggcaatcaaagcatgcacttgtaacaatgaaaaagaaaaagcattttatattactactcaataaaatgtgcatgaacttacagaattctcatccttccactgagtccgctgaagggatttatgtgcacaaccaccatgtgtcttctaggtgctggcccaccaccacacatcacaggctgatttccacaggcttcttcctaggggcctcgtgatctgaggggtggtgcctacttccactgtaagaaagaatcttggtggatttgtgtctcaaatcagataagagaagcctgtttaaagagcagatgccatcttctggcttcctcaaggagccagttaaaaaaccagagcattcctttttattgaaaaataaaattaatttgttatcaggttgtttcagttgtattggatgccctatctatctgctaaagcaaaaagtactaggctactaagtgcattttcatcacagaaaagagttgcatttgtattaacaagaaatttgtatacccacgcttcagctactatctaatcatcacccgaagatttaagatacaccaaatttcagtttgtttgtaacattgttcatctttagtgcactttgttttatataataaagtatgcctgttatattaaataataagaatatggcaattagcgatatagcatacccaaacaaagatgttctcgatacagtctggcaaagactatcccaaggttattttaatgaattcagacattttttcctgtggatatttctccatcctaaaaaaagtggcaaccaaggaaaatatttagatgcaacttactagagtgatgatgtgaaagaaatggtgattctggtatcatggtgtttattttctttcttataactgcagagaaaatatcctgactaaaaaaaattcatttttttggattcctttcttttacaaattgtgctgaggcaactatggcatagaaataaacatttgacattaaaataagcagttgatgtgagtattgctt

SEQ ID NO: 3363 - DNA, 1365 bp, Homo sapiens
  source 1..1365: mol_type = genomic DNA
atgtccgagcccaaggcaattgatcccaagttgtcgacgaccgacagggtggtgaaagtttgtggggacattcatggacaattctttgatttgatgaagctctttgaagtcgggggatctcctgccaacactcgctacctcttcttaggggactatgttgacagagggtacttcagtattgaatgtgtgctgtatttgtgggccttgaaaattctctaccccaaaacactgtttttacttcgtggaaatcatgaatgtagacatctaacagagtatttcacatttaaacaagaatgtaaaataaagtattcagaacgcgtatatgatgcctgtatggatgcctttgactgccttcccctggctgccctgatgaaccaacagttcctgtgtgtgcatggtggtttgtctccagagattaacactttagatgatatcagaaaattagaccgattcaaagaaccacctgcatatggacctatgtgtgatatcctgtggtcagaccccctggaagattttggaaatgagaagactcaggaacatttcactcacaacacagtcagggggtgttcatacttctacagttacccggctgtatgtgaattcttacagcacaataacttgttatctatactccgagcccacgaagcccaagatgcagggtaccgcatgtacaggaaaagccaaacaacaggcttcccttctctaattacaattttttcagcaccaaattacttagatgtatacaataacaaagctgcagtattgaagtatgagaacaatgttatgaatatcaggcaattcaactgttctcctcatccatactggcttccaaatttcatggatgtttttacttggtcccttccatttgttggggaaaaagtgactgagatgctggtaaatgtcctcaacatctgctcagatgatgaactagggtcagaagaagatggatttgatggtgcaacagctgcagcccggaaagaggtgataaggaacaagatccgagcaataggcaaaatggccagagtgttctcagtgctcagagaagagagtgagagtgtgctgacgctgaaaggcttgaccccaactggcatgctccccagcggagtactttctggagggaagcaaaccctgcaaagcgctactgttgaggctattgaggctgatgaagctatcaaaggattttcaccacaacataagatcactagcttcgaggaagccaagggcttagaccgaattaatgagaggatgccgcctcgcagagatgccatgccctctgacgccaaccttaactccatcaacaaggctctcacctcagagactaacggcacggacagcaatggcagtaatagcagcaatattcagtga

SEQ ID NO: 3364 - DNA, 569 bp, Homo sapiens
  source 1..569: mol_type = genomic DNA
ggtgttggcggcggcggcggcggcggaggggggtaggttgtgcccgggactgtgtctgccgagctcggcggctgtgccttgctgttccatttcctccaagtcaccggcttacagcaaaagaagtgtttgataatgatggaaaacctcgtgtggatatcttaaaggcgcatcttatgaaggagggaaggctggaagagagtgttgcattgagaataataacagagggtgcatcaattcttcgacaggaaaaaaatttgctggatattgatgcgccagtcactgtttgtggggacattcatggacaattctttgatttgatgaagctctttgaagtcgggggatctcctgccaacactcgctacctcttcttaggggactatgttgacagagggtacttcagtattgaatgtgtgctgtatttgtgggccttgaaaattctctaccccaaaacactgtttttacttcgtggaaatcatgaatgtagacatctaacagagtatttcacatttaaacaagaatgtaaaataaagtattcagaacgcgtatatgatgcctgtatggatgccttt

SEQ ID NO: 3365 - DNA, 579 bp, Homo sapiens
  source 1..579: mol_type = genomic DNA
aaaaacaaccgtacaccgcatcgcagtcgtagctcttctccgcaagctgttccatttcctccaagtcaccggcttacagcaaaagaagtgtttgataatgatggaaaacctcgtgtggatatcttaaaggcgcatcttatgaaggagggaaggctggaagagagtgttgcattgagaataataacagagggtgcatcaattcttcgacaggaaaaaaatttgctggatattgatgcgccagtcactgtttgtggggacattcatggacaattctttgatttgatgaagctctttgaagtcgggggatctcctgccaacactcgctacctcttcttaggggactatgttgacagagggtacttcagtattgaatgtgtgctgtatttgtgggccttgaaaattctctaccccaaaacactgtttttacttcgtggaaatcatgaatgtagacatctaacagagtatttcacatttaaacaagaatgtaaaataaagtattcagaacgcgtatatgatgcctgtatggatgcctttgactgccttcccctggctgccctgatgaaccaacagttcctgtgt

SEQ ID NO: 3366 - DNA, 2418 bp, Homo sapiens
  source 1..2418: mol_type = genomic DNA
agagggtccgccatgttccccggcggcgccgccgcttggctctggtagccgccgcccccgcccccaaccccgcccggcccagagcctagccgagccccgggcccagcatggccgccccggagccggcccgggctgcaccgcccccacccccgcccccgccgccccctcccggggctgaccgcgtcgtcaaagctgtccctttccccccaacacatcgcttgacatctgaagaagtatttgatttggatgggatacccagggttgatgttctgaagaaccacttggtgaaagaaggtcgagtagatgaagaaattgcgcttagaattatcaatgagggtgctgccatccttcggagagagaaaaccatgatagaagtagaagctccaatcacagtgtgtggtgacatccatggccaattttttgatctgatgaaactttttgaagtaggaggatcacctgctaatacacgatacctttttcttggcgattatgtggacagaggttattttagtatagagtgtgtcttatatttatgggttctgaagattctatacccaagcacattatttcttctgagaggcaaccatgaatgcagacaccttactgaatattttacctttaagcaggaatgtaaaattaagtattcggaaagagtctatgaagcttgtatggaagcttttgatagtttgcctcttgctgcacttttaaaccaacagtttctttgtgttcatggtggactttcaccagaaatacacacactggatgatattaggagattagatagattcaaagagccacctgcatttggaccaatgtgtgacttgttatggtccgatccttctgaagattttggaaatgaaaaatcacaggaacattttagtcacaatacagttcgaggatgttcttatttttataactatccagcagtgtgtgaatttttgcaaaacaataatttgttatcgattattagagctcatgaagctcaagatgcaggctatagaatgtacagaaaaagtcaaactacagggttcccttcattaataacaattttttcggcacctaattacttagatgtctacaataataaagctgctgtattaaagtatgaaaataatgtgatgaatattcgacagtttaactgttctccacatccttactggttgcctaattttatggatgtcttcacgtggtctttaccgtttgttggagaaaaagtgacagaaatgttggtaaatgttctgagtatttgctctgatgatgaactaatgactgaaggtgaagaccagtttgatggttcagctgcagcccggaaagaaatcataagaaacaaaattcgagcaattggcaagatggcaagagtcttctctgttctcagggaggagagtgaaagtgtgctgacactcaagggcctgactcccacagggatgttgcctagtggagtgttagctggaggacggcagaccctgcaaagtggtaatgatgttatgcaacttgctgtgcctcagatggactggggcacacctcactcttttgctaacaattcacataatgcatgcagggaattccttctgttttttagttcctgtctcagcagctgacctagacagggtactgtattagctagtgtctcattaatacctgatcagggcagaaaactgatagaatgggtattcctttcaattgaaaataatggtcagttcctcagcttttcatgaaatgatatgggagcagctcatatcataatgtctgaaatatttatttattcatctgtctaattcacccttttcttttaaaagccccagtttcagaatgtgaatcagggatattcctgttactaaaatggaaatgtaattccaagtttcttttttaattttttaaatttatgtcattgtattggactatgcttatatttaaaactacttaatttagagttaactacctgcttaggccccagaacattacttatgcccttcagttaccaaaagatttgtgcaaggttttgtaccctggtaaatgatgccaaagtttgttttctgtggtgtttgtcaaatgttctatgtataattaactgtctgtaacatgctgtttccttcctctgcagatgtagctgctttcctaaatctgtctgtctttctttaggttagctgtatgtctgtaaaagtatgttcaattaaattactccatcagacacttgtctgtcttgcaatgtagaagcagctttgtagcaccttgttttgaggtttgctgcatttgttgctgcactttgtgcattctgaacatgaatgtaacattagatattaagtcattgttataaggggttgaatttaaatcctgtaagtcaaaattgaaagggtgttattaagtgtgcctttattttgcatgaaaataaaaagaattatacgtaaagcattcctgtaa

SEQ ID NO: 3367 - DNA, 3501 bp, Homo sapiens
  source 1..3501: mol_type = genomic DNA
gggaaagagggtccgccatgttccccggcggcgccgccgcttggctctggtagccgccgcccccgcccccaaccccgcccggcccagagcctagccgagccccgggcccagcatggccgccccggagccggcccgggctgcaccgcccccacccccgcccccgccgccccctcccggggctgaccgcgtcgtcaaagctgtccctttccccccaacacatcgcttgacatctgaagaagtatttgatttggatgggatacccagggttgatgttctgaagaaccacttggtgaaagaaggtcgagtagatgaagaaattgcgcttagaattatcaatgagggtgctgccatccttcggagagagaaaaccatgatagaagtagaagctccaatcacagtgtgtggtgacatccatggccaattttttgatctgatgaaactttttgaagtaggaggatcacctgctaatacacgatacctttttcttggcgattatgtggacagaggttattttagtatagagtgtgtcttatatttatgggttctgaagattctatacccaagcacattatttcttctgagaggcaaccatgaatgcagacaccttactgaatattttacctttaagcaggaatgtaaaattaagtattcggaaagagtctatgaagcttgtatggaagcttttgatagtttgcctcttgctgcacttttaaaccaacagtttctttgtgttcatggtggactttcaccagaaatacacacactggatgatattaggagattagatagattcaaagagccacctgcatttggaccaatgtgtgacttgttatggtccgatccttctgaagattttggaaatgaaaaatcacaggaacattttagtcacaatacagttcgaggatgttcttatttttataactatccagcagtgtgtgaatttttgcaaaacaataatttgttatcgattattagagctcatgaagctcaagatgcaggctatagaatgtacagaaaaagtcaaactacagggttcccttcattaataacaattttttcggcacctaattacttagatgtctacaataataaagctgctgtattaaagtatgaaaataatgtgatgaatattcgacagtttaactgttctccacatccttactggttgcctaattttatggatgtcttcacgtggtctttaccgtttgttggagaaaaagtgacagaaatgttggtaaatgttctgagtatttgctctgatgatgaactaatgactgaaggtgaagaccagtttgatggttcagctgcagcccggaaagaaatcataagaaacaaaattcgagcaattggcaagatggcaagagtcttctctgttctcagggaggagagtgaaagtgtgctgacactcaagggcctgactcccacagggatgttgcctagtggagtgttagctggaggacggcagaccctgcaaagtgccacagttgaggctattgaggctgaaaaagcaatacgaggattctctccaccacatagaatctgcagttttgaagaggcaaagggtttggataggatcaatgagagaatgccacctcggaaagatgctgtacagcaagatggtttcaattctctgaacaccgcacatgccactgagaaccacgggacgggcaaccatactgcccagtgacccactacttcccagggactctcacatctcgggccccaaatggacagatcacccgaggagctggaggggtcggccaagctgactgtaaatttcacagtctctctgaagaaaccattgtgcttctgagaccctagcccccttcctggatggaggcttgagggccctgggacatgtgctatctgataagattgggtcatcgctgccaaggtggagagcagtgagcaaggggcttggggcaatttccagtggagggcatccacacctccattttatgcttgtggttcacacatttaagtttacaaatcagatttcttttccccttcagtagaattagattttgtttttcaatcatgatttcaaatgcaatcctaagagctaatgtggacttttctttttccatgaaatgtctttaaaggatgaattagcatggtcttaaaatacatttctgaggttactagctgtattttgaattgtgagcaaaatgccgagaaacccagttggcatttatacaaaatgttgacctcaggtctatagttcttaaatgtggctaattctgtaacatagtcttggtattttttaattatgaatgcatatcctatttccaggcaggctctcttacttgaacacaaatccaaaaactaatttagagtcttttttgcccagatcttttaagacttacaccccagagatttaagaagaaaacctctaaatttcaaaattatgaagaattacagaattactcatttaaggtactttaaaagaagtttgtacattgtcaaagtaaattttaattcaaatcatgtctgtaaaacttgacgtattttgtgtatgcatgttttcattttgcaaatatttaatatatagacctatgatgtacaggtacgacatgtataggttacctagatgttatgagaaattttagtttattgtgagtactcaagttgcttagagagccaccagggtgatttgctgctggctttctatcatttttatgttttaatgcaaaggaaattttaaaatgttctggaagtgtttttgattaagcaatgcagcctagaagcaatggttctgttcaatcattcagatgttagtggaagcataaaagtcaagactgcatgttgaaacctttcttttgatagttactgaactgcttggttaaactaaatggaaccatgtgctaatttttcacaattattgacctgtattgattgccactgtagtttggtatttccctttactttggtggcctgcttccctcatgccctggaatacaactcagagctccaggcagcggaaccatctattgttttgtttgccagaaagtgcaccctgtatggtctcctgtctaagttggaaatattatgcatgtgcaggactattcgagtattttataaacagtagcacacaataaattccatgcatgggccgctgctcctatctctgtgttgggttttatttggaagatgcaatctgatttgtccttttgatgcaaatcagaaaatcctgttactagagctgggatgtcctccggagattatctcgtggatagttcatggtaatttgattaattaaattctttataaattttgccttaaaaaaaacttttgttatatacttgttttacatgagcattagtaactgagcactagaggactttgaatgcctactgtaggcctcctaagtctaatatttaagatcactgtttattgtcttttaattgaaagaaaatatgttattgtctagaattttgttatagtggtattgggaatttactgggtgttctaacaataagaaaaatattagtgataattgca

SEQ ID NO: 3368 - DNA, 1680 bp, Homo sapiens
  source 1..1680: mol_type = genomic DNA
atgccggtcttagcccctctgtagggaaagagggtccgccatgttccccggcggcgccgccgcttggctctggtagccgccgcccccgcccccaaccccgcccggcccagagcctagccgagccccgggcccagcatggccgccccggagccggcccgggctgcaccgcccccacccccgcccccgccgccccctcccggggctgaccgcgtcgtcaaagctgtccctttccccccaacacatcgcttgacatctgaagaagtatttgatttggatgggatacccagggttgatgttctgaagaaccacttggtgaaagaaggtcgagtagatgaagaaattgcgcttagaattatcaatgagggtgctgccatccttcggagagagaaaaccatgatagaagtagaagctccaatcacagtgtgtggtgacatccatggccaattttttgatctgatgaaactttttgaagtaggaggatcacctgctaatacacgatacctttttcttggcgattatgtggacagaggttattttagtatagagcatgttctaggcactgaagacatatcgattaatcctcacaataatattaatgagtgtgtcttatatttatgggttctgaagattctatacccaagcacattatttcttctgagaggcaaccatgaatgcagacaccttactgaatattttacctttaagcaggaatgtaaaattaagtattcggaaagagtctatgaagcttgtatggaagcttttgatagtttgcctcttgctgcacttttaaaccaacagtttctttgtgttcatggtggactttcaccagaaatacacacactggatgatattaggagattagatagattcaaagagccacctgcatttggaccaatgtgtgacttgttatggtccgatccttctgaagattttggaaatgaaaaatcacaggaacattttagtcacaatacagttcgaggatgttcttatttttataactatccagcagtgtgtgaatttttgcaaaacaataatttgttatcgattattagagctcatgaagctcaagatgcaggctatagaatgtacagaaaaagtcaaactacagggttcccttcattaataacaattttttcggcacctaattacttagatgtctacaataataaagctgctgtattaaagtatgaaaataatgtgatgaatattcgacagtttaactgttctccacatccttactggttgcctaattttatggatgtcttcacgtggtctttaccgtttgttggagaaaaagtgacagaaatgttggtaaatgttctgagtatttgctctgatgatgaactaatgactgaaggtgaagaccagtttgatggttcagctgcagcccggaaagaaatcataagaaacaaaattcgagcaattggcaagatggcaagagtcttctctgttctcagggaggagagtgaaagtgtgctgacactcaagggcctgactcccacagggatgttgcctagtggagtgttagctggaggacggcagaccctgcaaagtggtaatgatgttatgcaacttgctgtgcctcagatggactggggcacacctcactcttttgctaacaattcacataatgcatgcagggaattccttctgttttttagttcctgtctcagcagctga

SEQ ID NO: 3369 - DNA, 3173 bp, Homo sapiens
  source 1..3173: mol_type = genomic DNA
atgccggtcttagcccctctgtagggaaagagggtccgccatgttccccggcggcgccgccgcttggctctggtagccgccgcccccgcccccaaccccgcccggcccagagcctagccgagccccgggcccagcatggccgccccggagccggcccgggctgcaccgcccccacccccgcccccgccgccccctcccggggctgaccgcgtcgtcaaagctgtccctttccccccaacacatcgcttgacatctgaagaagtatttgatttggatgggatacccagggttgatgttctgaagaaccacttggtgaaagaaggtcgagtagatgaagaaattgcgcttagaattatcaatgagggtgctgccatccttcggagagagaaaaccatgatagaagtagaagctccaatcacagtgtgtggtgacatccatggccaattttttgatctgatgaaactttttgaagtaggaggatcacctgctaatacacgatacctttttcttggcgattatgtggacagaggttattttagtatagagtgtgtcttatatttatgggttctgaagattctatacccaagcacattatttcttctgagaggcaaccatgaatgcagacaccttactgaatattttacctttaagcaggaatgtaaaattaagtattcggaaagagtctatgaagcttgtatggaagcttttgatagtttgcctcttgctgcacttttaaaccaacagtttctttgtgttcatggtggactttcaccagaaatacacacactggatgatattaggagattagatagattcaaagagccacctgcatttggaccaatgtgtgacttgttatggtccgatccttctgaagattttggaaatgaaaaatcacaggaacattttagtcacaatacagttcgaggatgttcttatttttataactatccagcagtgtgtgaatttttgcaaaacaataatttgttatcgattattagagctcatgaagctcaagatgcaggctatagaatgtacagaaaaagtcaaactacagggttcccttcattaataacaattttttcggcacctaattacttagatgtctacaataataaagctgctgtattaaagtatgaaaataatgtgatgaatattcgacagtttaactgttctccacatccttactggttgcctaattttatggatgtcttcacgtggtctttaccgtttgttggagaaaaagtgacagaaatgttggtaaatgttctgagtatttgctctgatgatgaactaatgactgaaggtgaagaccagtttgatgaacggctcatatatggcaataaaaaaggttcagctgcagcccggaaagaaatcataagaaacaaaattcgagcaattggcaagatggcaagagtcttctctgttctcagggaggagagtgaaagtgtgctgacactcaagggcctgactcccacagggatgttgcctagtggagtgttagctggaggacggcagaccctgcaaagtgccacagttgaggctattgaggctgaaaaagcaatacgaggattctctccaccacatagaatctgcagttttgaagaggcaaagggtttggataggatcaatgagagaatgccacctcggaaagatgctgtacagcaagatggtttcaattctctgaacaccgcacatgccactgagaaccacgggacgggcaaccatactgcccagtgacccactacttcccagggactctcacatctcgggccccaaatggacagatcacccgaggagctggaggggtcggccaagctgactgtaaatttcacagtctctctgaagaaaccattgtgcttctgagaccctagcccccttcctggatggaggcttgagggccctgggacatgtgctatctgataagattgggtcatcgctgccaaggtggagagcagtgagcaaggggcttggggcaatttccagtggagggcatccacacctccattttatgcttgtggttcacacatttaagtttacaaatcagatttcttttccccttcagtagaattagattttgtttttcaatcatgatttcaaatgcaatcctaagagctaatgtggacttttctttttccatgaaatgtctttaaaggatgaattagcatggtcttaaaatacatttctgaggttactagctgtattttgaattgtgagcaaaatgccgagaaacccagttggcatttatacaaaatgttgacctcaggtctatagttcttaaatgtggctaattctgtaacatagtcttggtattttttaattatgaatgcatatcctatttccaggcaggctctcttacttgaacacaaatccaaaaactaatttagagtcttttttgcccagatcttttaagacttacaccccagagatttaagaagaaaacctctaaatttcaaaattatgaagaattacagaattactcatttaaggtactttaaaagaagtttgtacattgtcaaagtaaattttaattcaaatcatgtctgtaaaacttgacgtattttgtgtatgcatgttttcattttgcaaatatttaatatatagacctatgatgtacaggtacgacatgtataggttacctagatgttatgagaaattttagtttattgtgagtactcaagttgcttagagagccaccagggtgatttgctgctggctttctatcatttttatgttttaatgcaaaggaaattttaaaatgttctggaagtgtttttgattaagcaatgcagcctagaagcaatggttctgttcaatcattcagatgttagtggaagcataaaagtcaagactgcatgttgaaacctttcttttgatagttactgaactgcttggttaaactaaatggaaccatgtgctaatttttcacaattattgacctgtattgattgccactgtagtttggtatttccctttactttggtggcctgcttccctcatgccctggaatacaactcagagctccaggcagcggaaccatctattgttttgtttgccagaaagtgcaccctgtatggtctcctgtctaagttggaaatattatgcatgtgcaggactattcgagtattttataaacagtagcacacaataaattccatgcatgggccgctgctcct

SEQ ID NO: 3370 - DNA, 3119 bp, Homo sapiens
  source 1..3119: mol_type = genomic DNA
atgccggtcttagcccctctgtagggaaagagggtccgccatgttccccggcggcgccgccgcttggctctggtagccgccgcccccgcccccaaccccgcccggcccagagcctagccgagccccgggcccagcatggccgccccggagccggcccgggctgcaccgcccccacccccgcccccgccgccccctcccggggctgaccgcgtcgtcaaagctgtccctttccccccaacacatcgcttgacatctgaagaagtatttgatttggatgggatacccagggttgatgttctgaagaaccacttggtgaaagaaggtcgagtagatgaagaaattgcgcttagaattatcaatgagggtgctgccatccttcggagagagaaaaccatgatagaagtagaagctccaatcacagtgtgtggtgacatccatggccaattttttgatctgatgaaactttttgaagtaggaggatcacctgctaatacacgatacctttttcttggcgattatgtggacagaggttattttagtatagagtgtgtcttatatttatgggttctgaagattctatacccaagcacattatttcttctgagaggcaaccatgaatgcagacaccttactgaatattttacctttaagcaggaatgtaaaattaagtattcggaaagagtctatgaagcttgtatggaagcttttgatagtttgcctcttgctgcacttttaaaccaacagtttctttgtgttcatggtggactttcaccagaaatacacacactggatgatattaggagattagatagattcaaagagccacctgcatttggaccaatgtgtgacttgttatggtccgatccttctgaagattttggaaatgaaaaatcacaggaacattttagtcacaatacagttcgaggatgttcttatttttataactatccagcagtgtgtgaatttttgcaaaacaataatttgttatcgattattagagctcatgaagctcaagatgcaggctatagaatgtacagaaaaagtcaaactacagggttcccttcattaataacaattttttcggcacctaattacttagatgtctacaataataaagctgctgtattaaagtatgaaaataatgtgatgaatattcgacagtttaactgttctccacatccttactggttgcctaattttatggatgtcttcacgtggtctttaccgtttgttggagaaaaagtgacagaaatgttggtaaatgttctgagtatttgctctgatgatgaactaatgactgaaggtgaagaccagtttgatgtaggttcagctgcagcccggaaagaaatcataagaaacaaaattcgagcaattggcaagatggcaagagtcttctctgttctcagggaggagagtgaaagtgtgctgacactcaagggcctgactcccacagggatgttgcctagtggagtgttagctggaggacggcagaccctgcaaagtgcaatacgaggattctctccaccacatagaatctgcagttttgaagaggcaaagggtttggataggatcaatgagagaatgccacctcggaaagatgctgtacagcaagatggtttcaattctctgaacaccgcacatgccactgagaaccacgggacgggcaaccatactgcccagtgacccactacttcccagggactctcacatctcgggccccaaatggacagatcacccgaggagctggaggggtcggccaagctgactgtaaatttcacagtctctctgaagaaaccattgtgcttctgagaccctagcccccttcctggatggaggcttgagggccctgggacatgtgctatctgataagattgggtcatcgctgccaaggtggagagcagtgagcaaggggcttggggcaatttccagtggagggcatccacacctccattttatgcttgtggttcacacatttaagtttacaaatcagatttcttttccccttcagtagaattagattttgtttttcaatcatgatttcaaatgcaatcctaagagctaatgtggacttttctttttccatgaaatgtctttaaaggatgaattagcatggtcttaaaatacatttctgaggttactagctgtattttgaattgtgagcaaaatgccgagaaacccagttggcatttatacaaaatgttgacctcaggtctatagttcttaaatgtggctaattctgtaacatagtcttggtattttttaattatgaatgcatatcctatttccaggcaggctctcttacttgaacacaaatccaaaaactaatttagagtcttttttgcccagatcttttaagacttacaccccagagatttaagaagaaaacctctaaatttcaaaattatgaagaattacagaattactcatttaaggtactttaaaagaagtttgtacattgtcaaagtaaattttaattcaaatcatgtctgtaaaacttgacgtattttgtgtatgcatgttttcattttgcaaatatttaatatatagacctatgatgtacaggtacgacatgtataggttacctagatgttatgagaaattttagtttattgtgagtactcaagttgcttagagagccaccagggtgatttgctgctggctttctatcatttttatgttttaatgcaaaggaaattttaaaatgttctggaagtgtttttgattaagcaatgcagcctagaagcaatggttctgttcaatcattcagatgttagtggaagcataaaagtcaagactgcatgttgaaacctttcttttgatagttactgaactgcttggttaaactaaatggaaccatgtgctaatttttcacaattattgacctgtattgattgccactgtagtttggtatttccctttactttggtggcctgcttccctcatgccctggaatacaactcagagctccaggcagcggaaccatctattgttttgtttgccagaaagtgcaccctgtatggtctcctgtctaagttggaaatattatgcatgtgcaggactattcgagtattttataaacagtagcacacaataaattccatgcatgggccgctgctcct

SEQ ID NO: 3371 - DNA, 3149 bp, Homo sapiens
  source 1..3149: mol_type = genomic DNA
atgccggtcttagcccctctgtagggaaagagggtccgccatgttccccggcggcgccgccgcttggctctggtagccgccgcccccgcccccaaccccgcccggcccagagcctagccgagccccgggcccagcatggccgccccggagccggcccgggctgcaccgcccccacccccgcccccgccgccccctcccggggctgaccgcgtcgtcaaagctgtccctttccccccaacacatcgcttgacatctgaagaagtatttgatttggatgggatacccagggttgatgttctgaagaaccacttggtgaaagaaggtcgagtagatgaagaaattgcgcttagaattatcaatgagggtgctgccatccttcggagagagaaaaccatgatagaagtagaagctccaatcacagtgtgtggtgacatccatggccaattttttgatctgatgaaactttttgaagtaggaggatcacctgctaatacacgatacctttttcttggcgattatgtggacagaggttattttagtatagagtgtgtcttatatttatgggttctgaagattctatacccaagcacattatttcttctgagaggcaaccatgaatgcagacaccttactgaatattttacctttaagcaggaatgtaaaattaagtattcggaaagagtctatgaagcttgtatggaagcttttgatagtttgcctcttgctgcacttttaaaccaacagtttctttgtgttcatggtggactttcaccagaaatacacacactggatgatattaggagattagatagattcaaagagccacctgcatttggaccaatgtgtgacttgttatggtccgatccttctgaagattttggaaatgaaaaatcacaggaacattttagtcacaatacagttcgaggatgttcttatttttataactatccagcagtgtgtgaatttttgcaaaacaataatttgttatcgattattagagctcatgaagctcaagatgcaggctatagaatgtacagaaaaagtcaaactacagggttcccttcattaataacaattttttcggcacctaattacttagatgtctacaataataaagctgctgtattaaagtatgaaaataatgtgatgaatattcgacagtttaactgttctccacatccttactggttgcctaattttatggatgtcttcacgtggtctttaccgtttgttggagaaaaagtgacagaaatgttggtaaatgttctgagtatttgctctgatgatgaactaatgactgaaggtgaagaccagtttgatgtaggttcagctgcagcccggaaagaaatcataagaaacaaaattcgagcaattggcaagatggcaagagtcttctctgttctcagggaggagagtgaaagtgtgctgacactcaagggcctgactcccacagggatgttgcctagtggagtgttagctggaggacggcagaccctgcaaagtgccacagttgaggctattgaggctgaaaaagcaatacgaggattctctccaccacatagaatctgcagttttgaagaggcaaagggtttggataggatcaatgagagaatgccacctcggaaagatgctgtacagcaagatggtttcaattctctgaacaccgcacatgccactgagaaccacgggacgggcaaccatactgcccagtgacccactacttcccagggactctcacatctcgggccccaaatggacagatcacccgaggagctggaggggtcggccaagctgactgtaaatttcacagtctctctgaagaaaccattgtgcttctgagaccctagcccccttcctggatggaggcttgagggccctgggacatgtgctatctgataagattgggtcatcgctgccaaggtggagagcagtgagcaaggggcttggggcaatttccagtggagggcatccacacctccattttatgcttgtggttcacacatttaagtttacaaatcagatttcttttccccttcagtagaattagattttgtttttcaatcatgatttcaaatgcaatcctaagagctaatgtggacttttctttttccatgaaatgtctttaaaggatgaattagcatggtcttaaaatacatttctgaggttactagctgtattttgaattgtgagcaaaatgccgagaaacccagttggcatttatacaaaatgttgacctcaggtctatagttcttaaatgtggctaattctgtaacatagtcttggtattttttaattatgaatgcatatcctatttccaggcaggctctcttacttgaacacaaatccaaaaactaatttagagtcttttttgcccagatcttttaagacttacaccccagagatttaagaagaaaacctctaaatttcaaaattatgaagaattacagaattactcatttaaggtactttaaaagaagtttgtacattgtcaaagtaaattttaattcaaatcatgtctgtaaaacttgacgtattttgtgtatgcatgttttcattttgcaaatatttaatatatagacctatgatgtacaggtacgacatgtataggttacctagatgttatgagaaattttagtttattgtgagtactcaagttgcttagagagccaccagggtgatttgctgctggctttctatcatttttatgttttaatgcaaaggaaattttaaaatgttctggaagtgtttttgattaagcaatgcagcctagaagcaatggttctgttcaatcattcagatgttagtggaagcataaaagtcaagactgcatgttgaaacctttcttttgatagttactgaactgcttggttaaactaaatggaaccatgtgctaatttttcacaattattgacctgtattgattgccactgtagtttggtatttccctttactttggtggcctgcttccctcatgccctggaatacaactcagagctccaggcagcggaaccatctattgttttgtttgccagaaagtgcaccctgtatggtctcctgtctaagttggaaatattatgcatgtgcaggactattcgagtattttataaacagtagcacacaataaattccatgcatgggccgctgctcct

SEQ ID NO: 3372 - DNA, 605 bp, Homo sapiens
  source 1..605: mol_type = genomic DNA
catccttactggttgcctaattttatggatgtcttcacgtggtctttaccgtttgttggagaaaaagtgacagaaatgttggtaaatgttctgagtatttgctctgatgatgaactaatgactgaaggtgaagaccagtttgatgaacggctcatatatggcaataaaaaaggttcagctgcagcccggaaagaaatcataagaaacaaaattcgagcaattggcaagatggcaagagtcttctctgttctcagggaggagagtgaaagtgtgctgacactcaagggcctgactcccacagggatgttgcctagtggagtgttagctggaggacggcagaccctgcaaagtgccacagttgaggctattgaggctgaaaaagcaatacgaggattctctccaccacatagaatctgcagttttgaagaggcaaagggtttggataggatcaatgagagaatgccacctcggaaagatgctgtacagcaagatggtttcaattctctgaacaccgcacatgccactgagaaccacgggacgggcaaccatactgcccagtgacccactacttcccagggactctcacatctcgggccccaaatgga

SEQ ID NO: 3373 - DNA, 1509 bp, Homo sapiens
  source 1..1509: mol_type = genomic DNA
aatgtaatatgggaaggatggaggggccaggaagataagtgacagaaatgttggtaaatgttctgagtatttgctctgatgatgaactaatgactgaaggtgaagaccagtttgatggttcagctgcagcccggaaagaaatcataagaaacaaaattcgagcaattggcaagatggcaagagtcttctctgttctcagggaggagagtgaaagtgtgctgacactcaagggcctgactcccacagggatgttgcctagtggagtgttagctggaggacggcagaccctgcaaagtgccacagttgaggctattgaggctgaaaaagcaatacgaggattctctccaccacatagaatctgcagttttgaagaggcaaagggtttggataggatcaatgagagaatgccacctcggaaagatgctgtacagcaagatggtttcaattctctgaacaccgcacatgccactgagaaccacgggacgggcaaccatactgcccagtgacccactacttcccagggactctcacatctcgggccccaaatggacagatcacccgaggagctggaggggtcggccaagctgactgtaaatttcacagtctctctgaagaaaccattgtgcttctgagaccctagcccccttcctggatggaggcttgagggccctgggacatgtgctatctgataagattgggtcatcgctgccaaggtggagagcagtgagcaaggggcttggggcaatttccagtggagggcatccacacctccattttatgcttgtggttcacacatttaagtttacaaatcagatttcttttccccttcagtagaattagattttgtttttcaatcatgatttcaaatgcaatcctaagagctaatgtggacttttctttttccatgaaatgtctttaaaggatgaattagcatggtcttaaaatacatttctgaggttactagctgtattttgaattgtgagcaaaatgccgagaaacccagttggcatttatacaaaatgttgacctcaggtctatagttcttaaatgtggctaattctgtaacatagtcttggtattttttaattatgaatgcatatcctatttccaggcaggctctcttacttgaacacaaatccaaaaactaatttagagtcttttttgcccagatcttttaagacttacaccccagagatttaagaagaaaacctctaaatttcaaaattatgaagaattacagaattactcatttaaggtactttaaaagaagtttgtacattgtcaaagtaaattttaattcaaatcatgtctgtaaaacttgacgtattttgtgtatgcatgttttcattttgcaaatatttaatatatagacctatgatgtacaggtacgacatgtataggttacctagatgttatgagaaattttagtttattgtgagtactcaagttgcttagagagccaccagggtgatttgctgctggctttctatcatttttatgttttaatgc

SEQ ID NO: 3374 - DNA, 2118 bp, Homo sapiens
  source 1..2118: mol_type = genomic DNA
aaccccgcccggcccagagcctagccgagccccgggcccagcatggccgccccggagccggcccgggctgcaccgcccccacccccgcccccgccgccccctcccggggctgaccgcgtcgtcaaaggctggtctccaatttctggcctcaagtgatcctcctgccccagcctacgaagtagtcgtgattacagacatgcttcactactcccagcattaaattatatttattgtacttcatttaagctgtccctttccccccaacacatcgcttgacatctgaagaagtatttgatttggatgggatacccagggttgatgttctgaagaaccacttggtgaaagaaggtcgagtagatgaagaaattgcgcttagaattatcaatgagggtgctgccatccttcggagagagaaaaccatgatagaagtagaagctccaatcacagtgtgtggtgacatccatggccaattttttgatctgatgaaactttttgaagtaggaggatcacctgctaatacacgatacctttttcttggcgattatgtggacagaggttattttagtatagagtgtgtcttatatttatgggttctgaagattctatacccaagcacattatttcttctgagaggcaaccatgaatgcagacaccttactgaatattttacctttaagcaggaatgtaaaattaagtattcggaaagagtctatgaagcttgtatggaagcttttgatagtttgcctcttgctgcacttttaaaccaacagtttctttgtgttcatggtggactttcaccagaaatacacacactggatgatattaggagattagatagattcaaagagccacctgcatttggaccaatgtgtgacttgttatggtccgatccttctgaagattttggaaatgaaaaatcacaggaacattttagtcacaatacagttcgaggatgttcttatttttataactatccagcagtgtgtgaatttttgcaaaacaataatttgttatcgattattagagctcatgaagctcaagatgcaggctatagaatgtacagaaaaagtcaaactacagggttcccttcattaataacaattttttcggcacctaattacttagatgtctacaataataaagctgctgtattaaagtatgaaaataatgtgatgaatattcgacagtttaactgttctccacatccttactggttgcctaattttatggatgtcttcacgtggtctttaccgtttgttggagaaaaagtgacagaaatgttggtaaatgttctgagtatttgctctgatgatgaactaatgactgaaggtgaagaccagtttgatgtaggttcagctgcagcccggaaagaaatcataagaaacaaaattcgagcaattggcaagatggcaagagtcttctctgttctcagggaggagagtgaaagtgtgctgacactcaagggcctgactcccacagggatgttgcctagtggagtgttagctggaggacggcagaccctgcaaagtggtaatgatgttatgcaacttgctgtgcctcagatggactggggcacacctcactcttttgctaacaattcacataatgcatgcagggaattccttctgttttttagttcctgtctcagcagctgacctagacagggtactgtattagctagtgtctcattaatacctgatcagggcagaaaactgatagaatgggtattcctttcaattgaaaataatggtcagttcctcagcttttcatgaaatgatatgggagcagctcatatcataatgtctgaaatatttatttattcatctgtctaattcacccttttcttttaaaagccccagtttcagaatgtgaatcagggatattcctgttactaaaatggaaatgtaattccaagtttcttttttaattttttaaatttatgtcattgtattggactatgcttatatttaaaactacttaatttagagttaactacctgcttaggccccagaacattacttatgcccttcagttaccaaaagatttgtgcaaggttttgtaccctggtaaatgatgccaaagtttgttttctgtggtgtttgtcaaatgttctatgta

SEQ ID NO: 3375 - DNA, 2189 bp, Homo sapiens
  source 1..2189: mol_type = genomic DNA
cacgagggcccgggccgcgagcagccgcggccgtcccggtcgccacccttagcagcggtcgcggtcggtgccgaagcggtgttccccgccttagccgctggcgcctcccaagagagcggccggtgggccctcgtcctgtcagtggcgtcggaggccggcgctgcggtggccgcgcccttctggtgctcggacaccgctgaggagccggggccgggcacggctggctgacggctccgggcagctaaggctgcccgaggagaaggcggcggccgcggcgtaggcgcacgtccggcgggctcctggagcctggaggaggccgaggggaccatgtccgggaggcgcttccacctctccaccaccgaccgcgtcatcaaagctgtcccctttcctccaacccaacggcttactttcaaggaagtatttgagaatgggaaacctaaagttgatgttttaaaaaaccatttggtaaaggaaggacgactggaagaggaagtagccttaaagataatcaatgatggggctgccatcctgaggcaagagaagactatgatagaagtagatgctccaatcacagtatgtggtgatattcatggacaattctttgacctaatgaagttatttgaagttggaggatcacctagtaacacacgctacctctttctgggtgactatgtggacagaggctatttcagtatagagtgtgtgctgtatttatggagtttaaagattaatcatcccaaaacattgtttctgcttcggggaaatcatgaatgcaggcatcttacagactatttcaccttcaaacaggaatgtcgaatcaaatattcggaacaggtgtatgatgcctgtatggagacatttgactgtcttcctcttgctgccctcttaaaccagcagtttctctgtgtacatggaggaatgtcacctgaaattacttctttagatgacattaggaaattagacaggtttacggaacctcccgcctttggacctgtgtgtgacctgctttggtctgatccctcagaggattatggcaatgagaagaccttggagcactatacccacaacactgtccgagggtgctcttatttctacagttaccctgcagtttgtgaatttttgcagaacaataatttactatcaattatcagagcccatgaagcccaagatgctgggtatcgaatgtacaggaagagccaagccacaggctttccatcacttattacaattttctctgcccccaattacctagatgtctataacaataaagctgctgtgttgaaatatgaaaacaatgtcatgaatatcaggcagtttaactgttctccacacccctactggcttccaaactttatggatgttttcacatggtctttgccttttgttggggaaaaagtcacagagatgctggtaaatgtgctcaacatatgctctgatgacgaactgatttctgatgatgaagcagaaggaagcactacagttcgtaaggagatcatcaggaataagatcagagccattgggaagatggcacgggtcttttcaattcttcggcaagaaagtgagagtgtgctgactctcaagggcctgactcccacaggcacactccctctgggcgtcctctcaggaggcaagcagactatcgagacagccacagtagaagcggtagaggcccgggaagccatcagagggttctcgcttcagcacaagatccggagttttgaagaagcgcgaggtctggaccgaattaatgagcgaatgccaccccgaaaggatagcatacacgctggtgggccaatgaaatctgtaacctcagcacactcacatgctgcgcacaggagcgaccaagggaagaaagcccattcatgacttagagtcctgccgtggctcaggtggatctaaaactcaagaacaaattctatttatttattattggaaaatgaaaagcaactcaaaacaacttcaacgtggaggtgcatttataattcagtctgcatttattctgtaaaaaggtggctgttttataaattcttttaatttatgttcaatatatataaaaagtgcatctgttttgtttttcccttttttctccataattttaagaaatgaatctgattgttgtcaacacatttgtgaagtcttgtgctataaaggggaacttcccctaataaaagggccttggaaacctcaaa

SEQ ID NO: 3376 - DNA, 2132 bp, Homo sapiens
  source 1..2132: mol_type = genomic DNA
gccacccttagcagcggtcgcggtcggtgccgaagcggtgttccccgccttagccgctggcgcctcccaagagagcggccggtgggccctcgtcctgtcagtggcgtcggaggccggcgctgcggtggccgcgcccttctggtgctcggacaccgctgaggagccggggccgggcacggctggctgacggctccgggcagctaaggctgcccgaggagaaggcggcggccgcggcgtaggcgcacgtccggcgggctcctggagcctggaggaggccgaggggaccatgtccgggaggcgcttccacctctccaccaccgaccgcgtcatcaaagctgtcccctttcctccaacccaacggcttactttcaaggaagtatttgagaatgggaaacctaaagttgatgttttaaaaaaccatttggtaaaggaaggacgactggaagaggaagtagccttaaagataatcaatgatggggctgccatcctgaggcaagagaagactatgatagaagtagatgctccaatcacagtatgtggtgatattcatggacaattctttgacctaatgaagttatttgaagttggaggatcacctagtaacacacgctacctctttctgggtgactatgtggacagaggctatttcagtatagagtgtgtgctgtatttatggagtttaaagattaatcatcccaaaacattgtttctgcttcggggaaatcatgaatgcaggcatcttacagactatttcaccttcaaacaggaatgtcgaatcaaatattcggaacaggtgtatgatgcctgtatggagacatttgactgtcttcctcttgctgccctcttaaaccagcagtttctctgtgtacatggaggaatgtcacctgaaattacttctttagatgacattaggaaattagacaggtttacggaacctcccgcctttggacctgtgtgtgacctgctttggtctgatccctcagaggattatggcaatgagaagaccttggagcactatacccacaacactgtccgagggtgctcttatttctacagttaccctgcagtttgtgaatttttgcagaacaataatttactatcaattatcagagcccatgaagcccaagatgctgggtatcgaatgtacaggaagagccaagccacaggctttccatcacttattacaattttctctgcccccaattacctagatgtctataacaataaagctgctgtgttgaaatatgaaaacaatgtcatgaatatcaggcagtttaactgttctccacacccctactggcttccaaactttatggatgttttcacatggtctttgccttttgttggggaaaaagtcacagagatgctggtaaatgtgctcaacatatgctctgatgacgaactgatttctgatgatgaagcagaaggaagcactacagttcgtaaggagatcatcaggaataagatcagagccattgggaagatggcacgggtcttttcaattcttcggcaagaaagtgagagtgtgctgactctcaagggcctgactcccacaggcacactccctctgggcgtcctctcaggaggcaagcagactatcgagacagccatcagagggttctcgcttcagcacaagatccggagttttgaagaagcgcgaggtctggaccgaattaatgagcgaatgccaccccgaaaggatagcatacacgctggtgggccaatgaaatctgtaacctcagcacactcacatgctgcgcacaggagcgaccaagggaagaaagcccattcatgacttagagtcctgccgtggctcaggtggatctaaaactcaagaacaaattctatttatttattattggaaaatgaaaagcaactcaaaacaacttcaacgtggaggtgcatttataattcagtctgcatttattctgtaaaaaggtggctgttttataaattcttttaatttatgttcaatatatataaaaagtgcatctgttttgtttttcccttttttctccataattttaagaaatgaatctgattgttgtcaacacatttgtgaagtcttgtgctataaaggggaacttcccctaataaaagggccttggaaacctcaaacctgggtttctgac

SEQ ID NO: 3377 - DNA, 3023 bp, Homo sapiens
  source 1..3023: mol_type = genomic DNA
tgccttgaggttgcgggtcagcgcgagccgctgcagtgagtccgtcacggctccggcgcgagcgcgaggctgcagcccccgagtttcccggccgtcttcgccccctctccccctcctttcttcttctctgcctctcctgcctctcgccgctgctcctcccgcgctctccggctctgaatctcgaccttaatttatttccccctaccctgcccgctccctcgcgtgcccaatcgcccggccggcgcgggccccgcggcgccgcctcccctcccccacgcgcgccccctccccgccggcgacccgagggccgcagctgggccgccgccgccgtttcctgcgagccagcctgagcgcaacacttctccgagccagcgagccagcgagccgccgacccgccgagcaaaatgggaaatgaggcaagttatcctttggaaatgtgctcacactttgatgcggatgaaattaaaaggctaggaaagagatttaagaagcttgatttggacaattctggttctttgagtgtggaagagttcatgtctctgcctgagttacaacagaatcctttagtacagcgagtaatagatatattcgacacagatgggaatggagaagtagactttaaagaattcattgagggcgtctctcagttcagtgtcaaaggagataaggagcagaaattgaggtttgctttccgtatctatgacatggataaagatggctatatttccaatggggaactcttccaggtattgaagatgatggtggggaacaatctgaaagatacacagttacagcaaattgtagacaaaaccataataaatgcagataaggatggagatggaagaatatcctttgaagaattctgtgctgttgtaggtggcctagatatccacaaaaagatggtggtagatgtgtgactcttatcagagagtaccacccaacacttttgctttcttctccatctctgaagatctgctcaagacgtccagcaatgctctctgtgtatttaaatggaagtatttttctctgtgaagccacattttccaacatgagcctcatgaagccaactaagtgttattgaactgtaattctctcaataactcagtgtagcactttaaagtctgaaggacagcaacatgaaaagagcatatcaatgtggtggagaaagggaaggggttggctttttaatttatttttcttcatcttttataacaagaaagtatctatatatacatatgtaaatatttatatatagatatatgtagctttctatatatgtagtaggttggctttaatttaatatacttgattcagaaacaaaacaatagagtacaaaagtgccaagcagaacataaaacatccttacttttatttcacacagttttatatatagatagaagactgtacaatttgagccgggtgttaggccagctattttccttttcctgtgctttctcctttgagagattgacaaagcatttgttaacgtcctattatttaccttaattacatttttgtaacaaaggagtctgtaactttatttatacttatgaatatatccagggactacttctcattgctgagcagcttttaatacacctctgcttgaggagaaagtctagttcattgctactgccaagagctagttcttgtgttcatatagtaactgcacagggcttatagctgcttcattctgctactttgtaactaggagccattgcatttattaaatgtccctcagtaacgttaagtgctagttgtgattttatacataaaggccagaagctgtctgaggcaatcatgattgattgtatgtatcacttactgaagaatacctgaagtgatcatgtaactacttataagggatatccatttgtttgattacatgggtaaataatttgtcattaaacttgtgtttgaatcatgaattcccttgtttcaaaagacttgcagctaatctaaaaaactggtgatatttaatatgcatgtatgtatctaaacacccacatatatttgtggtttaagtgtgagaaatcttgctaatctatatgccacagaagagcaaaattgtatccaaatttatgccacttaaatttctttaccacgagggatagagcatgcatactggtttttttttcttgatttgcccatataattggtaatggataacttaataaatttgtgtgatataaaagtagtgtatcatgttctactgtttgatcttatcccttcccatttctgcaaaggtactgttagctggaagaaaaacattttggttagctttgtatgacagtagtctttccctttatagtttctctataaaaactggttttaaaatcagtggaaaagggcaggttgaatcaaggtgaatcaatctgaaattgagcacacctgcctgccatcgctgttccttcaactgagtgctgcacatcatgggctctgtctgtgagagaaaaatcccggtgcttggtgtccttgcatgacatggagttttgcatgtagatcaatttaaaatgtacctcttgtttacataatttgcataattttaaaagataatgttgccaaactttggaaatgttaatgttcagactgaaaatctccactacatgtaactttcttcctctggatcagtggcatggcttataatcccagccagtggtttgaactgttccagtgtcaactgccatgtgctctgcttcaagggggaactagccttttgtgaattttttgtacataagtatttgttacaaatattttagcaaatgctttctatttctcttgcttgtgcatatcttggctggcgttacagaaaaatagtgtaaacattatttccttaccggggaatgagggttttttctttttctttttttttttttttttttttagtttgtgtgtgggggtgggtaagggaggggatggtttatgttgaatgtttagtttttcttctgcatgatacgtcatgttgtgggatctttagaaaacttcatactgtatgaataagaaaataaaatatttgaaacttg

SEQ ID NO: 3378 - DNA, 3387 bp, Homo sapiens
  source 1..3387: mol_type = genomic DNA
gggcacgagccccgcccgagctcaccgcccctgctcccctctccgaccctttgagccgtggccgttgccagatgtccacaatgggaaacgaggccagttacccggcggagatgtgctcccactttgacaatgatgaaattaaaaggctgggcaggaggtttaagaagttggacttggacaaatcagggtctctgagcgtggaggagttcatgtccctgccggagctgcgccacaacccgttggtgcggcgagtgatcgacgtcttcgacaccgacggtgatggagaagtggacttcaaggaattcatcctggggacctcccagttcagcgtcaagggcgacgaggagcagaagttgaggtttgcgttcagcatttacgacatggataaagatggctacatttccaacggggagctcttccaggtgctgaagatgatggtgggcaacaacctgacggactggcagctccagcagctggtcgacaaaaccatcatcatcctggacaaggatggcgatgggaagatatcctttgaggaattcagtgctgtggtcagagacctggagatccacaagaagctggtcctcatcgtatgagcctttttcttacaagcaccacccaacaacttctgctttcttccctatctctttcaagatttgctcaagacgtccaactgtctctctgacttatctggaagtatttctttttgtgaagccatatgtcctaacaggagcttcatcaccaactcagtgctattaattctccttctctgaatgactcagggtaccctatagggggaagagcaagtcaaatgagcatagtggggaaagaaaaggaaatggcttttataaacatcttttactttgttttgattcaaagaccaaactagaactttaaaagttcaaaaataagaaagtatacatttttgctgttatttctcatcattttgtatatgggaggaaatttataatttgcatgggtgttaggtgaactgttttcatttgcttgtgttcagatatcttgccagattgttaacttcctattgtagcaacagggacaaatatatttgtctttgctgggcatctcgtaatcacttttcttaggggacagaatcccatcttttccttcggcagattgcagccccattccccacaatgcatccagaaatcgctgtgcatgtttgaggggtaggagttcatttggcctcctcctgacttgttgctccagctcctgaacagaaactagcttcagggctcttataggaaatgctaagcctggactaagtgcccagctcagccatcatcctcattagcagtgggtttccagggttggcagcccacaccagcattaatttcaatgaaggggacctccagctaaatagggcaagcaaagtgttctcccagaaagtgctctcacctccgacactggtccctacccccaggtggagacaatgagacatttagttagttgtcctacggaggagaggcagtagagtcaggctgcagtggaatctccctaggatgccaaagtggcattatgtctgttgctcacagatgcagagactgacaattgtgtctccacagcagaggtggatgctagctacaccagctatgctgattttgaaaatcagatctgaggcctagaagagaaactgagagctctctcattccaggaagccttttccctagtggaacattcagtgcagaagtcctcacacactaacagatctccaccattgggtgagccggagcctgtggttccaggggagatccagaatgcatgtgtctcttcccacgcatttatgtcatgttggtagctttagatcagccatggtgagaaaagaacaaaagcttttagttgtttttgttttgttttggagaatttgtttaccagtaaatacatcactgcctgtaccccaaatgttaccagctccctgaggtgtcccacatactattgtgagttctcagagcatgaactgtcctcagaagagcagggctaggacttgtcccagcatctgtgcctccataccaatcctctttctcacagagaaccacttcccatataagatgcttaaggctctcaaaacagcagaacaatgaaacatactctccctacacttgcttagccaagagataccactcaggtaacttttttcaggacatggaagatctgtttcaaggagatttactgctattttatttggaagaagctggcaactggtcttgaccaaaatagaaaaaaaaaaaaaaagtccacaaatttaatcacttgtagggaacccatctatcaaggtaccctaccatatacttttgtatttaatagattacttagaaaccacaaaaataggaatccttaccccttcaattcctgttcaaccctaaaaactgtgataaacgctcccaaccctgtggtgatcagggttatgtaatgttcaaagattcagacacacctgggtttggattcagttgcaactgggttgttatcacactcacttctttttagctgtgtgagcatgaataatttacttagcctctctgtgtctttccacctaattaaagaggatccaccccagggttattttgaggattcaaaaaggcatgcaacacacctggagcacaattccactttcattcaactaattcccttcccttcccccttcttccccttctacaagatcaatatgtaaaggagacatgaggcttactggttgcttttgaacacttacttagttcttagctacacccactctaaaattaactggacattagtgtacagcccatgtccaagcccagagagaaaacaatgggaacaatttcaaggtcctcaccactccttcatttgcagaggggacaacagactttctgacctgagaactggagaatttttaaaacaaaatctctcattccagcccaacctatttaactttttgtggaggaattttacatggaggaagtgagcacatgtcatgctagccaagaggacattattgtcattaaagagaggcattatttatacaccctgcaatgtgcacattaaaatatggaaattttaaaattatgaccaagggcttgaaacatattggattacatgctcacatttaacaaagagaggaaatgtgtttcagtttctggagtggctggaatttacaagctaattgttcaataaatctactcaagatagttacctaaggctttgtggcaatgaccttgaactgagagcctgtatctggatttagcacttgaaagatctaactggatatttgggttaaaagaatcacatttattcccaaatcggaatgctttgtttttcctgtcagttaattgccagttgccaacaaatctagttctatacagtttcttgggatgatgataataaacatttattgagcaa

SEQ ID NO: 3379 - DNA, 907 bp, Homo sapiens
  source 1..907: mol_type = genomic DNA
tccgaccctttgagccgtggccgttgccagatgtccacaatgggaaacgaggccagttacccggcggagatgtgctcccactttgacaatgatgaaattaaaaggctgggcaggaggtttaagaagttggacttggacaaatcagggtctctgagcgtggaggagttcatgtccctgccggagctgcgccacaacccgttggtgcggcgagtgatcgacgtcttcgacaccgacggtgatggagaagtggacttcaaggaattcatcctggggacctcccagttcagcgtcaagggcgacgaggagcagaagttgaggtttgcgttcagcatttacgacatggataaagatggctacatttccaacggggagctcttccaggtgctgaagatgatggtgggcaacaacctgacggactggcagctccagcagctggtcctcatcgtatgagcctttttcttacaagcaccacccaacaacttctgctttcttccctatctctttcaagatttgctcaagacgtccaactgtctctctgacttatctggaagtatttctttttgtgaagccatatgtcctaacaggagcttcatcaccaactcagtgctattaattctccttctctgaatgactcagggtaccctatagggggaagagcaagtcaaatgagcatagtggggaaagaaaaggaaatggcttttataaacatcttttactttgttttgattcaaagaccaaactagaactttaaaagttcaaaaataagaaagtatacatttttgctgttatttctcatcattttgtatatgggaggaaatttataatttgcatgggtgttaggtgaactgttttcatttgcttgtgttcagatatcttgccagattgttaacttcctattgtagcaaca

SEQ ID NO: 3380 - DNA, 3163 bp, Homo sapiens
  source 1..3163: mol_type = genomic DNA
agtgcgcaggcgcaactgcctggctctgctcgctccggcgctccggcccagctctcgcggacaagtccagacatcgcgcgcccccccttctccgggtccgccccctcccccttctcggcgtcgtcgaagataaacaatagttggccggcgagcgcctagtgtgtctcccgccgccggattcggcgggctgcgtgggaccggcgggatcccggccagccggccatggcggggctgtactcgctgggagtgagcgtcttctccgaccagggcgggaggaagtacatggaggacgttactcaaatcgttgtggagcccgaaccgacggctgaagaaaagccctcgccgcggcggtcgctgtctcagccgttgcctccgcggccgtcgccggccgcccttcccggcggcgaagtctcggggaaaggcccagcggtggcagcccgagaggctcgcgaccctctcccggacgccggggcctcgccggcacctagccgctgctgccgccgccgttcctccgtggcctttttcgccgtgtgcgacgggcacggcgggcgggaggcggcacagtttgcccgggagcacttgtggggtttcatcaagaagcagaagggtttcacctcgtccgagccggctaaggtttgcgctgccatccgcaaaggctttctcgcttgtcaccttgccatgtggaagaaactggcggaatggccaaagactatgacgggtcttcctagcacatcagggacaactgccagtgtggtcatcattcggggcatgaagatgtatgtagctcacgtaggtgactcaggggtggttcttggaattcaggatgacccgaaggatgactttgtcagagctgtggaggtgacacaggaccataagccagaacttcccaaggaaagagaacgaatcgaaggacttggtgggagtgtaatgaacaagtctggggtgaatcgtgtagtttggaaacgacctcgactcactcacaatggacctgttagaaggagcacagttattgaccagattccttttctggcagtagcaagagcacttggtgatttgtggagctatgatttcttcagtggtgaatttgtggtgtcacctgaaccagacacaagtgtccacactcttgaccctcagaagcacaagtatattatattggggagtgatggactttggaatatgattccaccacaagatgccatctcaatgtgccaggaccaagaggagaaaaaatacctgatgggtgagcatggacaatcttgtgccaaaatgcttgtgaatcgagcattgggccgctggaggcagcgtatgctccgagcagataacactagtgccatagtaatctgcatctctccagaagtggacaatcagggaaactttaccaatgaagatgagttatacctgaacctgactgacagcccttcctataatagtcaagaaacctgtgtgatgactccttccccatgttctacaccaccagtcaagtcactggaggaggatccatggccaagggtgaattctaaggaccatatacctgccctggttcgtagcaatgccttctcagagaattttttagaggtttcagctgagatagctcgagagaatgtccaaggtgtagtcataccctcaaaagatccagaaccacttgaagaaaattgcgctaaagccctgactttaaggatacatgattctttgaataatagccttccaattggccttgtgcctactaattcaacaaacactgtcatggaccaaaaaaatttgaagatgtcaactcctggccaaatgaaagcccaagaaattgaaagaacccctccaacaaactttaaaaggacattagaagagtccaattctggccccctgatgaagaagcatagacgaaatggcttaagtcgaagtagtggtgctcagcctgcaagtctccccacaacctcacagcgaaagaactctgttaaactcaccatgcgacgcagacttaggggccagaagaaaattggaaatcctttacttcatcaacacaggaaaactgtttgtgtttgctgaaatgcatctgggaaatgaggtttttccaaacttaggatataagagggctttttaaatttggtgccgatgttgaactttttttaaggggagaaaattaaaagaaatatacagtttgactttttggaattcagcagttttatcctggccttgtacttgcttgtattgtaaatgtggattttgtagatgttagggtataagttgctgtaaaatttgtgtaaatttgtatccacacaaattcagtctctgaatacacagtattcagagtctctgatacacagtaattgtgacaatagggctaaatgtttaaagaaatcaaaagaatctattagattttagaaaaacatttaaactttttaaaatacttattaaaaaatttgtataagccacttgtcttgaaaactgtgcaactttttaaagtaaattattaagcagactggaaaagtgatgtattttcatagtgacctgtgtttcacttaatgtttcttagagccaagtgtcttttaaacattattttttatttctgatttcataattcagaactaaatttttcatagaagtgttgagccatgctacagttagtcttgtcccaattaaaatactatgcagtatctcttacatcagtagcatttttctaaaaccttagtcatcagatatgcttactaaatcttcagcatagaaggaagtgtgtttgcctaaaacaatctaaaacaattcccttctttttcatcccagaccaatggcattattaggtcttaaagtagttactcccttctcgtgtttgcttaaaatatgtgaagttttccttgctatttcaataacagatggtgctgctaattcccaacatttcttaaattattttatatcatacagttttcattgattatatgggtatatattcatctaataaatcagtgaactgttcctcatgttgctgaatttgtagttgttggtttattttaatggtatgtacaagttgagtatcccttatccaaaatgcttgggaccagaagtgtttcagattttttaaaattttggaatatttgctttatactgagcttttgagtgttcccaatctgaaattcaaaatgctctaatgagcatttcctttgagcatcatgcctgc

SEQ ID NO: 3381 - DNA, 2996 bp, Homo sapiens
  source 1..2996: mol_type = genomic DNA
cgcgcccccccttctccgggtccgccccctcccccttctcggcgtcgtcgaagataaacaatagttggccggcgagcgcctagtgtgtctcccgccgccggattcggcgggctgcgtgggaccggcgggatcccggccagccggccatggcggggctgtactcgctgggagtgagcgtcttctccgaccagggcgggaggaagtacatggaggacgttactcaaatcgttgtggagcccgaaccgacggctgaagaaaagccctcgccgcggcggtcgctgtctcagccgttgcctccgcggccgtcgccggccgcccttcccggcggcgaagtctcggggaaaggcccagcggtggcagcccgagaggctcgcgaccctctcccggacgccggggcctcgccggcacctagccgctgctgccgccgccgttcctccgtggcctttttcgccgtgtgcgacgggcacggcgggcgggaggcggcacagtttgcccgggagcacttgtggggtttcatcaagaagcagaagggtttcacctcgtccgagccggctaaggtttgcgctgccatccgcaaaggctttctcgcttgtcaccttgccatgtggaagaaactggcggaatggccaaagactatgacgggtcttcctagcacatcagggacaactgccagtgtggtcatcattcggggcatgaagatgtatgtagctcacgtaggtgactcaggggtggttcttggaattcaggatgacccgaaggatgactttgtcagagctgtggaggtgacacaggaccataagccagaacttcccaaggaaagagaacgaatcgaaggacttggtgggagtgtaatgaacaagtctggggtgaatcgtgtagtttggaaacgacctcgactcactcacaatggacctgttagaaggagcacagttattgaccagattccttttctggcagtagcaagagcacttggtgatttgtggagctatgatttcttcagtggtgaatttgtggtgtcacctgaaccagacacaagtgtccacactcttgaccctcagaagcacaagtatattatattggggagtgatggactttggaatatgattccaccacaagatgccatctcaatgtgccaggaccaagaggagaaaaaatacctgatgggtgagcatggacaatcttgtgccaaaatgcttgtgaatcgagcattgggccgctggaggcagcgtatgctccgagcagataacactagtgccatagtaatctgcatctctccagaagtggacaatcagggaaactttaccaatgaagatgagttatacctgaacctgactgacagcccttcctataatagtcaagaaacctgtgtgatgactccttccccatgttctacaccaccagtcaaggattttggatttgaactcgattcaagaaagtgatgtaacttattatcagagagccatctttacatcaatactaatctgaatgccagccatgtgtacagcactaataaaaagtcactggaggaggatccatggccaagggtgaattctaaggaccatatacctgccctggttcgtagcaatgccttctcagagaattttttagaggtttcagctgagatagctcgagagaatgtccaaggtgtagtcataccctcaaaagatccagaaccacttgaagaaaattgcgctaaagccctgactttaaggatacatgattctttgaataatagccttccaattggccttgtgcctactaattcaacaaacactgtcatggaccaaaaaaatttgaagatgtcaactcctggccaaatgaaagcccaagaaattgaaagaacccctccaacaaactttaaaaggacattagaagagtccaattctggccccctgatgaagaagcatagacgaaatggcttaagtcgaagtagtggtgctcagcctgcaagtctccccacaacctcacagcgaaagaactctgttaaactcaccatgcgacgcagacttaggggccagaagaaaattggaaatcctttacttcatcaacacaggaaaactgtttgtgtttgctgaaatgcatctgggaaatgaggtttttccaaacttaggatataagagggctttttaaatttggtgccgatgttgaactttttttaaggggagaaaattaaaagaaatatacagtttgactttttggaattcagcagttttatcctggccttgtacttgcttgtattgtaaatgtggattttgtagatgttagggtataagttgctgtaaaatttgtgtaaatttgtatccacacaaattcagtctctgaatacacagtattcagagtctctgatacacagtaattgtgacaatagggctaaatgtttaaagaaatcaaaagaatctattagattttagaaaaacatttaaactttttaaaatacttattaaaaaatttgtataagccacttgtcttgaaaactgtgcaactttttaaagtaaattattaagcagactggaaaagtgatgtattttcatagtgacctgtgtttcacttaatgtttcttagagccaagtgtcttttaaacattattttttatttctgatttcataattcagaactaaatttttcatagaagtgttgagccatgctacagttagtcttgtcccaattaaaatactatgcagtatctcttacatcagtagcatttttctaaaaccttagtcatcagatatgcttactaaatcttcagcatagaaggaagtgtgtttgcctaaaacaatctaaaacaattcccttctttttcatcccagaccaatggcattattaggtcttaaagtagttactcccttctcgtgtttgcttaaaatatgtgaagttttccttgctatttcaataacagatggtgctgctaattcccaacatttcttaaattattttatatcatacagttttcattgattatatgggtatatattcatctaataaatcagtgaactgtt

SEQ ID NO: 3382 - DNA, 1751 bp, Homo sapiens
  source 1..1751: mol_type = genomic DNA
gtgcgcaggcgcaactgcctggctctgctcgctccggcgctccggcccagctctcgcggacaagtccagacatcgcgcgcccccccttctccgggtccgccccctcccccttctcggcgtcgtcgaagataaacaatagttggccggcgagcgcctagtgtgtctcccgccgccggattcggcgggctgcgtgggaccggcgggatcccggccagccggccatggcggggctgtactcgctgggagtgagcgtcttctccgaccagggcgggaggcggcacagtttgcccgggagcacttgtggggtttcatcaagaagcagaagggtttcacctcgtccgagccggctaaggtttgcgctgccatccgcaaaggctttctcgcttgtcaccttgccatgtggaagaaactggcggaatggccaaagactatgacgggtcttcctagcacatcagggacaactgccagtgtggtcatcattcggggcatgaagatgtatgtagctcacgtaggtgactcaggggtggttcttggaattcaggatgacccgaaggatgactttgtcagagctgtggaggtgacacaggaccataagccagaacttcccaaggaaagagaacgaatcgaaggacttggtgggagtgtaatgaacaagtctggggtgaatcgtgtagtttggaaacgacctcgactcactcacaatggacctgttagaaggagcacagttattgaccagattccttttctggcagtagcaagagcacttggtgatttgtggagctatgatttcttcagtggtgaatttgtggtgtcacctgaaccagacacaagtgtccacactcttgaccctcagaagcacaagtatattatattggggagtgatggactttggaatatgattccaccacaagatgccatctcaatgtgccaggaccaagaggagaaaaaatacctgatgggtgagcatggacaatcttgtgccaaaatgcttgtgaatcgagcattgggccgctggaggcagcgtatgctccgagcagataacactagtgccatagtaatctgcatctctccagaagtggacaatcagggaaactttaccaatgaagatgagttatacctgaacctgactgacagcccttcctataatagtcaagaaacctgtgtgatgactccttccccatgttctacaccaccagtcaaggattttggatttgaactcgattcaagaaagtgatgtaacttattatcagagagccatctttacatcaatactaatctgaatgccagccatgtgtacagcactaataaaaagtcactggaggaggatccatggccaagggtgaattctaaggaccatatacctgccctggttcgtagcaatgccttctcagagaattttttagaggtttcagctgagatagctcgagagaatgtccaaggtgtagtcataccctcaaaagatccagaaccacttgaagaaaattgcgctaaagccctgactttaaggatacatgattctttgaataatagccttccaattggccttgtgcctactaattcaacaaacactgtcatggaccaaaaaaatttgaagatgtcaactcctggccaaatgaaagcccaagaaattgaaagaacccctccaacaaactttaaaaggacattagaagagtccaattctggccccctgatgaagaagcatagacgaaatggcttaagtcgaagtagtggtgctcagcctgcaagtctcc

SEQ ID NO: 3383 - DNA, 4838 bp, Homo sapiens
  source 1..4838: mol_type = genomic DNA
ggagaagttagtaaaaccgaatctgacatcatcacctagcagttcatgcagctagcaagtggtttgttcttagggtaacagaggaggaaattgttcctcgtctgataagacaacagtggagaaaggacgcatgctgtttcttagggacacggctgacttccagatatgaccatgtatttgtggcttaaactcttggcatttggctttgcctttctggacacagaagtatttgtgacagggcaaagcccaacaccttcccccactgatgcctaccttaatgcctctgaaacaaccactctgagcccttctggaagcgctgtcatttcaaccacaacaatagctactactccatctaagccaacatgtgatgaaaaatatgcaaacatcactgtggattacttatataacaaggaaactaaattatttacagcaaagctaaatgttaatgagaatgtggaatgtggaaacaatacttgcacaaacaatgaggtgcataaccttacagaatgtaaaaatgcgtctgtttccatatctcataattcatgtactgctcctgataagacattaatattagatgtgccaccaggggttgaaaagtttcagttacatgattgtacacaagttgaaaaagcagatactactatttgtttaaaatggaaaaatattgaaacctttacttgtgatacacagaatattacctacagatttcagtgtggtaatatgatatttgataataaagaaattaaattagaaaaccttgaacccgaacatgagtataagtgtgactcagaaatactctataataaccacaagtttactaacgcaagtaaaattattaaaacagattttgggagtccaggagagcctcagattattttttgtagaagtgaagctgcacatcaaggagtaattacctggaatccccctcaaagatcatttcataattttaccctctgttatataaaagagacagaaaaagattgcctcaatctggataaaaacctgatcaaatatgatttgcaaaatttaaaaccttatacgaaatatgttttatcattacatgcctacatcattgcaaaagtgcaacgtaatggaagtgctgcaatgtgtcatttcacaactaaaagtgctcctccaagccaggtctggaacatgactgtctccatgacatcagataatagtatgcatgtcaagtgtaggcctcccagggaccgtaatggcccccatgaacgttaccatttggaagttgaagctggaaatactctggttagaaatgagtcgcataagaattgcgatttccgtgtaaaagatcttcaatattcaacagactacacttttaaggcctattttcacaatggagactatcctggagaaccctttattttacatcattcaacatcttataattctaaggcactgatagcatttctggcatttctgattattgtgacatcaatagccctgcttgttgttctctacaaaatctatgatctacataagaaaagatcctgcaatttagatgaacagcaggagcttgttgaaagggatgatgaaaaacaactgatgaatgtggagccaatccatgcagatattttgttggaaacttataagaggaagattgctgatgaaggaagactttttctggctgaatttcagagcatcccgcgggtgttcagcaagtttcctataaaggaagctcgaaagccctttaaccagaataaaaaccgttatgttgacattcttccttatgattataaccgtgttgaactctctgagataaacggagatgcagggtcaaactacataaatgccagctatattgatggtttcaaagaacccaggaaatacattgctgcacaaggtcccagggatgaaactgttgatgatttctggaggatgatttgggaacagaaagccacagttattgtcatggtcactcgatgtgaagaaggaaacaggaacaagtgtgcagaatactggccgtcaatggaagagggcactcgggcttttggagatgttgttgtaaagatcaaccagcacaaaagatgtccagattacatcattcagaaattgaacattgtaaataaaaaagaaaaagcaactggaagagaggtgactcacattcagttcaccagctggccagaccacggggtgcctgaggatcctcacttgctcctcaaactgagaaggagagtgaatgccttcagcaatttcttcagtggtcccattgtggtgcactgcagtgctggtgttgggcgcacaggaacctatatcggaattgatgccatgctagaaggcctggaagccgagaacaaagtggatgtttatggttatgttgtcaagctaaggcgacagagatgcctgatggttcaagtagaggcccagtacatcttgatccatcaggctttggtggaatacaatcagtttggagaaacagaagtgaatttgtctgaattacatccatatctacataacatgaagaaaagggatccacccagtgagccgtctccactagaggctgaattccagagacttccttcatataggagctggaggacacagcacattggaaatcaagaagaaaataaaagtaaaaacaggaattctaatgtcatcccatatgactataacagagtgccacttaaacatgagctggaaatgagtaaagagagtgagcatgattcagatgaatcctctgatgatgacagtgattcagaggaaccaagcaaatacatcaatgcatcttttataatgagctactggaaacctgaagtgatgattgctgctcagggaccactgaaggagaccattggtgacttttggcagatgatcttccaaagaaaagtcaaagttattgttatgctgacagaactgaaacatggagaccaggaaatctgtgctcagtactggggagaaggaaagcaaacatatggagatattgaagttgacctgaaagacacagacaaatcttcaacttatacccttcgtgtctttgaactgagacattccaagaggaaagactctcgaactgtgtaccagtaccaatatacaaactggagtgtggagcagcttcctgcagaacccaaggaattaatctctatgattcaggtcgtcaaacaaaaacttccccagaagaattcctctgaagggaacaagcatcacaagagtacacctctactcattcactgcagggatggatctcagcaaacgggaatattttgtgctttgttaaatctcttagaaagtgcggaaacagaagaggtagtggatatttttcaagtggtaaaagctctacgcaaagctaggccaggcatggtttccacattcgagcaatatcaattcctatatgacgtcattgccagcacctaccctgctcagaatggacaagtaaagaaaaacaaccatcaagaagataaaattgaatttgataatgaagtggacaaagtaaagcaggatgctaattgtgttaatccacttggtgccccagaaaagctccctgaagcaaaggaacaggctgaaggttctgaacccacgagtggcactgaggggccagaacattctgtcaatggtcctgcaagtccagctttaaatcaaggttcataggaaaagacataaatgaggaaactccaaacctcctgttagctgttatttctatttttgtagaagtaggaagtgaaaataggtatacagtggattaattaaatgcagcgaaccaatatttgtagaagggttatattttactactgtggaaaaatatttaagatagttttgccagaacagtttgtacagacgtatgcttattttaaaattttatctcttattcagtaaaaaacaacttctttgtaatcgttatgtgtgtatatgtatgtgtgtatgggtgtgtgtttgtgtgagagacagagaaagagagagaattctttcaagtgaatctaaaagcttttgcttttcctttgtttttatgaagaaaaaatacattttatattagaagtgttaacttagcttgaaggatctgtttttaaaaatcataaactgtgtgcagactcaataaaatcatgtacatttctgaaatgacctcaagatgtcctccttgttctactcatatatatctatcttatatagtttactattttacttctagagatagtacataaaggtggtatgtgtgtgtatgctactacaaaaaagttgttaactaaattaacattgggaaatcttatattccatatattagcatttagtccaatgtctttttaagcttatttaattaaaaaatttccagtgagcttatcatgctgtctttacatggggttttcaattttgcatgctcgattattccctgtacaatatttaaaatttattgcttgatacttttgacaacaaattaggttttgtacaattgaacttaaataaatgtcattaaaataaataaatgcaatatgtattaatattcattgtataaaaatagaagaatacaaacatatttgttaaatatttacatatgaaatttaatatagctatttttatggaatttttcattgatatgaaaaatatgatattgcatatgcatagttcccatgttaaatcccattcataactttcattaaagcatttactttgaatttctccaatgcttagaatgtttttaccaggaatggatgtcgctaatcataataaaattcaaccattatttttttcttgtttataatacattgtgttatatgttcaaatatgaaatgtgtatgcacctattgaaatatgtttaatgcatttattaacatttgcaggacacttttacaggccccaattatccaatagtctaataattgtttaagatctag

SEQ ID NO: 3384 - DNA, 1098 bp, Homo sapiens
  source 1..1098: mol_type = genomic DNA
ggagaagttagtaaaaccgaatctgacatcatcacctagcagttcatgcagctagcaagtggtttgttcttagggtaacagaggaggaaattgttcctcgtctgataagacaacagtggagaaaggacgcatgctgtttcttagggacacggctgacttccagatatgaccatgtatttgtggcttaaactcttggcatttggctttgcctttctggacacagaagtatttgtgacagggcaaagcccaacaccttcccccactggtaagaattaatatttatatttttactaattttattttcttgttgcaaagtttatatatttaactacaattttctattattaacactgaaattatttttaaggataaattttataatcatgagtgattcttgacattcacttgttcttaaactttctgcttatacgttatagagtttaataactacctaaacatgttattaaatttgtatatatattttgtgtataaatagtaacttttcccaaacttgacagtaaatcacacaacaggtttctactctcttttaatattttaagactataaaaaaatgcatttaaattagataacaaaattttatagtctgaaagcaggttaacagctgtctatgtatgttatagatatgtagataacagatttgcatatgtctatatttctttaagagtatgttgcttttttcaatggtatgcaaaacctttgagactattgagatatttttaaataataattttcaaattctactgaacacttcaatagtccttataaatgtcttaatcatgagataaatttaaaacacagagatgctgcaaataaattcatacatagtacatacaaaataagagaaaaaattaaattgcagatggttaaatatcacatcacttaactgatgttactgaaaatgtattttcctgcataatcatatggttgacagtatgcattaagaaggtaagtaaaacaatgaagacaattttgatttaatatggtaatgcacaattccaactaacgtacattcaacagatcatgaaattgggttattaaaatgaatatttttgtcattaaataaaaattccgtccaaa

SEQ ID NO: 3385 - DNA, 448 bp, Homo sapiens
  source 1..448: mol_type = genomic DNA
catggctcgaatgaaccgcccagctcctgtggaagtcacatacaagaacatgagatttcttattacacacaatccaaccaatgcgaccttaaacaaatttatagaggaacttaagaagtatggagttaccacaatagtaagagtatgtgaagcaacttatgacactactcttgtggagaaagaaggtatccatgttcttgattggccttttgatgatggtgcaccaccatccaaccagattgttgatgactggttaagtcttgtgaaaattaagtttcgtgaagaacctggttgttgtattgctgttcattgcgttgcaggccttgggagaaagcggcgtggagcttttaacagcaagcaacttctgtatttggagaagtatcgtcctaaaatgcggctgcgtttcaaagattccaacggtcatagaaacaactgttgcattcaataa

SEQ ID NO: 3386 - DNA, 3294 bp, Homo sapiens
  source 1..3294: mol_type = genomic DNA
cccccgccgccgcctgcatcgccgccaccgccgctccgccacgaccaccgccgcctcctgccctgcagccaccgccaccgcctgtgtcgccgccgcctcgggaccggctgtatgattaggccacaatcttcaatgagtaaacatattcctcaattctgtggtgttcttggtcacacatttatggagtttctgaagggcagtggagattactgccaggcacagcacgacctctatgcagacaagtgaactgtagaaactgattactgctccaccaagaagcccccataagagtggttatcctggacacagaagtgttgaattgaaatccacagagcattttacaagagttctgacctggatggggtaaacctcagtgcacttcttttctgttggcctcagtattactggattgaagaattgctgcttcttgttaggaggttcatttcacttatcattacttacaacttcatactcaaagcactgagaatttcaagtggagtatattgaagtagacttcagtttctttgcatcatttctgtattcaatttttttaattatttcataaccctattgagtgttttttaactaaattaacatggctcgaatgaaccgcccagctcctgtggaagtcacatacaagaacatgagatttcttattacacacaatccaaccaatgcgaccttaaacaaatttatagaggaacttaagaagtatggagttaccacaatagtaagagtatgtgaagcaacttatgacactactcttgtggagaaagaaggtatccatgttcttgattggccttttgatgatggtgcaccaccatccaaccagattgttgatgactggttaagtcttgtgaaaattaagtttcgtgaagaacctggttgttgtattgctgttcattgcgttgcaggccttgggagaaagcggcgtggagcttttaacagcaagcaacttctgtatttggagaagtatcgtcctaaaatgcggctgcgtttcaaagattccaacggtcatagaaacaactgttgcattcaataaaattggggtgcctaatgctactggaagtggaacttgagatagggcctaatttgttatacatattagccaacatgttggcttagtaagtctaatgaagcttccataggagtattgaaaggcagttttaccaggcctcaagctagacagatttggcaacctctgtatttgggttacagtcaacctatttggatacttggcaaaagattcttgctgtcagcatataaaatgtgcttgtcatttgtatcaattgacctttccccaaatcatgcagtattgagttatgacttgttaaatctattcccatgccagaatcttatcaatacataagaaatttaggaagattaggtgccaaaatacccagcacaatacttgtatatttttagtaccatacagaagtaaaatcccaggaactatgaacactagaccttatgtggtttattccttcaatcatttcaaacattgaaagtagggcctacatggttatttgcctgctcactttatgtttacatctcccacattcataccaatatacgtcaggtttgcttaaccattgatttttttttttttttaccaagtcttacagtgattattttacgtgtttccatgtatctcactttgtgctgtattaaaaaaacctccattttgaaaatctacgttgtacagaagcacatgtctttaatgtcttcagacaaaaaagccttacattaatttaatgtttgcactctgaggtgcaacttaacagggagggcctgagaaaagaatgggagggggctattaattatttttagcaaaatgttgcctttgtcttgtgcaaacatgtagaatatgctctttaatttagtaaaatatttttttaaaaggtagagatgctttgttattgtaatcataaacttcctgaaattcttgtaatttttttcccatacttatcagaagtgtgtttaccaacttatttttgtttgaaagtgtgattttttttttccttcccaacctctcttgcaaaaaaagaaatgggtttctgctaatgaattgagcagacatctaatattttatatgccttttgagctgtgtaacttaatatttggatacttgacaatttgttttattatgtaattgataaaatggtgatgtgtattaatgttagttcaaccatatatttatactgtctggggatgtgtggttatagttctgtgggagaaataattttgtcagtgttcaccagcttgtaaaaacttagtgcgagagctgaaacatctaaataaataatgacatgcatttatcatcattgagattggtttgcttaaaattaacttattttgtagaagacaaaatgaattgcacttcacttaatgtgtgtcctcatctttttacaaataaatgaaggattataaatgatgtcagcattttagtaaacttttagacaaaatttgttagggtcattcatgaaaactttaatactaaaagcactttccattatatactttttaaaggtctagataattttgaaccaatttattattgtgtactgaggagaaataatgtatagtagaggacagccttggtttgtaaagctcagttccactagttcatggttttgtgcaacttctgagcctcagttttctcctttgcaaattaataattacatacctttatagattttgaaattaatttaaatattagtatttggtacatgaaggcttaatgttaagtttcctttaatgatccacaataatccctttgatcacgttaatctaaatctagatgtctttgtctaattttttttgaatagcagttataaatgtaaaggactcaaagtttaagtaaaaagtgatactccaccttgtgtttcaaagaatttagttccacctcttcataccagtttaacacttaatatatttcattggattttagacagggcaaaaggaagaacaggggcctctggaggcccttggttatttaaatcttggattatttgtgatagtaatcacaaatttttggctaatttttaacctgaggttttgttttttttttaaaggaaatgcagcctagtcttgagaacataattttatataatcaattactaaatgttaaactattaccacacagcccataaaacagcatttgcgtttattgagagagaggatgtgccatcatgattaatgaaaactatcttttgagtttgaaaagaaattaatttgcagtgtttggattgtatatatggtgctaaaaataaattaatttactttataaacctt

SEQ ID NO: 3387 - DNA, 4611 bp, Homo sapiens
  source 1..4611: mol_type = genomic DNA
cgtgtattggctccttcggctgcgggccggctcggctacgcgctctgctccgagccgctcactgcatggtagagtctggtgcccccgccgccgcctgcatcgccgccaccgccgctccgccacgaccaccgccgcctcctgccctgcagccaccgccaccgcctgtgtcgccgccgcctcgggaccggctgtatgattaggccacaatcttcaatgagtaaacatattcctcaattctgtggtgttcttggtcacacatttatggagtttctgaagggcagtggagattactgccaggcacagcacgacctctatgcagacaagtgaactgtagaaactgattactgctccaccaagaagcccccataagagtggttatcctggacacagaagtgttgaattgaaatccacagagcattttacaagagttctgacctggatggggtaaacctcagtgcacttcttttctgttggcctcagtattactggattgaagaattgctgcttcttgttaggaggttcatttcacttatcattacttacaacttcatactcaaagcactgagaatttcaagtggagtatattgaagtagacttcagtttctttgcatcatttctgtattcaatttttttaattatttcataaccctattgagtgttttttaactaaattaacatggctcgaatgaaccgcccagctcctgtggaagtcacatacaagaacatgagatttcttattacacacaatccaaccaatgcgaccttaaacaaatttatagaggaacttaagaagtatggagttaccacaatagtaagagtatgtgaagcaacttatgacactactcttgtggagaaagaaggtatccatgttcttgattggccttttgatgatggtgcaccaccatccaaccagattgttgatgactggttaagtcttgtgaaaattaagtttcgtgaagaacctggttgttgtattgctgttcattgcgttgcaggccttgggagagctccagtacttgttgccctagcattaattgaaggtggaatgaaatacgaagatgcagtacaattcataagacaaaagcggcgtggagcttttaacagcaagcaacttctgtatttggagaagtatcgtcctaaaatgcggctgcgtttcaaagattccaacggtcatagaaacaactgttgcattcaataaaattggggtgcctaatgctactggaagtggaacttgagatagggcctaatttgttatacatattagccaacatgttggcttagtaagtctaatgaagcttccataggagtattgaaaggcagttttaccaggcctcaagctagacagatttggcaacctctgtatttgggttacagtcaacctatttggatacttggcaaaagattcttgctgtcagcatataaaatgtgcttgtcatttgtatcaattgacctttccccaaatcatgcagtattgagttatgacttgttaaatctattcccatgccagaatcttatcaatacataagaaatttaggaagattaggtgccaaaatacccagcacaatacttgtatatttttagtaccatacagaagtaaaatcccaggaactatgaacactagaccttatgtggtttattccttcaatcatttcaaacattgaaagtagggcctacatggttatttgcctgctcactttatgtttacatctcccacattcataccaatatacgtcaggtttgcttaaccattgatttttttttttttttaccaagtcttacagtgattattttacgtgtttccatgtatctcactttgtgctgtattaaaaaaacctccattttgaaaatctacgttgtacagaagcacatgtctttaatgtcttcagacaaaaaagccttacattaatttaatgtttgcactctgaggtgcaacttaacagggagggcctgagaaaagaatgggagggggctattaattatttttagcaaaatgttgcctttgtcttgtgcaaacatgtagaatatgctctttaatttagtaaaatatttttttaaaaggtagagatgctttgttattgtaatcataaacttcctgaaattcttgtaatttttttcccatacttatcagaagtgtgtttaccaacttatttttgtttgaaagtgtgattttttttttccttcccaacctctcttgcaaaaaaagaaatgggtttctgctaatgaattgagcagacatctaatattttatatgccttttgagctgtgtaacttaatatttggatacttgacaatttgttttattatgtaattgataaaatggtgatgtgtattaatgttagttcaaccatatatttatactgtctggggatgtgtggttatagttctgtgggagaaataattttgtcagtgttcaccagcttgtaaaaacttagtgcgagagctgaaacatctaaataaataatgacatgcatttatcatcattgagattggtttgcttaaaattaacttattttgtagaagacaaaatgaattgcacttcacttaatgtgtgtcctcatctttttacaaataaatgaaggattataaatgatgtcagcattttagtaaacttttagacaaaatttgttagggtcattcatgaaaactttaatactaaaagcactttccattatatactttttaaaggtctagataattttgaaccaatttattattgtgtactgaggagaaataatgtatagtagaggacagccttggtttgtaaagctcagttccactagttcatggttttgtgcaacttctgagcctcagttttctcctttgcaaattaataattacatacctttatagattttgaaattaatttaaatattagtatttggtacatgaaggcttaatgttaagtttcctttaatgatccacaataatccctttgatcacgttaatctaaatctagatgtctttgtctaattttttttgaatagcagttataaatgtaaaggactcaaagtttaagtaaaaagtgatactccaccttgtgtttcaaagaatttagttccacctcttcataccagtttaacacttaatatatttcattggattttagacagggcaaaaggaagaacaggggcctctggaggcccttggttatttaaatcttggattatttgtgatagtaatcacaaatttttggctaatttttaacctgaggttttgttttttttttaaaggaaatgcagcctagtcttgagaacataattttatataatcaattactaaatgttaaactattaccacacagcccataaaacagcatttgcgtttattgagagagaggatgtgccatcatgattaatgaaaactatcttttgagtttgaaaagaaattaatttgcagtgtttggattgtatatatggtgctaaaaataaattaatttactttataaaccttatctgtacattatacgatgtgatgaaatttgctttttatccaaatattttgtatcttgtaaatatggctaattataggaatgcctataatacatcttagattccttatatctaataagagttcaaagagttatgagttgaagtcttgaatgcaggaaactatctgatagtgttctaaaatttggttacttgggtttggatacccttagtgggatgatgtaaatagaggctagctacctaggcttgtctatagcaaccataatgttgatgtaagtaatgcggttactgaatcataagaaaatgccatctctttttagttgaaggaaaactctggaagtaggtgccattggtcattctgcagtgcactgcaaccattgtttcccctagtgccctcttttccctagggcattgctctcctattcccacgccttaacacagctctatacctagaagcagccagcccaggcatgcagtcacatttaatcacatcccccttctagagtgcttcaaaatgatgtagtccctcaacttggctaaagaatctcaatctcttgaaatttatttttttaatgtcatattcatctggtaaatatctactgtttgccaggcatttaagaatatggcaaagaacataaaagatggtgtcaccagattttggtcaccaatgagtacccgacccgttgccatgattaagagagaatgctttctattggagtttcaggaaatataatttgagaatactttaaagggaagtggaagtataagtgaatgatatttttcttttacatgtaaacaatgaagttatttcaaagttaagttttaaacaaaatacatgaagtagtgtctgccatacatgttaatattctacattcttgcttccttaaattaatatgtttgtgtgtatatatgtgcctcacacctgaattgaaaattaaagactggtttaaaagtggtttaaaagtgacatttaatgtttctccattacgtttggggtaaccagcctaagtggaatcttggaaggaaagtaagggaaaaacttgtatttgccttcaatgaattaaaccagtgatatgtgttaacgtatgaatgaaaggattgatggtgattttataattatatatattgccgcagtaaccagttaataaattgatagctaccattt

SEQ ID NO: 3388 - DNA, 3529 bp, Homo sapiens
  source 1..3529: mol_type = genomic DNA
gtgatgcgtagttccggctgccggttgacatgaagaagcagcagcggctagggcggcggtagctgcaggggtcggggattgcagcgggcctcggggctaagagcgcgacgcggcctagagcggcagacggcgcagtgggccgagaaggaggcgcagcagccgccctggcccgtcatggagatggaaaaggagttcgagcagatcgacaagtccgggagctgggcggccatttaccaggatatccgacatgaagccagtgacttcccatgtagagtggccaagcttcctaagaacaaaaaccgaaataggtacagagacgtcagtccctttgaccatagtcggattaaactacatcaagaagataatgactatatcaacgctagtttgataaaaatggaagaagcccaaaggagttacattcttacccagggccctttgcctaacacatgcggtcacttttgggagatggtgtgggagcagaaaagcaggggtgtcgtcatgctcaacagagtgatggagaaaggttcgttaaaatgcgcacaatactggccacaaaaagaagaaaaagagatgatctttgaagacacaaatttgaaattaacattgatctctgaagatatcaagtcatattatacagtgcgacagctagaattggaaaaccttacaacccaagaaactcgagagatcttacatttccactataccacatggcctgactttggagtccctgaatcaccagcctcattcttgaactttcttttcaaagtccgagagtcagggtcactcagcccggagcacgggcccgttgtggtgcactgcagtgcaggcatcggcaggtctggaaccttctgtctggctgatacctgcctcttgctgatggacaagaggaaagacccttcttccgttgatatcaagaaagtgctgttagaaatgaggaagtttcggatggggctgatccagacagccgaccagctgcgcttctcctacctggctgtgatcgaaggtgccaaattcatcatgggggactcttccgtgcaggatcagtggaaggagctttcccacgaggacctggagcccccacccgagcatatccccccacctccccggccacccaaacgaatcctggagccacacaatgggaaatgcagggagttcttcccaaatcaccagtgggtgaaggaagagacccaggaggataaagactgccccatcaaggaagaaaaaggaagccccttaaatgccgcaccctacggcatcgaaagcatgagtcaagacactgaagttagaagtcgggtcgtggggggaagtcttcgaggtgcccaggctgcctccccagccaaaggggagccgtcactgcccgagaaggacgaggaccatgcactgagttactggaagcccttcctggtcaacatgtgcgtggctacggtcctcacggccggcgcttacctctgctacaggttcctgttcaacagcaacacatagcctgaccctcctccactccacctccacccactgtccgcctctgcccgcagagcccacgcccgactagcaggcatgccgcggtaggtaagggccgccggaccgcgtagagagccgggccccggacggacgttggttctgcactaaaacccatcttccccggatgtgtgtctcacccctcatccttttactttttgccccttccactttgagtaccaaatccacaagccattttttgaggagagtgaaagagagtaccatgctggcggcgcagagggaaggggcctacacccgtcttggggctcgccccacccagggctccctcctggagcatcccaggcgggcggcacgccaacagccccccccttgaatctgcagggagcaactctccactccatatttatttaaacaattttttccccaaaggcatccatagtgcactagcattttcttgaaccaataatgtattaaaattttttgatgtcagccttgcatcaagggctttatcaaaaagtacaataataaatcctcaggtagtactgggaatggaaggctttgccatgggcctgctgcgtcagaccagtactgggaaggaggacggttgtaagcagttgttatttagtgatattgtgggtaacgtgagaagatagaacaatgctataatatataatgaacacgtgggtatttaataagaaacatgatgtgagattactttgtcccgcttattctcctccctgttatctgctagatctagttctcaatcactgctcccccgtgtgtattagaatgcatgtaaggtcttcttgtgtcctgatgaaaaatatgtgcttgaaatgagaaactttgatctctgcttactaatgtgccccatgtccaagtccaacctgcctgtgcatgacctgatcattacatggctgtggttcctaagcctgttgctgaagtcattgtcgctcagcaatagggtgcagttttccaggaataggcatttgcctaattcctggcatgacactctagtgacttcctggtgaggcccagcctgtcctggtacagcagggtcttgctgtaactcagacattccaagggtatgggaagccatattcacacctcacgctctggacatgatttagggaagcagggacaccccccgccccccacctttgggatcagcctccgccattccaagtcaacactcttcttgagcagaccgtgatttggaagagaggcacctgctggaaaccacacttcttgaaacagcctgggtgacggtcctttaggcagcctgccgccgtctctgtcccggttcaccttgccgagagaggcgcgtctgccccaccctcaaaccctgtggggcctgatggtgctcacgactcttcctgcaaagggaactgaagacctccacattaagtggctttttaacatgaaaaacacggcagctgtagctcccgagctactctcttgccagcattttcacattttgcctttctcgtggtagaagccagtacagagaaattctgtggtgggaacattcgaggtgtcaccctgcagagctatggtgaggtgtggataaggcttaggtgccaggctgtaagcattctgagctgggcttgttgtttttaagtcctgtatatgtatgtagtagtttgggtgtgtatatatagtagcatttcaaaatggacgtactggtttaacctcctatccttggagagcagctggctctccaccttgttacacattatgttagagaggtagcgagctgctctgctatatgccttaagccaatatttactcatcaggtcattattttttacaatggccatggaataaaccatttttacaaaaataaaaacaaaaaaagcaaggtgttttggtataataccttttcaggtgtgtgtggatacgtggctgcatgaccgggtgggtgggggggagtgtctcagggtcttctgtgacctcacagaactgtcagactgtacagttttccaacttgccatattcatgatgggtttgcattttagctgcaacaataaaatttttttctaaagaacatgaa

SEQ ID NO: 3389 - DNA, 1632 bp, Homo sapiens
  source 1..1632: mol_type = genomic DNA
atgaagaagcagcagcggctagggcggcggtagctgcaggggtcggggattgcagcgggcctcggggctaagagcgcgacgcggcctagagcggcagacggcgcagtgggccgagaaggaggcgcagcagccgccctggcccgtcatggagatggaaaaggagttcgagcagatcgacaagtccgggagctgggcggccatttaccagttgaccatagtcggattaaactacatcaagaagataatgactatatcaacgctagtttgataaaaatggaagaagcccaaaggagttacattcttacccagggccctttgcctaacacatgcggtcacttttgggagatggtgtgggagcagaaaagcaggggtgtcgtcatgctcaacagagtgatggagaaaggttcgttaaaatgcgcacaatactggccacaaaaagaagaaaaagagatgatctttgaagacacaaatttgaaattaacattgatctctgaagatatcaagtcatattatacagtgcgacagctagaattggaaaaccttacaacccaagaaactcgagagatcttacatttccactataccacatggcctgactttggagtccctgaatcaccagcctcattcttgaactttcttttcaaagtccgagagtcagggtcactcagcccggagcacgggcccgttgtggtgcactgcagtgcaggcatcggcaggtctggaaccttctgtctggctgatacctgcctcttgctgatggacaagaggaaagacccttcttccgttgatatcaagaaagtgctgttagaaatgaggaagtttcggatggggctgatccagacagccgaccagctgcgcttctcctacctggctgtgatcgaaggtgccaaattcatcatgggggactcttccgtgcaggatcagtggaaggagctttcccacgaggacctggagcccccacccgagcatatccccccacctccccggccacccaaacgaatcctggagccacacaatgggaaatgcagggagttcttcccaaatcaccagtgggtgaaggaagagacccaggaggataaagactgccccatcaaggaagaaaaaggaagccccttaaatgccgcaccctacggcatcgaaagcatgagtcaagacactgaagttagaagtcgggtcgtggggggaagtcttcgaggtgcccaggctgcctccccagccaaaggggagccgtcactgcccgagaaggacgaggaccatgcactgagttactggaagcccttcctggtcaacatgtgcgtggctacggtcctcacggccggcgcttacctctgctacaggttcctgttcaacagcaacacatagcctgaccctcctccactccacctccacccactgtccgcctctgcccgcagagcccacgcccgactagcaggcatgccgcggtaggtaagggccgccggaccgcgtagagagccgggccccggacggacgttggttctgcactaaaacccatcttccccggatgtgtgtctcacccctcatccttttactttttgccccttccactttgagtaccaaatccacaagccattttttgaggagagtgaaagagagtaccatgctggcggcgca

SEQ ID NO: 3390 - DNA, 6101 bp, Homo sapiens
  source 1..6101: mol_type = genomic DNA
ggaggagcgagccgggccggggggcagctgcacagtctccgggatccccaggcctggaggggggtctgtgcgcggccggctggctctgccccgcgtccggtcccgagcgggcctccctcgggccagcccgatgtgaccgagcccagcggagcctgagcaaggagcgggtccgtcgcggagccggagggcgggaggaacatgacatcgcggagatggtttcacccaaatatcactggtgtggaggcagaaaacctactgttgacaagaggagttgatggcagttttttggcaaggcctagtaaaagtaaccctggagacttcacactttccgttagaagaaatggagctgtcacccacatcaagattcagaacactggtgattactatgacctgtatggaggggagaaatttgccactttggctgagttggtccagtattacatggaacatcacgggcaattaaaagagaagaatggagatgtcattgagcttaaatatcctctgaactgtgcagatcctacctctgaaaggtggtttcatggacatctctctgggaaagaagcagagaaattattaactgaaaaaggaaaacatggtagttttcttgtacgagagagccagagccaccctggagattttgttctttctgtgcgcactggtgatgacaaaggggagagcaatgacggcaagtctaaagtgacccatgttatgattcgctgtcaggaactgaaatacgacgttggtggaggagaacggtttgattctttgacagatcttgtggaacattataagaagaatcctatggtggaaacattgggtacagtactacaactcaagcagccccttaacacgactcgtataaatgctgctgaaatagaaagcagagttcgagaactaagcaaattagctgagaccacagataaagtcaaacaaggcttttgggaagaatttgagacactacaacaacaggagtgcaaacttctctacagccgaaaagagggtcaaaggcaagaaaacaaaaacaaaaatagatataaaaacatcctgccctttgatcataccagggttgtcctacacgatggtgatcccaatgagcctgtttcagattacatcaatgcaaatatcatcatgcctgaatttgaaaccaagtgcaacaattcaaagcccaaaaagagttacattgccacacaaggctgcctgcaaaacacggtgaatgacttttggcggatggtgttccaagaaaactcccgagtgattgtcatgacaacgaaagaagtggagagaggaaagagtaaatgtgtcaaatactggcctgatgagtatgctctaaaagaatatggcgtcatgcgtgttaggaacgtcaaagaaagcgccgctcatgactatacgctaagagaacttaaactttcaaaggttggacaagggaatacggagagaacggtctggcaataccactttcggacctggccggaccacggcgtgcccagcgaccctgggggcgtgctggacttcctggaggaggtgcaccataagcaggagagcatcatggatgcagggccggtcgtggtgcactgcagtgctggaattggccggacagggacgttcattgtgattgatattcttattgacatcatcagagagaaaggtgttgactgcgatattgacgttcccaaaaccatccagatggtgcggtctcagaggtcagggatggtccagacagaagcacagtaccgatttatctatatggcggtccagcattatattgaaacactacagcgcaggattgaagaagagcagaaaagcaagaggaaagggcacgaatatacaaatattaagtattctctagcggaccagacgagtggagatcagagccctctcccgccttgtactccaacgccaccctgtgcagaaatgagagaagacagtgctagagtctatgaaaacgtgggcctgatgcaacagcagaaaagtttcagatgagaaaacctgccaaaacttcagcacagaaatagatgtggactttcaccctctccctaaaaagatcaagaacagacgcaagaaagtttatgtgaagacagaatttggatttggaaggcttgcaatgtggttgactaccttttgataagcaaaatttgaaaccatttaaagaccactgtattttaactcaacaatacctgcttcccaattactcatttcctcagataagaagaaatcatctctacaatgtagacaacattatattttatagaatttgtttgaaattgaggaagcagttaaattgtgcgctgtattttgcagattatggggattcaaattctagtaataggcttttttatttttatttttatacccttaaccagtttaattttttttttcctcattgttggggatgatgagaagaaatgatttgggaaaattaagtaacaacgacctagaaaagtgagaacaatctcatttaccatcatgtatccagtagtggataattcattttgatggcttctatttttggccaaatgagaattaagccagtgcctgagactgtcagaagttgacctttgcactggcattaaagagtcatagaaaaagaatcatggatatttatgaattaaggtaagaggtgtggcttttttttttttcttttttccagccgttgaccaattatagttcggctgttgactgagaagtttgtggtgggaaaacgtttgccatattttctttgcatttgaataattgtcttgtacttagaaaaaaggcgtctatgaatgaccagtgtttttggtcgccaaatgttgctgacaaacttatcccaaaactttagtggcttaaaaaaacctgcccccaactgttagtcaatctgagctgggctcagctgggctgttcttctgccagcctgcaggtggccactcatgtggtcagcaggtcggcggagagactgggatggctgggcttctctctctgcctgcagtcctgagtctctccttcttcgtgtagtctctttcagtggcctggctggcagggtagctagacctctcacatgcagctcagagctcccaagagctcaaaagcagaaatggccaggccttctgaaaacttaagtccagaattgtcacagtgtcccttctacttccctctattgatgatgatgatgatgatgatgatgatgatgatgatgatgatgatggttttttctaatcagaagaaagctggggtatgccctctacttactaaacaagtcacaagcccagctcagattcaagaaaagggtgtgaagtagaggtgcagttaagtggggggccactagtctaacagacggtcacaaccagtgccatggaaaaccaaggatattagcaaaagcagaagttgctagtgaccttgggaagccgaagctgcttacagtagctgggacaagctgaaagtcagactaagaaataaagagagggccttcaagaagcttcctgaatgatttctgctagccctgagcctatttttggaaccagcacttggggaaactgatcttgtgaggatggatgtgtttagggacacagggcttttgagagcagcaccaccccactggggcatccccagacttgggaaacgtgactctttcttaatgccactgggttttagtcaggccacagtgagaaggaacagccctaacaggcctccagccaggttgaatgagctcatttttgttgtagccaaccagtaagatttgctaatgttctacattaagtgccttctccaaagacatccctctttgcctcatatgttgaatcatccagtgcggatatttcaatgaaaatatcattggttgacttttgtgatggtaataatgctatggcatctttgccatgaagttgtggcctccttggattcttctgactttggcttctgaaaggaaggcctagatccagccctggtggtagttcctttctgaggtctctcagtcccttgagactttggggtagtttggctgccattctcactgacaaaatgtatatcagcccccacctccaccccccaatattccttgaactttgaattgcttcagaacacaggtgtggcctgaaggtattcccttattagggaagtgtcactgctgtcttctagtcaaacttgtaaagaaaaagattccagttcagtatttgcagcaagaagcttgaatgctgttctttttatcgcattgttacatcgactcattctccattttgctttggttttgtcttgacttgacttgactttgggggtaaagtctttcaccagcacacaagagtttgattgtacaaatatatcttctgcattaacatctctgcctgttgcttaagatcagttgcttttatactcagaatggaaatacctgatcttggctagttttgttataagatattgatttcatttagatttccctccacgaggtcagcaaactatcatgttcttatgtaaacttaggccaaggccagagttatcatagtccctaggttgctacggcttatcatgtgcttggtaaaaggtgatcgcaggttctcagacgagtttactttacatgagatggaatcaggcagagaggctgggatgatggagaaagctcgaggtgaagttttaaaaaaaaagttgtggaaaggaaagttccaaagaggtggtttctgaggaagtcagagcgcccagggccagagcagtcagtaatgggtgaatgaggttgtttggaaagtcggtgtgacagacacatggatgccatctacttctaggttgctggtgggtattaaatatgcacaatattccatagctcactgaggattttaaaattataagcataggattttatattttggggtgaaagaattatctggcacattaggtattggagtttaaaaaaaaagccaaatttcacagtcttaataactttttttaaaaaaaactaaaaggcgcttcatgtccagtgtgtggcccttctgaaacttatggtcatctctcccactgaaaccaaggtcttttcaaatgtggctaaatggggatgaggagacacgggtaggactttcttggtgtgtgtgcattctttaaagagccaagttgcttcggggaaacagccaggaaaatggtcaagattatttttagaggttattttattggggattttaagaactaataacatcttgagttatttttaattcagggggatgtggaaaggtttgcaattgtcaagtgttttgttgtagcttagtatccataagggaaacttagactatagacataactacaaagccagtgcagcttttgttttctgtatgttgttgggggatcaactttcacacatagcaagcacatggcctccctgatgtcaggatgcctttgttaggatctgtatttgcccttaattttgttgaaatcttttttccttcttcctcttgaaaagttccaaaatatagtttattgtatctttcatcactaaaaatttgttcctttttcactatgggcagttcacacaaggcaaaaactattgaacagttggttttagtgtgttgtataactttgctgtatatcaaactaattttgacaagttttcatcctaagcctcaaatcatgtaattaataatttgcctgtttatttatgacctaattgtgattcttttattaataaaagctaatgggaaaaggatccctgattaagctgatgactagacctacaattaattttcctgcagtatatgaagtattgtaccagagtattaaaagatatgtaatattttattgataaatctatcctttaaaaggaatacgttttaggatgtcatcattttgatgtgaatcatgtaaatgttgataatatgctgtttattatacatttagtgtttcaagagattcacttaattgcctttttgcccacgtatattatgtagtctatttgcaactgttcttaaaaaaatgacattaaaagaatagtttatgtagagaaacattagtggatgttaattgtctccccacctatatttatgggtgttagcgcaactgctttgctagttgcaaagctgtattatcagagtaaaagtgtatttgtaaactgtatgggaactaaaaattaggaataaaaccattttcttatatga

SEQ ID NO: 3391 - DNA, 801 bp, Homo sapiens
  source 1..801: mol_type = genomic DNA
ccccaggcctggaggggggtctgtgcgcggccggctggctctgccccgcgtccggtcccgagcgggcctccctcgggccagcccgatgtgaccgagcccagcggagcctgagcaaggagcgggtccgtcgcggagccggagggcgggaggaacatgacatcgcggagatggtttcacccaaatatcactggtgtggaggcagaaaacctactgttgacaagaggagttgatggcagttttttggcaaggcctagtaaaagtaaccctggagacttcacactttccgttagaagaaatggagctgtcacccacatcaagattcagaacactggtgattactatgacctgtatggaggggagaaatttgccactttggctgagttggtccagtattacatggaacatcacgggcaattaaaagagaagaatggagatgtcattgagcttaaatatcctctgaactgtgcagatcctacctctgaaaggtggtttcatggacatctctctgggaaagaagcagagaaattattaactgaaaaaggaaaacatggtagttttcttgtacgagagagccagagccaccctggagattttgttctttctgtgcgcactggtgatgacaaaggggagagcaatgacggcaagtctaaagtgacccatgttatgattcgctgtcaggaactgaaatacgacgttggtggaggagaacggtttgattctttgacagatcttgtggaacattataagaagaatcctatggtggaaacattgggtacagtactacaactcaagcagccattg

SEQ ID NO: 3392 - DNA, 1876 bp, Homo sapiens
  source 1..1876: mol_type = genomic DNA
gcggaggaggagcgagccgggccggggggcagctgcacagtctccgggatccccaggcctggaggggggtctgtgcgcggccggctggctctgccccgcgtccggtcccgagcgggcctccctcgggccagcccgatgtgaccgagcccagcggagcctgagcaaggagcgggtccgtcgcggagccggagggcgggaggaacatgacatcgcggagatggtttcacccaaatatcactggtgtggaggcagaaaacctactgttgacaagaggagttgatggcagttttttggcaaggcctagtaaaagtaaccctggagacttcacactttccgttagaagaaatggagctgtcacccacatcaagattcagaacactggtgattactatgacctgtatggaggggagaaatttgccactttggctgagttggtccagtattacatggaacatcacgggcaattaaaagagaagaatggagatgtcattgagcttaaatatcctctgaactgtgcagatcctacctctgaaaggtggtttcatggacatctctctgggaaagaagcagagaaattattaactgaaaaaggaaaacatggtagttttcttgtacgagagagccagagccaccctggagattttgttctttctgtgcgcactggtgatgacaaaggggagagcaatgacggcaagtctaaagtgacccatgttatgattcgctgtcaggaactgaaatacgacgttggtggaggagaacggtttgattctttgacagatcttgtggaacattataagaagaatcctatggtggaaacattgggtacagtactacaactcaagcagccccttaacacgactcgtataaatgctgctgaaatagaaagcagagttcgagaactaagcaaattagctgagaccacagataaagtcaaacaaggcttttgggaagaatttgagacactacaacaacaggagtgcaaacttctctacagccgaaaagagggtcaaaggcaagaaaacaaaaacaaaaatagatataaaaacatcctgccctttgatcataccagggttgtcctacacgatggtgatcccaatgagcctgtttcagattacatcaatgcaaatatcatcatgcctgaatttgaaaccaagtgcaacaattcaaagcccaaaaagagttacattgccacacaaggctgcctgcaaaacacggtgaatgacttttggcggatggtgttccaagaaaactcccgagtgattgtcatgacaacgaaagaagtggagagaggaaagagtaaatgtgtcaaatactggcctgatgagtatgctctaaaagaatatggcgtcatgcgtgttaggaacgtcaaagaaagcgccgctcatgactatacgctaagagaacttaaactttcaaaggttggacaagggaatacggagagaacggtctggcaataccactttcggacctggccggaccacggcgtgcccagcgaccctgggggcgtgctggacttcctggaggaggtgcaccataagcaggagagcatcatggatgcagggccggtcgtggtgcactgcaggtgacagctcctgctgcccctctaggccacagcctgtccctgtctcctagcgcccagggcttgcttttacctacccactcctagctctttaactgtaggaagaatttaatatctgtttgaggcatagagcaactgcattgagggacattttgatcccaaggcatatttctcctagaccctacagcactgccattggccatggccatggcaacatgctcagttaaaacagcaaagactaagtcagcattatctctgagtccaccagaagttgtgcattaaacaacttcatcctgg

SEQ ID NO: 3393 - DNA, 5444 bp, Homo sapiens
  source 1..5444: mol_type = genomic DNA
ggagaagttagtaaaaccgaatctgacatcatcacctagcagttcatgcagctagcaagtggtttgttcttagggtaacagaggaggaaattgttcctcgtctgataagacaacagtggagaaaggacgcatgctgtttcttagggacacggctgacttccagatatgaccatgtatttgtggcttaaactcttggcatttggctttgcctttctggacacagaagtatttgtgacagggcaaagcccaacaccttcccccactggccatctgcaagctgaggagcaaggaagccaatccaagtcaccaaacctcaaaagtagggaagctgacagttcagccttcagttggtggccaaaggcccgagagcccctcacaaaccactggagattgactacagcaaagatgcccagtgttccactttcaagtgaccccttacctactcacaccactgcattctcacccgcaagcacctttgaaagagaaaatgacttctcagagaccacaacttctcttagtccagacaatacttccacccaagtatccccggactctttggataatgctagtgcttttaataccacaggtgtttcatcagtacagacgcctcaccttcccacgcacgcagactcgcagacgccctctgctggaactgacacgcagacattcagcggctccgccgccaatgcaaaactcaaccctaccccaggcagcaatgctatctcagatgtcccaggagagaggagtacagccagcacctttcctacagacccagtttccccattgacaaccaccctcagccttgcacaccacagctctgctgccttacctgcacgcacctccaacaccaccatcacagcgaacacctcagatgcctaccttaatgcctctgaaacaaccactctgagcccttctggaagcgctgtcatttcaaccacaacaatagctactactccatctaagccaacatgtgatgaaaaatatgcaaacatcactgtggattacttatataacaaggaaactaaattatttacagcaaagctaaatgttaatgagaatgtggaatgtggaaacaatacttgcacaaacaatgaggtgcataaccttacagaatgtaaaaatgcgtctgtttccatatctcataattcatgtactgctcctgataagacattaatattagatgtgccaccaggggttgaaaagtttcagttacatgattgtacacaagttgaaaaagcagatactactatttgtttaaaatggaaaaatattgaaacctttacttgtgatacacagaatattacctacagatttcagtgtggtaatatgatatttgataataaagaaattaaattagaaaaccttgaacccgaacatgagtataagtgtgactcagaaatactctataataaccacaagtttactaacgcaagtaaaattattaaaacagattttgggagtccaggagagcctcagattattttttgtagaagtgaagctgcacatcaaggagtaattacctggaatccccctcaaagatcatttcataattttaccctctgttatataaaagagacagaaaaagattgcctcaatctggataaaaacctgatcaaatatgatttgcaaaatttaaaaccttatacgaaatatgttttatcattacatgcctacatcattgcaaaagtgcaacgtaatggaagtgctgcaatgtgtcatttcacaactaaaagtgctcctccaagccaggtctggaacatgactgtctccatgacatcagataatagtatgcatgtcaagtgtaggcctcccagggaccgtaatggcccccatgaacgttaccatttggaagttgaagctggaaatactctggttagaaatgagtcgcataagaattgcgatttccgtgtaaaagatcttcaatattcaacagactacacttttaaggcctattttcacaatggagactatcctggagaaccctttattttacatcattcaacatcttataattctaaggcactgatagcatttctggcatttctgattattgtgacatcaatagccctgcttgttgttctctacaaaatctatgatctacataagaaaagatcctgcaatttagatgaacagcaggagcttgttgaaagggatgatgaaaaacaactgatgaatgtggagccaatccatgcagatattttgttggaaacttataagaggaagattgctgatgaaggaagactttttctggctgaatttcagagcatcccgcgggtgttcagcaagtttcctataaaggaagctcgaaagccctttaaccagaataaaaaccgttatgttgacattcttccttatgattataaccgtgttgaactctctgagataaacggagatgcagggtcaaactacataaatgccagctatattgatggtttcaaagaacccaggaaatacattgctgcacaaggtcccagggatgaaactgttgatgatttctggaggatgatttgggaacagaaagccacagttattgtcatggtcactcgatgtgaagaaggaaacaggaacaagtgtgcagaatactggccgtcaatggaagagggcactcgggcttttggagatgttgttgtaaagatcaaccagcacaaaagatgtccagattacatcattcagaaattgaacattgtaaataaaaaagaaaaagcaactggaagagaggtgactcacattcagttcaccagctggccagaccacggggtgcctgaggatcctcacttgctcctcaaactgagaaggagagtgaatgccttcagcaatttcttcagtggtcccattgtggtgcactgcagtgctggtgttgggcgcacaggaacctatatcggaattgatgccatgctagaaggcctggaagccgagaacaaagtggatgtttatggttatgttgtcaagctaaggcgacagagatgcctgatggttcaagtagaggcccagtacatcttgatccatcaggctttggtggaatacaatcagtttggagaaacagaagtgaatttgtctgaattacatccatatctacataacatgaagaaaagggatccacccagtgagccgtctccactagaggctgaattccagagacttccttcatataggagctggaggacacagcacattggaaatcaagaagaaaataaaagtaaaaacaggaattctaatgtcatcccatatgactataacagagtgccacttaaacatgagctggaaatgagtaaagagagtgagcatgattcagatgaatcctctgatgatgacagtgattcagaggaaccaagcaaatacatcaatgcatcttttataatgagctactggaaacctgaagtgatgattgctgctcagggaccactgaaggagaccattggtgacttttggcagatgatcttccaaagaaaagtcaaagttattgttatgctgacagaactgaaacatggagaccaggaaatctgtgctcagtactggggagaaggaaagcaaacatatggagatattgaagttgacctgaaagacacagacaaatcttcaacttatacccttcgtgtctttgaactgagacattccaagaggaaagactctcgaactgtgtaccagtaccaatatacaaactggagtgtggagcagcttcctgcagaacccaaggaattaatctctatgattcaggtcgtcaaacaaaaacttccccagaagaattcctctgaagggaacaagcatcacaagagtacacctctactcattcactgcagggatggatctcagcaaacgggaatattttgtgctttgttaaatctcttagaaagtgcggaaacagaagaggtagtggatatttttcaagtggtaaaagctctacgcaaagctaggccaggcatggtttccacattcgagcaatatcaattcctatatgacgtcattgccagcacctaccctgctcagaatggacaagtaaagaaaaacaaccatcaagaagataaaattgaatttgataatgaagtggacaaagtaaagcaggatgctaattgtgttaatccacttggtgccccagaaaagctccctgaagcaaaggaacaggctgaaggttctgaacccacgagtggcactgaggggccagaacattctgtcaatggtcctgcaagtccagctttaaatcaaggttcataggaaaagacataaatgaggaaactccaaacctcctgttagctgttatttctatttttgtagaagtaggaagtgaaaataggtatacagtggattaattaaatgcagcgaaccaatatttgtagaagggttatattttactactgtggaaaaatatttaagatagttttgccagaacagtttgtacagacgtatgcttattttaaaattttatctcttattcagtaaaaaacaacttctttgtaatcgttatgtgtgtatatgtatgtgtgtatgggtgtgtgtttgtgtgagagacagagaaagagagagaattctttcaagtgaatctaaaagcttttgcttttcctttgtttttatgaagaaaaaatacattttatattagaagtgttaacttagcttgaaggatctgtttttaaaaatcataaactgtgtgcagactcaataaaatcatgtacatttctgaaatgacctcaagatgtcctccttgttctactcatatatatctatcttatatagtttactattttacttctagagatagtacataaaggtggtatgtgtgtgtatgctactacaaaaaagttgttaactaaattaacattgggaaatcttatattccatatattagcatttagtccaatgtctttttaagcttatttaattaaaaaatttccagtgagcttatcatgctgtctttacatggggttttcaattttgcatgctcgattattccctgtacaatatttaaaatttattgcttgatacttttgacaacaaattaggttttgtacaattgaacttaaataaatgtcattaaaataaataaatgcaatatgtattaatattcattgtataaaaatagaagaatacaaacatatttgttaaatatttacatatgaaatttaatatagctatttttatggaatttttcattgatatgaaaaatatgatattgcatatgcatagttcccatgttaaatcccattcataactttcattaaagcatttactttgaatttctccaatgcttagaatgtttttaccaggaatggatgtcgctaatcataataaaattcaaccattatttttttcttgtttataatacattgtgttatatgttcaaatatgaaatgtgtatgcacctattgaaatatgtttaatgcatttattaacatttgcaggacacttttacaggccccaattatccaatagtctaataattgtttaagatctag

SEQ ID NO: 3394 - DNA, 4626 bp, Homo sapiens
  source 1..4626: mol_type = genomic DNA
agaggaggaaattgttcctcgtctgataagacaacagtggagaaaggacgcatgctgtttcttagggacacggctgacttccagatatgaccatgtatttgtggcttaaactcttggcatttggctttgcctttctggacacagaagtatttgtgacagggcaaagcccaacaccttcccccactgatgcctaccttaatgcctctgaaacaaccactctgagcccttctggaagcgctgtcatttcaaccacaacaatagctactactccatctaagccaacatgtgatgaaaaatatgcaaacatcactgtggattacttatataacaaggaaactaaattatttacagcaaagctaaatgttaatgagaatgtggaatgtggaaacaatacttgcacaaacaatgaggtgcataaccttacagaatgtaaaaatgcgtctgtttccatatctcataattcatgtactgctcctgataagacattaatattagatgtgccaccaggggttgaaaagtttcagttacatgattgtacacaagttgaaaaagcagatactactatttgtttaaaatggaaaaatattgaaacctttacttgtgatacacagaatattacctacagatttcagtgtggtaatatgatatttgataataaagaaattaaattagaaaaccttgaacccgaacatgagtataagtgtgactcagaaatactctataataaccacaagtttactaacgcaagtaaaattattaaaacagattttgggagtccaggagagcctcagattattttttgtagaagtgaagctgcacatcaaggagtaattacctggaatccccctcaaagatcatttcataattttaccctctgttatataaaagagacagaaaaagattgcctcaatctggataaaaacctgatcaaatatgatttgcaaaatttaaaaccttatacgaaatatgttttatcattacatgcctacatcattgcaaaagtgcaacgtaatggaagtgctgcaatgtgtcatttcacaactaaaagtgctcctccaagccaggtctggaacatgactgtctccatgacatcagataatagtatgcatgtcaagtgtaggcctcccagggaccgtaatggcccccatgaacgttaccatttggaagttgaagctggaaatactctggttagaaatgagtcgcataagaattgcgatttccgtgtaaaagatcttcaatattcaacagactacacttttaaggcctattttcacaatggagactatcctggagaaccctttattttacatcattcaacatcttataattctaaggcactgatagcatttctggcatttctgattattgtgacatcaatagccctgcttgttgttctctacaaaatctatgatctacataagaaaagatcctgcaatttagatgaacagcaggagcttgttgaaagggatgatgaaaaacaactgatgaatgtggagccaatccatgcagatattttgttggaaacttataagaggaagattgctgatgaaggaagactttttctggctgaatttcagagcatcccgcgggtgttcagcaagtttcctataaaggaagctcgaaagccctttaaccagaataaaaaccgttatgttgacattcttccttatgattataaccgtgttgaactctctgagataaacggagatgcagggtcaaactacataaatgccagctatattgatggtttcaaagaacccaggaaatacattgctgcacaaggtcccagggatgaaactgttgatgatttctggaggatgatttgggaacagaaagccacagttattgtcatggtcactcgatgtgaagaaggaaacaggaacaagtgtgcagaatactggccgtcaatggaagagggcactcgggcttttggagatgttgttgtaaagatcaaccagcacaaaagatgtccagattacatcattcagaaattgaacattgtaaataaaaaagaaaaagcaactggaagagaggtgactcacattcagttcaccagctggccagaccacggggtgcctgaggatcctcacttgctcctcaaactgagaaggagagtgaatgccttcagcaatttcttcagtggtcccattgtggtgcactgcagtgctggtgttgggcgcacaggaacctatatcggaattgatgccatgctagaaggcctggaagccgagaacaaagtggatgtttatggttatgttgtcaagctaaggcgacagagatgcctgatggttcaagtagaggcccagtacatcttgatccatcaggctttggtggaatacaatcagtttggagaaacagaagtgaatttgtctgaattacatccatatctacataacatgaagaaaagggatccacccagtgagccgtctccactagaggctgaattccagagacttccttcatataggagctggaggacacagcacattggaaatcaagaagaaaataaaagtaaaaacaggaattctaatgtcatcccatatgactataacagagtgccacttaaacatgagctggaaatgagtaaagagagtgagcatgattcagatgaatcctctgatgatgacagtgattcagaggaaccaagcaaatacatcaatgcatcttttataatgagctactggaaacctgaagtgatgattgctgctcagggaccactgaaggagaccattggtgacttttggcagatgatcttccaaagaaaagtcaaagttattgttatgctgacagaactgaaacatggagaccaggaaatctgtgctcagtactggggagaaggaaagcaaacatatggagatattgaagttgacctgaaagacacagacaaatcttcaacttatacccttcgtgtctttgaactgagacattccaagaggaaagactctcgaactgtgtaccagtaccaatatacaaactggagtgtggagcagcttcctgcagaacccaaggaattaatctctatgattcaggtcgtcaaacaaaaacttccccagaagaattcctctgaagggaacaagcatcacaagagtacacctctactcattcactgcagggatggatctcagcaaacgggaatattttgtgctttgttaaatctcttagaaagtgcggaaacagaagaggtagtggatatttttcaagtggtaaaagctctacgcaaagctaggccaggcatggtttccacattcgagcaatatcaattcctatatgacgtcattgccagcacctaccctgctcagaatggacaagtaaagaaaaacaaccatcaagaagataaaattgaatttgataatgaagtggacaaagtaaagcaggatgctaattgtgttaatccacttggtgccccagaaaagctccctgaagcaaaggaacaggctgaaggttctgaacccacgagtggcactgaggggccagaacattctgtcaatggtcctgcaagtccagctttaaatcaaggttcataggaaaagacataaatgaggaaactccaaacctcctgttagctgttatttctatttttgtagaagtaggaagtgaaaataggtatacagtggattaattaaatgcagcgaaccaatatttgtagaagggttatattttactactgtggaaaaatatttaagatagttttgccagaacagtttgtacagacgtatgcttattttaaaattttatctcttattcagtaaaaaacaacttctttgtaatcgttatgtgtgtatatgtatgtgtgtatgggtgtgtgtttgtgtgagagacagagaaagagagagaattctttcaagtgaatctaaaagcttttgcttttcctttgtttttatgaagaaaaaatacattttatattagaagtgttaacttagcttgaaggatctgtttttaaaaatcataaactgtgtgcagactcaataaaatcatgtacatttctgaaatgacctcaagatgtcctccttgttctactcatatatatctatcttatatagtttactattttacttctagagatagtacataaaggtggtatgtgtgtgtatgctactacaaaaaagttgttaactaaattaacattgggaaatcttatattccatatattagcatttagtccaatgtctttttaagcttatttaattaaaaaatttccagtgagcttatcatgctgtctttacatggggttttcaattttgcatgctcgattattccctgtacaatatttaaaatttattgcttgatacttttgacaacaaattaggttttgtacaattgaacttaaataaatgtcattaaaataaataaatgcaatatgtattaatattcattgtataaaaatagaagaatacaaacatatttgttaaatatttacatatgaaatttaatatagctatttttatggaatttttcattgatatgaaaaatatgatattgcatatgcatagttcccatgttaaatcccattcataactttcattaaagcatttactttgaatttctccaatgcttagaatgtttttaccaggaatggatgtcgctaatcataataaaattcaaccattatttttttcttgtttataa

SEQ ID NO: 3395 - DNA, 5177 bp, Homo sapiens
  source 1..5177: mol_type = genomic DNA
ggagaagttagtaaaaccgaatctgacatcatcacctagcagttcatgcagctagcaagtggtttgttcttagggtaacagaggaggaaattgttcctcgtctgataagacaacagtggagaaaggacgcatgctgtttcttagggacacggctgacttccagatatgaccatgtatttgtggcttaaactcttggcatttggctttgcctttctggacacagaagtatttgtgacagggcaaagcccaacaccttcccccactggattgactacagcaaagatgcccagtgttccactttcaagtgaccccttacctactcacaccactgcattctcacccgcaagcacctttgaaagagaaaatgacttctcagagaccacaacttctcttagtccagacaatacttccacccaagtatccccggactctttggataatgctagtgcttttaataccacaggtgtttcatcagtacagacgcctcaccttcccacgcacgcagactcgcagacgccctctgctggaactgacacgcagacattcagcggctccgccgccaatgcaaaactcaaccctaccccaggcagcaatgctatctcagatgcctaccttaatgcctctgaaacaaccactctgagcccttctggaagcgctgtcatttcaaccacaacaatagctactactccatctaagccaacatgtgatgaaaaatatgcaaacatcactgtggattacttatataacaaggaaactaaattatttacagcaaagctaaatgttaatgagaatgtggaatgtggaaacaatacttgcacaaacaatgaggtgcataaccttacagaatgtaaaaatgcgtctgtttccatatctcataattcatgtactgctcctgataagacattaatattagatgtgccaccaggggttgaaaagtttcagttacatgattgtacacaagttgaaaaagcagatactactatttgtttaaaatggaaaaatattgaaacctttacttgtgatacacagaatattacctacagatttcagtgtggtaatatgatatttgataataaagaaattaaattagaaaaccttgaacccgaacatgagtataagtgtgactcagaaatactctataataaccacaagtttactaacgcaagtaaaattattaaaacagattttgggagtccaggagagcctcagattattttttgtagaagtgaagctgcacatcaaggagtaattacctggaatccccctcaaagatcatttcataattttaccctctgttatataaaagagacagaaaaagattgcctcaatctggataaaaacctgatcaaatatgatttgcaaaatttaaaaccttatacgaaatatgttttatcattacatgcctacatcattgcaaaagtgcaacgtaatggaagtgctgcaatgtgtcatttcacaactaaaagtgctcctccaagccaggtctggaacatgactgtctccatgacatcagataatagtatgcatgtcaagtgtaggcctcccagggaccgtaatggcccccatgaacgttaccatttggaagttgaagctggaaatactctggttagaaatgagtcgcataagaattgcgatttccgtgtaaaagatcttcaatattcaacagactacacttttaaggcctattttcacaatggagactatcctggagaaccctttattttacatcattcaacatcttataattctaaggcactgatagcatttctggcatttctgattattgtgacatcaatagccctgcttgttgttctctacaaaatctatgatctacataagaaaagatcctgcaatttagatgaacagcaggagcttgttgaaagggatgatgaaaaacaactgatgaatgtggagccaatccatgcagatattttgttggaaacttataagaggaagattgctgatgaaggaagactttttctggctgaatttcagagcatcccgcgggtgttcagcaagtttcctataaaggaagctcgaaagccctttaaccagaataaaaaccgttatgttgacattcttccttatgattataaccgtgttgaactctctgagataaacggagatgcagggtcaaactacataaatgccagctatattgatggtttcaaagaacccaggaaatacattgctgcacaaggtcccagggatgaaactgttgatgatttctggaggatgatttgggaacagaaagccacagttattgtcatggtcactcgatgtgaagaaggaaacaggaacaagtgtgcagaatactggccgtcaatggaagagggcactcgggcttttggagatgttgttgtaaagatcaaccagcacaaaagatgtccagattacatcattcagaaattgaacattgtaaataaaaaagaaaaagcaactggaagagaggtgactcacattcagttcaccagctggccagaccacggggtgcctgaggatcctcacttgctcctcaaactgagaaggagagtgaatgccttcagcaatttcttcagtggtcccattgtggtgcactgcagtgctggtgttgggcgcacaggaacctatatcggaattgatgccatgctagaaggcctggaagccgagaacaaagtggatgtttatggttatgttgtcaagctaaggcgacagagatgcctgatggttcaagtagaggcccagtacatcttgatccatcaggctttggtggaatacaatcagtttggagaaacagaagtgaatttgtctgaattacatccatatctacataacatgaagaaaagggatccacccagtgagccgtctccactagaggctgaattccagagacttccttcatataggagctggaggacacagcacattggaaatcaagaagaaaataaaagtaaaaacaggaattctaatgtcatcccatatgactataacagagtgccacttaaacatgagctggaaatgagtaaagagagtgagcatgattcagatgaatcctctgatgatgacagtgattcagaggaaccaagcaaatacatcaatgcatcttttataatgagctactggaaacctgaagtgatgattgctgctcagggaccactgaaggagaccattggtgacttttggcagatgatcttccaaagaaaagtcaaagttattgttatgctgacagaactgaaacatggagaccaggaaatctgtgctcagtactggggagaaggaaagcaaacatatggagatattgaagttgacctgaaagacacagacaaatcttcaacttatacccttcgtgtctttgaactgagacattccaagaggaaagactctcgaactgtgtaccagtaccaatatacaaactggagtgtggagcagcttcctgcagaacccaaggaattaatctctatgattcaggtcgtcaaacaaaaacttccccagaagaattcctctgaagggaacaagcatcacaagagtacacctctactcattcactgcagggatggatctcagcaaacgggaatattttgtgctttgttaaatctcttagaaagtgcggaaacagaagaggtagtggatatttttcaagtggtaaaagctctacgcaaagctaggccaggcatggtttccacattcgagcaatatcaattcctatatgacgtcattgccagcacctaccctgctcagaatggacaagtaaagaaaaacaaccatcaagaagataaaattgaatttgataatgaagtggacaaagtaaagcaggatgctaattgtgttaatccacttggtgccccagaaaagctccctgaagcaaaggaacaggctgaaggttctgaacccacgagtggcactgaggggccagaacattctgtcaatggtcctgcaagtccagctttaaatcaaggttcataggaaaagacataaatgaggaaactccaaacctcctgttagctgttatttctatttttgtagaagtaggaagtgaaaataggtatacagtggattaattaaatgcagcgaaccaatatttgtagaagggttatattttactactgtggaaaaatatttaagatagttttgccagaacagtttgtacagacgtatgcttattttaaaattttatctcttattcagtaaaaaacaacttctttgtaatcgttatgtgtgtatatgtatgtgtgtatgggtgtgtgtttgtgtgagagacagagaaagagagagaattctttcaagtgaatctaaaagcttttgcttttcctttgtttttatgaagaaaaaatacattttatattagaagtgttaacttagcttgaaggatctgtttttaaaaatcataaactgtgtgcagactcaataaaatcatgtacatttctgaaatgacctcaagatgtcctccttgttctactcatatatatctatcttatatagtttactattttacttctagagatagtacataaaggtggtatgtgtgtgtatgctactacaaaaaagttgttaactaaattaacattgggaaatcttatattccatatattagcatttagtccaatgtctttttaagcttatttaattaaaaaatttccagtgagcttatcatgctgtctttacatggggttttcaattttgcatgctcgattattccctgtacaatatttaaaatttattgcttgatacttttgacaacaaattaggttttgtacaattgaacttaaataaatgtcattaaaataaataaatgcaatatgtattaatattcattgtataaaaatagaagaatacaaacatatttgttaaatatttacatatgaaatttaatatagctatttttatggaatttttcattgatatgaaaaatatgatattgcatatgcatagttcccatgttaaatcccattcataactttcattaaagcatttactttgaatttctccaatgcttagaatgtttttaccaggaatggatgtcgctaatcataataaaattcaaccattatttttttcttgtttataatacattgtgttatatgttcaaatatgaaatgtgtatgcacctattgaaatatgtttaatgcatttattaacatttgcaggacacttttacaggccccaattatccaatagtctaataattgtttaagatctag

SEQ ID NO: 3396 - DNA, 5123 bp, Homo sapiens
  source 1..5123: mol_type = genomic DNA
ggagaagttagtaaaaccgaatctgacatcatcacctagcagttcatgcagctagcaagtggtttgttcttagggtaacagaggaggaaattgttcctcgtctgataagacaacagtggagaaaggacgcatgctgtttcttagggacacggctgacttccagatatgaccatgtatttgtggcttaaactcttggcatttggctttgcctttctggacacagaagtatttgtgacagggcaaagcccaacaccttcccccactggtgtttcatcagtacagacgcctcaccttcccacgcacgcagactcgcagacgccctctgctggaactgacacgcagacattcagcggctccgccgccaatgcaaaactcaaccctaccccaggcagcaatgctatctcagatgtcccaggagagaggagtacagccagcacctttcctacagacccagtttccccattgacaaccaccctcagccttgcacaccacagctctgctgccttacctgcacgcacctccaacaccaccatcacagcgaacacctcagatgcctaccttaatgcctctgaaacaaccactctgagcccttctggaagcgctgtcatttcaaccacaacaatagctactactccatctaagccaacatgtgatgaaaaatatgcaaacatcactgtggattacttatataacaaggaaactaaattatttacagcaaagctaaatgttaatgagaatgtggaatgtggaaacaatacttgcacaaacaatgaggtgcataaccttacagaatgtaaaaatgcgtctgtttccatatctcataattcatgtactgctcctgataagacattaatattagatgtgccaccaggggttgaaaagtttcagttacatgattgtacacaagttgaaaaagcagatactactatttgtttaaaatggaaaaatattgaaacctttacttgtgatacacagaatattacctacagatttcagtgtggtaatatgatatttgataataaagaaattaaattagaaaaccttgaacccgaacatgagtataagtgtgactcagaaatactctataataaccacaagtttactaacgcaagtaaaattattaaaacagattttgggagtccaggagagcctcagattattttttgtagaagtgaagctgcacatcaaggagtaattacctggaatccccctcaaagatcatttcataattttaccctctgttatataaaagagacagaaaaagattgcctcaatctggataaaaacctgatcaaatatgatttgcaaaatttaaaaccttatacgaaatatgttttatcattacatgcctacatcattgcaaaagtgcaacgtaatggaagtgctgcaatgtgtcatttcacaactaaaagtgctcctccaagccaggtctggaacatgactgtctccatgacatcagataatagtatgcatgtcaagtgtaggcctcccagggaccgtaatggcccccatgaacgttaccatttggaagttgaagctggaaatactctggttagaaatgagtcgcataagaattgcgatttccgtgtaaaagatcttcaatattcaacagactacacttttaaggcctattttcacaatggagactatcctggagaaccctttattttacatcattcaacatcttataattctaaggcactgatagcatttctggcatttctgattattgtgacatcaatagccctgcttgttgttctctacaaaatctatgatctacataagaaaagatcctgcaatttagatgaacagcaggagcttgttgaaagggatgatgaaaaacaactgatgaatgtggagccaatccatgcagatattttgttggaaacttataagaggaagattgctgatgaaggaagactttttctggctgaatttcagagcatcccgcgggtgttcagcaagtttcctataaaggaagctcgaaagccctttaaccagaataaaaaccgttatgttgacattcttccttatgattataaccgtgttgaactctctgagataaacggagatgcagggtcaaactacataaatgccagctatattgatggtttcaaagaacccaggaaatacattgctgcacaaggtcccagggatgaaactgttgatgatttctggaggatgatttgggaacagaaagccacagttattgtcatggtcactcgatgtgaagaaggaaacaggaacaagtgtgcagaatactggccgtcaatggaagagggcactcgggcttttggagatgttgttgtaaagatcaaccagcacaaaagatgtccagattacatcattcagaaattgaacattgtaaataaaaaagaaaaagcaactggaagagaggtgactcacattcagttcaccagctggccagaccacggggtgcctgaggatcctcacttgctcctcaaactgagaaggagagtgaatgccttcagcaatttcttcagtggtcccattgtggtgcactgcagtgctggtgttgggcgcacaggaacctatatcggaattgatgccatgctagaaggcctggaagccgagaacaaagtggatgtttatggttatgttgtcaagctaaggcgacagagatgcctgatggttcaagtagaggcccagtacatcttgatccatcaggctttggtggaatacaatcagtttggagaaacagaagtgaatttgtctgaattacatccatatctacataacatgaagaaaagggatccacccagtgagccgtctccactagaggctgaattccagagacttccttcatataggagctggaggacacagcacattggaaatcaagaagaaaataaaagtaaaaacaggaattctaatgtcatcccatatgactataacagagtgccacttaaacatgagctggaaatgagtaaagagagtgagcatgattcagatgaatcctctgatgatgacagtgattcagaggaaccaagcaaatacatcaatgcatcttttataatgagctactggaaacctgaagtgatgattgctgctcagggaccactgaaggagaccattggtgacttttggcagatgatcttccaaagaaaagtcaaagttattgttatgctgacagaactgaaacatggagaccaggaaatctgtgctcagtactggggagaaggaaagcaaacatatggagatattgaagttgacctgaaagacacagacaaatcttcaacttatacccttcgtgtctttgaactgagacattccaagaggaaagactctcgaactgtgtaccagtaccaatatacaaactggagtgtggagcagcttcctgcagaacccaaggaattaatctctatgattcaggtcgtcaaacaaaaacttccccagaagaattcctctgaagggaacaagcatcacaagagtacacctctactcattcactgcagggatggatctcagcaaacgggaatattttgtgctttgttaaatctcttagaaagtgcggaaacagaagaggtagtggatatttttcaagtggtaaaagctctacgcaaagctaggccaggcatggtttccacattcgagcaatatcaattcctatatgacgtcattgccagcacctaccctgctcagaatggacaagtaaagaaaaacaaccatcaagaagataaaattgaatttgataatgaagtggacaaagtaaagcaggatgctaattgtgttaatccacttggtgccccagaaaagctccctgaagcaaaggaacaggctgaaggttctgaacccacgagtggcactgaggggccagaacattctgtcaatggtcctgcaagtccagctttaaatcaaggttcataggaaaagacataaatgaggaaactccaaacctcctgttagctgttatttctatttttgtagaagtaggaagtgaaaataggtatacagtggattaattaaatgcagcgaaccaatatttgtagaagggttatattttactactgtggaaaaatatttaagatagttttgccagaacagtttgtacagacgtatgcttattttaaaattttatctcttattcagtaaaaaacaacttctttgtaatcgttatgtgtgtatatgtatgtgtgtatgggtgtgtgtttgtgtgagagacagagaaagagagagaattctttcaagtgaatctaaaagcttttgcttttcctttgtttttatgaagaaaaaatacattttatattagaagtgttaacttagcttgaaggatctgtttttaaaaatcataaactgtgtgcagactcaataaaatcatgtacatttctgaaatgacctcaagatgtcctccttgttctactcatatatatctatcttatatagtttactattttacttctagagatagtacataaaggtggtatgtgtgtgtatgctactacaaaaaagttgttaactaaattaacattgggaaatcttatattccatatattagcatttagtccaatgtctttttaagcttatttaattaaaaaatttccagtgagcttatcatgctgtctttacatggggttttcaattttgcatgctcgattattccctgtacaatatttaaaatttattgcttgatacttttgacaacaaattaggttttgtacaattgaacttaaataaatgtcattaaaataaataaatgcaatatgtattaatattcattgtataaaaatagaagaatacaaacatatttgttaaatatttacatatgaaatttaatatagctatttttatggaatttttcattgatatgaaaaatatgatattgcatatgcatagttcccatgttaaatcccattcataactttcattaaagcatttactttgaatttctccaatgcttagaatgtttttaccaggaatggatgtcgctaatcataataaaattcaaccattatttttttcttgtttataatacattgtgttatatgttcaaatatgaaatgtgtatgcacctattgaaatatgtttaatgcatttattaacatttgcaggacacttttacaggccccaattatccaatagtctaataattgtttaagatctag

SEQ ID NO: 3397 - DNA, 2291 bp, Homo sapiens
  source 1..2291: mol_type = genomic DNA
agaggaggaaattgttcctcgtctgataagacaacagtggagaaaggacgcatgctgtttcttagggacacggctgacttccagatatgaccatgtatttgtggcttaaactcttggcatttggctttgcctttctggacacagaagtatttgtgacagggcaaagcccaacaccttcccccactggtgtttcatcagtacagacgcctcaccttcccacgcacgcagactcgcagacgccctctgctggaactgacacgcagacattcagcggctccgccgccaatgcaaaactcaaccctaccccaggcagcaatgctatctcagatgtcccaggagagaggagtacagccagcacctttcctacagacccagtttccccattgacaaccaccctcagccttgcacaccacagctctgctgccttacctgcacgcacctccaacaccaccatcacagcgaacacctcagatgcctaccttaatgcctctgaaacaaccactctgagcccttctggaagcgctgtcatttcaaccacaacaatagctactactccatctaagccaacatgtgatgaaaaatatgcaaacatcactgtggattacttatataacaaggaaactaaattatttacagcaaagctaaatgttaatgagaatgtggaatgtggaaacaatacttgcacaaacaatgaggtgcataaccttacagaatgtaaaaatgcgtctgtttccatatctcataattcatgtactgctcctgataagacattaatattagatgtgccaccaggggttgaaaagtttcagttacatgattgtacacaagttgaaaaagcagatactactatttgtttaaaatggaaaaatattgaaacctttacttgtgatacacagaatattacctacagatttcagtgtggtaatatgatatttgataataaagaaattaaattagaaaaccttgaacccgaacatgagtataagtgtgactcagaaatactctataataaccacaagtttactaacgcaagtaaaattattaaaacagattttgggagtccaggagagcctcagattattttttgtagaagtgaagctgcacatcaaggagtaattacctggaatccccctcaaagatcatttcataattttaccctctgttatataaaagagacagaaaaagattgcctcaatctggataaaaacctgatcaaatatgatttgcaaaatttaaaaccttatacgaaatatgttttatcattacatgcctacatcattgcaaaagtgcaacgtaatggaagtgctgcaatgtgtcatttcacaactaaaagtgctcctccaagccaggtctggaacatgactgtctccatgacatcagataatagtatgcatgtcaagtgtaggcctcccagggaccgtaatggcccccatgaacgttaccatttggaagttgaagctggaaatactctggttagaaatgagtcgcataagaattgcgatttccgtgtaaaagatcttcaatattcaacagactacacttttaaggcctattttcacaatggagactatcctggagaaccctttattttacatcattcaacatcttataattctaaggcactgatagcatttctggcatttctgattattgtgacatcaatagccctgcttgttgttctctacaaaatctatgatctacataagaaaagatcctgcaatttagatgaacagcaggagcttgttgaaagggatgatgaaaaacaactgatgaatgtggagccaatccatgcagatattttgttggaaacttataagaggaagattgctgatgaaggaagactttttctggctgaatttcagagcatcccgcgggtgttcagcaagtttcctataaaggaagctcgaaagccctttaaccagaataaaaaccgttatgttgacattcttccttatgattataaccgtgttgaactctctgagataaacggagatgcagggtcaaactacataaatgccagctatattgatggtttcaaagaacccaggaaatacattgctgcacaaggtcccagggatgaaactgttgatgatttctggaggatgatttgggaacagaaagccacagttattgtcatggtcactcgatgtgaagaaggaaacaggaacaagtgtgcagaatactggccgtcaatggaagagggcactcgggcttttggagatgttgttgtaaagatcaaccagcacaaaagatgtccagattacatcattcagaaattgaacattgtaaat

SEQ ID NO: 3398 - DNA, 5321 bp, Homo sapiens
  source 1..5321: mol_type = genomic DNA
ggagaagttagtaaaaccgaatctgacatcatcacctagcagttcatgcagctagcaagtggtttgttcttagggtaacagaggaggaaattgttcctcgtctgataagacaacagtggagaaaggacgcatgctgtttcttagggacacggctgacttccagatatgaccatgtatttgtggcttaaactcttggcatttggctttgcctttctggacacagaagtatttgtgacagggcaaagcccaacaccttcccccactggattgactacagcaaagatgcccagtgttccactttcaagtgaccccttacctactcacaccactgcattctcacccgcaagcacctttgaaagagaaaatgacttctcagagaccacaacttctcttagtccagacaatacttccacccaagtatccccggactctttggataatgctagtgcttttaataccacaggtgtttcatcagtacagacgcctcaccttcccacgcacgcagactcgcagacgccctctgctggaactgacacgcagacattcagcggctccgccgccaatgcaaaactcaaccctaccccaggcagcaatgctatctcagatgtcccaggagagaggagtacagccagcacctttcctacagacccagtttccccattgacaaccaccctcagccttgcacaccacagctctgctgccttacctgcacgcacctccaacaccaccatcacagcgaacacctcagatgcctaccttaatgcctctgaaacaaccactctgagcccttctggaagcgctgtcatttcaaccacaacaatagctactactccatctaagccaacatgtgatgaaaaatatgcaaacatcactgtggattacttatataacaaggaaactaaattatttacagcaaagctaaatgttaatgagaatgtggaatgtggaaacaatacttgcacaaacaatgaggtgcataaccttacagaatgtaaaaatgcgtctgtttccatatctcataattcatgtactgctcctgataagacattaatattagatgtgccaccaggggttgaaaagtttcagttacatgattgtacacaagttgaaaaagcagatactactatttgtttaaaatggaaaaatattgaaacctttacttgtgatacacagaatattacctacagatttcagtgtggtaatatgatatttgataataaagaaattaaattagaaaaccttgaacccgaacatgagtataagtgtgactcagaaatactctataataaccacaagtttactaacgcaagtaaaattattaaaacagattttgggagtccaggagagcctcagattattttttgtagaagtgaagctgcacatcaaggagtaattacctggaatccccctcaaagatcatttcataattttaccctctgttatataaaagagacagaaaaagattgcctcaatctggataaaaacctgatcaaatatgatttgcaaaatttaaaaccttatacgaaatatgttttatcattacatgcctacatcattgcaaaagtgcaacgtaatggaagtgctgcaatgtgtcatttcacaactaaaagtgctcctccaagccaggtctggaacatgactgtctccatgacatcagataatagtatgcatgtcaagtgtaggcctcccagggaccgtaatggcccccatgaacgttaccatttggaagttgaagctggaaatactctggttagaaatgagtcgcataagaattgcgatttccgtgtaaaagatcttcaatattcaacagactacacttttaaggcctattttcacaatggagactatcctggagaaccctttattttacatcattcaacatcttataattctaaggcactgatagcatttctggcatttctgattattgtgacatcaatagccctgcttgttgttctctacaaaatctatgatctacataagaaaagatcctgcaatttagatgaacagcaggagcttgttgaaagggatgatgaaaaacaactgatgaatgtggagccaatccatgcagatattttgttggaaacttataagaggaagattgctgatgaaggaagactttttctggctgaatttcagagcatcccgcgggtgttcagcaagtttcctataaaggaagctcgaaagccctttaaccagaataaaaaccgttatgttgacattcttccttatgattataaccgtgttgaactctctgagataaacggagatgcagggtcaaactacataaatgccagctatattgatggtttcaaagaacccaggaaatacattgctgcacaaggtcccagggatgaaactgttgatgatttctggaggatgatttgggaacagaaagccacagttattgtcatggtcactcgatgtgaagaaggaaacaggaacaagtgtgcagaatactggccgtcaatggaagagggcactcgggcttttggagatgttgttgtaaagatcaaccagcacaaaagatgtccagattacatcattcagaaattgaacattgtaaataaaaaagaaaaagcaactggaagagaggtgactcacattcagttcaccagctggccagaccacggggtgcctgaggatcctcacttgctcctcaaactgagaaggagagtgaatgccttcagcaatttcttcagtggtcccattgtggtgcactgcagtgctggtgttgggcgcacaggaacctatatcggaattgatgccatgctagaaggcctggaagccgagaacaaagtggatgtttatggttatgttgtcaagctaaggcgacagagatgcctgatggttcaagtagaggcccagtacatcttgatccatcaggctttggtggaatacaatcagtttggagaaacagaagtgaatttgtctgaattacatccatatctacataacatgaagaaaagggatccacccagtgagccgtctccactagaggctgaattccagagacttccttcatataggagctggaggacacagcacattggaaatcaagaagaaaataaaagtaaaaacaggaattctaatgtcatcccatatgactataacagagtgccacttaaacatgagctggaaatgagtaaagagagtgagcatgattcagatgaatcctctgatgatgacagtgattcagaggaaccaagcaaatacatcaatgcatcttttataatgagctactggaaacctgaagtgatgattgctgctcagggaccactgaaggagaccattggtgacttttggcagatgatcttccaaagaaaagtcaaagttattgttatgctgacagaactgaaacatggagaccaggaaatctgtgctcagtactggggagaaggaaagcaaacatatggagatattgaagttgacctgaaagacacagacaaatcttcaacttatacccttcgtgtctttgaactgagacattccaagaggaaagactctcgaactgtgtaccagtaccaatatacaaactggagtgtggagcagcttcctgcagaacccaaggaattaatctctatgattcaggtcgtcaaacaaaaacttccccagaagaattcctctgaagggaacaagcatcacaagagtacacctctactcattcactgcagggatggatctcagcaaacgggaatattttgtgctttgttaaatctcttagaaagtgcggaaacagaagaggtagtggatatttttcaagtggtaaaagctctacgcaaagctaggccaggcatggtttccacattcgagcaatatcaattcctatatgacgtcattgccagcacctaccctgctcagaatggacaagtaaagaaaaacaaccatcaagaagataaaattgaatttgataatgaagtggacaaagtaaagcaggatgctaattgtgttaatccacttggtgccccagaaaagctccctgaagcaaaggaacaggctgaaggttctgaacccacgagtggcactgaggggccagaacattctgtcaatggtcctgcaagtccagctttaaatcaaggttcataggaaaagacataaatgaggaaactccaaacctcctgttagctgttatttctatttttgtagaagtaggaagtgaaaataggtatacagtggattaattaaatgcagcgaaccaatatttgtagaagggttatattttactactgtggaaaaatatttaagatagttttgccagaacagtttgtacagacgtatgcttattttaaaattttatctcttattcagtaaaaaacaacttctttgtaatcgttatgtgtgtatatgtatgtgtgtatgggtgtgtgtttgtgtgagagacagagaaagagagagaattctttcaagtgaatctaaaagcttttgcttttcctttgtttttatgaagaaaaaatacattttatattagaagtgttaacttagcttgaaggatctgtttttaaaaatcataaactgtgtgcagactcaataaaatcatgtacatttctgaaatgacctcaagatgtcctccttgttctactcatatatatctatcttatatagtttactattttacttctagagatagtacataaaggtggtatgtgtgtgtatgctactacaaaaaagttgttaactaaattaacattgggaaatcttatattccatatattagcatttagtccaatgtctttttaagcttatttaattaaaaaatttccagtgagcttatcatgctgtctttacatggggttttcaattttgcatgctcgattattccctgtacaatatttaaaatttattgcttgatacttttgacaacaaattaggttttgtacaattgaacttaaataaatgtcattaaaataaataaatgcaatatgtattaatattcattgtataaaaatagaagaatacaaacatatttgttaaatatttacatatgaaatttaatatagctatttttatggaatttttcattgatatgaaaaatatgatattgcatatgcatagttcccatgttaaatcccattcataactttcattaaagcatttactttgaatttctccaatgcttagaatgtttttaccaggaatggatgtcgctaatcataataaaattcaaccattatttttttcttgtttataatacattgtgttatatgttcaaatatgaaatgtgtatgcacctattgaaatatgtttaatgcatttattaacatttgcaggacacttttacaggccccaattatccaatagtctaataattgtttaagatctag

SEQ ID NO: 3399 - DNA, 517 bp, Homo sapiens
  source 1..517: mol_type = genomic DNA
tagttttttcattcatttggccgtctcaaaggacgcatgctgtttcttagggacacggctgacttccagatatgaccatgtatttgtggcttaaactcttggcatttggctttgcctttctggacacagaagtatttgtgacagggcaaagcccaacaccttcccccactgatgcctaccttaatgcctctgaaacaaccactctgagcccttctggaagcgctgtcatttcaaccacaacaatagctactactccatctaagccaacatgtgatgaaaaatatgcaaacatcactgtggattacttatataacaaggaaactaaattatttacagcaaagctaaatgttaatgagaatgtggaatgtggaaacaatacttgcacaaacaatgaggtgcataaccttacagaatgtaaaaatgcgtctgtttccatatctcataattcatgtactgctcctgataagacattaatattagatgtgccaccaggggttgaaaagtttcagttacatga

SEQ ID NO: 3400 - DNA, 462 bp, Homo sapiens
  source 1..462: mol_type = genomic DNA
acatttttgattcgtttttacagagaaaaacttctacagagataacaattattttgcttttcagaaggacgcatgctgtttcttagggacacggctgacttccagatatgaccatgtatttgtggcttaaactcttggcatttggctttgcctttctggacacagaagtatttgtgacagggcaaagcccaacaccttcccccactggattgactacagcaaagatgcccagtgttccactttcaagtgaccccttacctactcacaccactgcattctcacccgcaagcacctttgaaagagaaaatgacttctcagagaccacaacttctcttagtccagacaatacttccacccaagtatccccggactctttggataatgctagtgcttttaataccacaggtgtttcatcagtacagacgcctcaccttcccacgcacgcagactcgcagacgccct

SEQ ID NO: 3401 - DNA, 5164 bp, Homo sapiens
  source 1..5164: mol_type = genomic DNA
gacatcatcacctagcagttcatgcagctagcaagtggtttgttcttagggtaacagaggaggaaattgttcctcgtctgataagacaacagtggagaaaggacgcatgctgtttcttagggacacggctgacttccagatatgaccatgtatttgtggcttaaactcttggcatttggctttgcctttctggacacagaagtatttgtgacagggcaaagcccaacaccttcccccactggattgactacagcaaagatgcccagtgttccactttcaagtgaccccttacctactcacaccactgcattctcacccgcaagcacctttgaaagagaaaatgacttctcagagaccacaacttctcttagtccagacaatacttccacccaagtatccccggactctttggataatgctagtgcttttaataccacaggtgtttcatcagtacagacgcctcaccttcccacgcacgcagactcgcagacgccctctgctggaactgacacgcagacattcagcggctccgccgccaatgcaaaactcaaccctaccccaggcagcaatgctatctcagatgtcccaggagagaggagtacagccagcacctttcctacagacccagtttccccattgacaaccaccctcagccttgcacaccacagctctgctgccttacctgcacgcacctccaacaccaccatcacagcgaacacctcagatgcctaccttaatgcctctgaaacaaccactctgagcccttctggaagcgctgtcatttcaaccacaacaatagctactactccatctaagccaacatgtgatgaaaaatatgcaaacatcactgtggattacttatataacaaggaaactaaattatttacagcaaagctaaatgttaatgagaatgtggaatgtggaaacaatacttgcacaaacaatgaggtgcataaccttacagaatgtaaaaatgcgtctgtttccatatctcataattcatgtactgctcctgataagacattaatattagatgtgccaccaggggttgaaaagtttcagttacatgattgtacacaagttgaaaaagcagatactactatttgtttaaaatggaaaaatattgaaacctttacttgtgatacacagaatattacctacagatttcagtgtggtaatatgatatttgataataaagaaattaaattagaaaaccttgaacccgaacatgagtataagtgtgactcagaaatactctataataaccacaagtttactaacgcaagtaaaattattaaaacagattttgggagtccaggagagcctcagattattttttgtagaagtgaagctgcacatcaaggagtaattacctggaatccccctcaaagatcatttcataattttaccctctgttatataaaagagacagaaaaagattgcctcaatctggataaaaacctgatcaaatatgatttgcaaaatttaaaaccttatacgaaatatgttttatcattacatgcctacatcattgcaaaagtgcaacgtaatggaagtgctgcaatgtgtcatttcacaactaaaagtgctcctccaagccaggtctggaacatgactgtctccatgacatcagataatagtatgcatgtcaagtgtaggcctcccagggaccgtaatggcccccatgaacgttaccatttggaagttgaagctggaaatactctggttagaaatgagtcgcataagaattgcgatttccgtgtaaaagatcttcaatattcaacagactacacttttaaggcctattttcacaatggagactatcctggagaaccctttattttacatcattcaacatcttataattctaaggcactgatagcatttctggcatttctgattattgtgacatcaatagccctgcttgttgttctctacaaaatctatgatctacataagaaaagatcctgcaatttagatgaacagcaggagcttgttgaaagggatgatgaaaaacaactgatgaatgtggagccaatccatgcagatattttgttggaaacttataagaggaagattgctgatgaaggaagactttttctggctgaatttcagagcatcccgcgggtgttcagcaagtttcctataaaggaagctcgaaagccctttaaccagaataaaaaccgttatgttgacattcttccttatgattataaccgtgttgaactctctgagataaacggagatgcagggtcaaactacataaatgccagctatattgatggtttcaaagaacccaggaaatacattgctgcacaaggtcccagggatgaaactgttgatgatttctggaggatgatttgggaacagaaagccacagttattgtcatggtcactcgatgtgaagaaggaaacaggaacaagtgtgcagaatactggccgtcaatggaagagggcactcgggcttttggagatgttgttgtaaagatcaaccagcacaaaagatgtccagattacatcattcagaaattgaacattgtaaataaaaaagaaaaagcaactggaagagaggtgactcacattcagttcaccagctggccagaccacggggtgcctgaggatcctcacttgctcctcaaactgagaaggagagtgaatgccttcagcaatttcttcagtggtcccattgtggtgcactgcagtgctggtgttgggcgcacaggaacctatatcggaattgatgccatgctagaaggcctggaagccgagaacaaagtggatgtttatggttatgttgtcaagctaaggcgacagagatgcctgatggttcaagtagaggcccagtacatcttgatccatcaggctttggtggaatacaatcagtttggagaaacagaagtgaatttgtctgaattacatccatatctacataacatgaagaaaagggatccacccagtgagccgtctccactagaggctgaattccagagacttccttcatataggagctggaggacacagcacattggaaatcaagaagaaaataaaagtaaaaacaggaattctaatgtcatcccatatgactataacagagtgccacttaaacatgagctggaaatgagtaaagagagtgagcatgattcagatgaatcctctgatgatgacagtgattcagaggaaccaagcaaatacatcaatgcatcttttataatgagctactggaaacctgaagtgatgattgctgctcagggaccactgaaggagaccattggtgacttttggcagatgatcttccaaagaaaagtcaaagttattgttatgctgacagaactgaaacatggagaccaggaaatctgtgctcagtactggggagaaggaaagcaaacatatggagatattgaagttgacctgaaagacacagacaaatcttcaacttatacccttcgtgtctttgaactgagacattccaagaggaaagactctcgaactgtgtaccagtaccaatatacaaactggagtgtggagcagcttcctgcagaacccaaggaattaatctctatgattcaggtcgtcaaacaaaaacttccccagaagaattcctctgaagggaacaagcatcacaagagtacacctctactcattcactgcagggatggatctcagcaaacgggaatattttgtgctttgttaaatctcttagaaagtgcggaaacagaagaggtagtggatatttttcaagtggtaaaagctctacgcaaagctaggccaggcatggtttccacattcgagcaatatcaattcctatatgacgtcattgccagcacctaccctgctcagaatggacaagtaaagaaaaacaaccatcaagaagataaaattgaatttgataatgaagtggacaaagtaaagcaggatgctaattgtgttaatccacttggtgccccagaaaagctccctgaagcaaaggaacaggctgaaggttctgaacccacgagtggcactgaggggccagaacattctgtcaatggtcctgcaagtccagctttaaatcaaggttcataggaaaagacataaatgaggaaactccaaacctcctgttagctgttatttctatttttgtagaagtaggaagtgaaaataggtatacagtggattaattaaatgcagcgaaccaatatttgtagaagggttatattttactactgtggaaaaatatttaagatagttttgccagaacagtttgtacagacgtatgcttattttaaaattttatctcttattcagtaaaaaacaacttctttgtaatcgttatgtgtgtatatgtatgtgtgtatgggtgtgtgtttgtgtgagagacagagaaagagagagaattctttcaagtgaatctaaaagcttttgcttttcctttgtttttatgaagaaaaaatacattttatattagaagtgttaacttagcttgaaggatctgtttttaaaaatcataaactgtgtgcagactcaataaaatcatgtacatttctgaaatgacctcaagatgtcctccttgttctactcatatatatctatcttatatagtttactattttacttctagagatagtacataaaggtggtatgtgtgtgtatgctactacaaaaaagttgttaactaaattaacattgggaaatcttatattccatatattagcatttagtccaatgtctttttaagcttatttaattaaaaaatttccagtgagcttatcatgctgtctttacatggggttttcaattttgcatgctcgattattccctgtacaatatttaaaatttattgcttgatacttttgacaacaaattaggttttgtacaattgaacttaaataaatgtcattaaaataaataaatgcaatatgtattaatattcattgtataaaaatagaagaatacaaacatatttgttaaatatttacatatgaaatttaatatagctatttttatggaatttttcattgatatgaaaaatatgatattgcatatgcatagttcccatgttaaatcccattcataactttcattaaagcatttactttgaatttctccaatgcttagaatgtttttaccaggaatggatgtcgctaatcataataaaattcaaccattatttttttcttgtttataa

SEQ ID NO: 3402 - DNA, 1962 bp, Homo sapiens
  source 1..1962: mol_type = genomic DNA
gaagttagtaaaaccgaatctgacatcatcacctagcagttcatgcagctagcaagtggtttgttcttagggtaacagaggaggaaattgttcctcgtctgataagacaacagtggagaaaggacgcatgctgtttcttagggacacggctgacttccagatatgaccatgtatttgtggcttaaactcttggcatttggctttgcctttctggacacagaagtatttgtgacagggcaaagcccaacaccttcccccactggtgtttcatcagtacagacgcctcaccttcccacgcacgcagactcgcagacgccctctgctggaactgacacgcagacattcagcggctccgccgccaatgcaaaactcaaccctaccccaggcagcaatgctatctcagatgcctaccttaatgcctctgaaacaaccactctgagcccttctggaagcgctgtcatttcaaccacaacaatagctactactccatctaagccaacatgtgatgaaaaatatgcaaacatcactgtggattacttatataacaaggaaactaaattatttacagcaaagctaaatgttaatgagaatgtggaatgtggaaacaatacttgcacaaacaatgaggtgcataaccttacagaatgtaaaaatgcgtctgtttccatatctcataattcatgtactgctcctgataagacattaatattagatgtgccaccaggggttgaaaagtttcagttacatgattgtacacaagttgaaaaagcagatactactatttgtttaaaatggaaaaatattgaaacctttacttgtgatacacagaatattacctacagatttcagtgtggtaatatgatatttgataataaagaaattaaattagaaaaccttgaacccgaacatgagtataagtgtgactcagaaatactctataataaccacaagtttactaacgcaagtaaaattattaaaacagattttgggagtccaggagagcctcagattattttttgtagaagtgaagctgcacatcaaggagtaattacctggaatccccctcaaagatcatttcataattttaccctctgttatataaaagagacagaaaaagattgcctcaatctggataaaaacctgatcaaatatgatttgcaaaatttaaaaccttatacgaaatatgttttatcattacatgcctacatcattgcaaaagtgcaacgtaatggaagtgctgcaatgtgtcatttcacaactaaaagtgctcctccaagccaggtctggaacatgactgtctccatgacatcagataatagtatgcatgtcaagtgtaggcctcccagggaccgtaatggcccccatgaacgttaccatttggaagttgaagctggaaatactctggttagaaatgagtcgcataagaattgcgatttccgtgtaaaagatcttcaatattcaacagactacacttttaaggcctattttcacaatggagactatcctggagaaccctttattttacatcattcaacatcttataattctaaggcactgatagcatttctggcatttctgattattgtgacatcaatagccctgcttgttgttctctacaaaatctatgatctacataagaaaagatcctgcaatttagatgaacagcaggagcttgttgaaagggatgatgaaaaacaactgatgaatgtggagccaatccatgcagatattttgttggaaacttataagaggaagattgctgatgaaggaagactttttctggctgaatttcagagcatcccgcgggtgttcagcaagtttcctataaaggaagctcgaaagccctttaaccagaataaaaaccgttatgttgacattcttccttatgattataaccgtgttgaactctctgagataaacggagatgcagggtcaaactacataaatgccagctatattgat

SEQ ID NO: 3403 - DNA, 2439 bp, Homo sapiens
  source 1..2439: mol_type = genomic DNA
ggagaagttagtaaaaccgaatctgacatcatcacctagcagttcatgcagctagcaagtggtttgttcttagggtaacagaggaggaaattgttcctcgtctgataagacaacagtggagaaaggacgcatgctgtttcttagggacacggctgacttccagatatgaccatgtatttgtggcttaaactcttggcatttggctttgcctttctggacacagaagtatttgtgacagggcaaagcccaacaccttcccccactggattgactacagcaaagatgcccagtgttccactttcaagtgaccccttacctactcacaccactgcattctcacccgcaagcacctttgaaagagaaaatgacttctcagagaccacaacttctcttagtccagacaatacttccacccaagtatccccggactctttggataatgctagtgcttttaataccacaggtgtttcatcagtacagacgcctcaccttcccacgcacgcagactcgcagacgccctctgctggaactgacacgcagacattcagcggctccgccgccaatgcaaaactcaaccctaccccaggcagcaatgctatctcagatgcctaccttaatgcctctgaaacaaccactctgagcccttctggaagcgctgtcatttcaaccacaacaatagctactactccatctaagccaacatgtgatgaaaaatatgcaaacatcactgtggattacttatataacaaggaaactaaattatttacagcaaagctaaatgttaatgagaatgtggaatgtggaaacaatacttgcacaaacaatgaggtgcataaccttacagaatgtaaaaatgcgtctgtttccatatctcataattcatgtactgctcctgataagacattaatattagatgtgccaccaggggttgaaaagtttcagttacatgattgtacacaagttgaaaaagcagatactactatttgtttaaaatggaaaaatattgaaacctttacttgtgatacacagaatattacctacagatttcagtgtggtaatatgatatttgataataaagaaattaaattagaaaaccttgaacccgaacatgagtataagtgtgactcagaaatactctataataaccacaagtttactaacgcaagtaaaattattaaaacagattttgggagtccaggagagcctcagattattttttgtagaagtgaagctgcacatcaaggagtaattacctggaatccccctcaaagatcatttcataattttaccctctgttatataaaagagacagaaaaagattgcctcaatctggataaaaacctgatcaaatatgatttgcaaaatttaaaaccttatacgaaatatgttttatcattacatgcctacatcattgcaaaagtgcaacgtaatggaagtgctgcaatgtgtcatttcacaactaaaagtgctcctccaagccaggtctggaacatgactgtctccatgacatcagataatagtatgcatgtcaagtgtaggcctcccagggaccgtaatggcccccatgaacgttaccatttggaagttgaagctggaaatactctggttagaaatgagtcgcataagaattgcgatttccgtgtaaaagatcttcaatattcaacagactacacttttaaggcctattttcacaatggagactatcctggagaaccctttattttacatcattcaacatcttataattctaaggcactgatagcatttctggcatttctgattattgtgacatcaatagccctgcttgttgttctctacaaaatctatgatctacataagaaaagatcctgcaatttagatgaacagcaggagcttgttgaaagggatgatgaaaaacaactgatgaatgtggagccaatccatgcagatattttgttggaaacttataagaggaagattgctgatgaaggaagactttttctggctgaatttcagagcatcccgcgggtgttcagcaagtttcctataaaggaagctcgaaagccctttaaccagaataaaaaccgttatgttgacattcttccttatgattataaccgtgttgaactctctgagataaacggagatgcagggtcaaactacataaatgccagctatattgatggtttcaaagaacccaggaaatacattgctgcacaaggtcccagggatgaaactgttgatgatttctggaggatgatttgggaacagaaagccacagttattgtcatggtcactcgatgtgaagaaggaaacaggaacaagtgtgcagaatactggccgtcaatggaagagggcactcgggcttttggagatgttgttgtaaagatcaaccagcacaaaagatgtccagattacatcattcagaaattgaacattgtaaataaacaaaagtcaaag

SEQ ID NO: 3404 - DNA, 1662 bp, Homo sapiens
  source 1..1662: mol_type = genomic DNA
agcgattatatgattatcaaaaagaagtctaactatgaagtattagaaaaagatgttggtttaaagcgattttttcctaagagtttactggattctgtcaaggccaaaacactaagaaaactgatccaacaaacatttagacaatttgccaaccttaatagagaagaaagtattctgaaattctttgagatcctgtctccagtctacagatttgataaggaatgcttcaagtgtgctcttggttcaagctggattatttcagtggaactggcaatcggcccagaagaaggaatcagttacctaacggacaagggctgcaatcccacacatcttgctgacttcactcaagtgcaaaccattcagtattcaaacagtgaagacaaggacagaaaaggaatgctacaactaaaaatagcaggtgcacccgagcctctgacagtgacggcaccatccctaaccattgcggagaatatggctgacctaatagatgggtactgccggctggtgaatggaacctcgcagtcatttatcatcagacctcagaaagaaggtgaacgggctttgccatcaataccaaagttggccaacagcgaaaagcaaggcatgcggacacacgccgtctctgtgtcagaaacagatgattatgctgagattatagatgaagaagatacttacaccatgccctcaaccagggattatgagattcaaagagaaagaatagaacttggacgatgtattggagaaggccaatttggagatgtacatcaaggcatttatatgagtccagagaatccagctttggcggttgcaattaaaacatgtaaaaactgtacttcggacagcgtgagagagaaatttcttcaagaagcctgccattacacatctttgcactggaattggtgcagatatataagtgatcctaatgttgattgcccagaccccaggaatgcagaggtaacaatgcgtcagtttgaccatcctcatattgtgaagctgattggagtcatcacagagaatcctgtctggataatcatggagctgtgcacacttggagagctgaggtcatttttgcaagtaaggaaatacagtttggatctagcatctttgatcctgtatgcctatcagcttagtacagctcttgcatatctagagagcaaaagatttgtacacagggacattgctgctcggaatgttctggtgtcctcaaatgattgtgtaaaattaggagactttggattatcccgatatatggaagatagtacttactacaaagcttccaaaggaaaattgcctattaaatggatggctccagagtcaatcaattttcgacgttttacctcagctagtgacgtatggatgtttggtgtgtgtatgtgggagatactgatgcatggtgtgaagccttttcaaggagtgaagaacaatgatgtaatcggtcgaattgaaaatggggaaagattaccaatgcctccaaattgtcctcctaccctctacagccttatgacgaaatgctgggcctatgaccccagcaggcggcccaggtttactgaacttaaagctcagctcagttttcagaacccagctcagatgttacctgcttcaggaaggcttcctaatcaaccctgccccgaaagagagaattactcctttgccaccttttga

SEQ ID NO: 3405 - DNA, 4337 bp, Homo sapiens
  source 1..4337: mol_type = genomic DNA
gaccactgtgagcccgcggcgtgaggcgtgggaggaagcgcggctgctgtcgcccagcgccgccccgtcgtcgtctgccttcgcttcacggcgccgagccgcggtccgagcagaactggggctcccttgcatcttccagttacaaattcagtgccttctgcagtttccccagagctcctcaagaataacggaagggagaatatgacagatacctagcatctagcaaaataatggcagctgcttaccttgaccccaacttgaatcacacaccaaattcgagtactaagactcacctgggtactggtatggaacgttctcctggtgcaatggagcgagtattaaaggtctttcattattttgaaagcaatagtgagccaaccacctgggccagtattatcaggcatggagatgctactgatgtcaggatatgaattgagaattcgttatttgccaaaaggatttctaaaccagtttactgaagataagccaactttgaatttcttctatcaacaggtgaagagcgattatatgttagagatagctgatcaagtggaccaggaaattgctttgaagttgggttgtctagaaatacggcgatcatactgggagatgcggggcaatgcactagaaaagaagtctaactatgaagtattagaaaaagatgttggtttaaagcgattttttcctaagagtttactggattctgtcaaggccaaaacactaagaaaactgatccaacaaacatttagacaatttgccaaccttaatagagaagaaagtattctgaaattctttgagatcctgtctccagtctacagatttgataaggaatgcttcaagtgtgctcttggttcaagctggattatttcagtggaactggcaatcggcccagaagaaggaatcagttacctaacggacaagggctgcaatcccacacatcttgctgacttcactcaagtgcaaaccattcagtattcaaacagtgaagacaaggacagaaaaggaatgctacaactaaaaatagcaggtgcacccgagcctctgacagtgacggcaccatccctaaccattgcggagaatatggctgacctaatagatgggtactgccggctggtgaatggaacctcgcagtcatttatcatcagacctcagaaagaaggtgaacgggctttgccatcaataccaaagttggccaacagcgaaaagcaaggcatgcggacacacgccgtctctgtgtcagatgaaataccaggagcagaaacagatgattatgctgagattatagatgaagaagatacttacaccatgccctcaattaaaagttattgtattgatgtagccagggattatgagattcaaagagaaagaatagaacttggacgatgtattggagaaggccaatttggagatgtacatcaaggcatttatatgagtccagagaatccagctttggcggttgcaattaaaacatgtaaaaactgtacttcggacagcgtgagagagaaatttcttcaagaagccttaacaatgcgtcagtttgaccatcctcatattgtgaagctgattggagtcatcacagagaatcctgtctggataatcatggagctgtgcacacttggagagctgaggtcatttttgcaagtaaggaaatacagtttggatctagcatctttgatcctgtatgcctatcagcttagtacagctcttgcatatctagagagcaaaagatttgtacacagggacattgctgctcggaatgttctggtgtcctcaaatgattgtgtaaaattaggagactttggattatcccgatatatggaagatagtacttactacaaagcttccaaaggaaaattgcctattaaatggatggctccagagtcaatcaattttcgacgttttacctcagctagtgacgtatggatgtttggtgtgtgtatgtgggagatactgatgcatggtgtgaagccttttcaaggagtgaagaacaatgatgtaatcggtcgaattgaaaatggggaaagattaccaatgcctccaaattgtcctcctaccctctacagccttatgacgaaatgctgggcctatgaccccagcaggcggcccaggtttactgaacttaaagctcagctcagcacaatcctggaggaagagaaggctcagcaagaagagcgcatgaggatggagtccagaagacaggccacagtgtcctgggactccggagggtctgatgaagcaccgcccaagcccagcagaccgggttatcccagtccgaggtccagcgaaggattttatcccagcccacagcacatggtacaaaccaatcattaccaggtttctggctaccctggttcacatggaatcacagccatggctggcagcatctatccaggtcaggcatctcttttggaccaaacagattcatggaatcatagacctcaggagatagcaatgtggcagcccaatgtggaggactctacagtattggacctgcgagggattgggcaagtgttgccaacccatctgatggaagagcgtctaatccgacagcaacaggaaatggaagaagatcagcgctggctggaaaaagaggaaagatttctgaaacctgatgtgagactctctcgaggcagtattgacagggaggatggaagtcttcagggtccgattggaaaccaacatatatatcagcctgtgggtaaaccagatcctgcagctccaccaaagaaaccgcctcgccctggagctcccggtcatctgggaagccttgccagcctcagcagccctgctgacagctacaacgagggtgtcaagcctctgagacttcagccccaggaaatcagcccccctcctactgccaacctggaccggtcgaatgataaggtgtacgagaatgtgacgggcctggtgaaagctgtcatcgagatgtccagtaaaatccagccagccccaccagaggagtatgtccctatggtgaaggaagtcggcttggccctgaggacattattggccactgtggatgagaccattcccctcctaccagccagcacccaccgagagattgagatggcacagaagctattgaactctgacctgggtgagctcatcaacaagatgaaactggcccagcagtatgtcatgaccagcctccagcaagagtacaaaaagcaaatgctgactgctgctcacgccctggctgtggatgccaaaaacttactcgatgtcattgaccaagcaagactgaaaatgcttgggcagacgagaccacactgagcctcccctaggagcacgtcttgctaccctcttttgaagatgttctctagccttccaccagcagcgaggaattaaccctgtgtcctcagtcgccagcacttacagctccaacttttttgaatgaccatctggttgaaaaatctttctcatataagtttaaccacactttgatttgggttcattttttgttttgtttttttcaatcatgatattcagaaaaatccaggatccaaaatgtggcgtttttctaagaatgaaaattatatgtaagcttttaagcatcatgaagaacaatttatgttcacattaagatacgttctaaagggggatggccaaggggtgacatcttaattcctaaactaccttagctgcatagtggaagaggagagcatgaagcaaagaattccaggaaacccaagaggctgagaattcttttgtctaccatagaattattatccagactggaatttttgtttgttagaacacccttcagttgcaatatgctaatcccactttacaaagaatataaaagctatattttgaagacttgagttatttcagaaaaaactacagccctttttgtcttacctgccttttactttcgtgtggatatgtgaagcattgggtcgggaactagctgtagaacacaactaaaaactcatgtcttttttcacagaataatgtgccagttttttgtagcaatgttatttctcttggaagcagaaatgctttgtaccagagcacctccaaactgcattgaggagaagttccagaaccatcccctttttccatttttatataatttataaagaaagattaaagccatgttgactattttacagccactggagttaactaacccttccttgtatctgtcttcccaggagagaatgaagcaaaacaggaatttggttttcttttgatgtccagttacaccatccattctgttaattttgaaaaaatataccctccctttagtttgttgggggatataaattattctcaggaagaatataatgaactgtacagttactttgacctattaaaaaggtgttaccagtaaa

SEQ ID NO: 3406 - DNA, 4088 bp, Homo sapiens
  source 1..4088: mol_type = genomic DNA
aaagcagaatatgacagatacctagcatctagcaaaataatggcagctgcttaccttgaccccaacttgaatcacacaccaaaggagtggaaatatgaattgagaattcgttatttgccaaaaggatttctaaaccagtttactgaagataagccaactttgaatttcttctatcaacaggtgaagagcgattatatgttagagatagctgatcaagtggaccaggaaattgctttgaagttgggttgtctagaaatacggcgatcatactgggagatgcggggcaatgcactagaaaagaagtctaactatgaagtattagaaaaagatgttggtttaaagcgattttttcctaagagtttactggattctgtcaaggccaaaacactaagaaaactgatccaacaaacatttagacaatttgccaaccttaatagagaagaaagtattctgaaattctttgagatcctgtctccagtctacagatttgataaggaatgcttcaagtgtgctcttggttcaagctggattatttcagtggaactggcaatcggcccagaagaaggaatcagttacctaacggacaagggctgcaatcccacacatcttgctgacttcactcaagtgcaaaccattcagtattcaaacagtgaagacaaggacagaaaaggaatgctacaactaaaaatagcaggtgcacccgagcctctgacagtgacggcaccatccctaaccattgcggagaatatggctgacctaatagatgggtactgccggctggtgaatggaacctcgcagtcatttatcatcagacctcagaaagaaggtgaacgggctttgccatcaataccaaagttggccaacagcgaaaagcaaggcatgcggacacacgccgtctctgtgtcaggagtcagtcactgccaacataaagttaagaaagctaggcgctttctccctttggtcttctgttcccatgatcctccttctacggatgaaattagtggggacgaaacagatgattatgctgagattatagatgaagaagatacttacaccatgccctcaattaaaagttattgtattgatgtagccagggattatgagattcaaagagaaagaatagaacttggacgatgtattggagaaggccaatttggagatgtacatcaaggcatttatatgagtccagagaatccagctttggcggttgcaattaaaacatgtaaaaactgtacttcggacagcgtgagagagaaatttcttcaagaagccttaacaatgcgtcagtttgaccatcctcatattgtgaagctgattggagtcatcacagagaatcctgtctggataatcatggagctgtgcacacttggagagctgaggtcatttttgcaagtaaggaaatacagtttggatctagcatctttgatcctgtatgcctatcagcttagtacagctcttgcatatctagagagcaaaagatttgtacacagggacattgctgctcggaatgttctggtgtcctcaaatgattgtgtaaaattaggagactttggattatcccgatatatggaagatagtacttactacaaagcttccaaaggaaaattgcctattaaatggatggctccagagtcaatcaattttcgacgttttacctcagctagtgacgtatggatgtttggtgtgtgtatgtgggagatactgatgcatggtgtgaagccttttcaaggagtgaagaacaatgatgtaatcggtcgaattgaaaatggggaaagattaccaatgcctccaaattgtcctcctaccctctacagccttatgacgaaatgctgggcctatgaccccagcaggcggcccaggtttactgaacttaaagctcagctcagcacaatcctggaggaagagaaggctcagcaagaagagcgcatgaggatggagtccagaagacaggccacagtgtcctgggactccggagggtctgatgaagcaccgcccaagcccagcagaccgggttatcccagtccgaggtccagcgaaggattttatcccagcccacagcacatggtacaaaccaatcattaccaggtttctggctaccctggttcacatggaatcacagccatggctggcagcatctatccaggtcaggcatctcttttggaccaaacagattcatggaatcatagacctcaggagatagcaatgtggcagcccaatgtggaggactctacagtattggacctgcgagggattgggcaagtgttgccaacccatctgatggaagagcgtctaatccgacagcaacaggaaatggaagaagatcagcgctggctggaaaaagaggaaagatttctgaaacctgatgtgagactctctcgaggcagtattgacagggaggatggaagtcttcagggtccgattggaaaccaacatatatatcagcctgtgggtaaaccagatcctgcagctccaccaaagaaaccgcctcgccctggagctcccggtcatctgggaagccttgccagcctcagcagccctgctgacagctacaacgagggtgtcaagcctctgagacttcagccccaggaaatcagcccccctcctactgccaacctggaccggtcgaatgataaggtgtacgagaatgtgacgggcctggtgaaagctgtcatcgagatgtccagtaaaatccagccagccccaccagaggagtatgtccctatggtgaaggaagtcggcttggccctgaggacattattggccactgtggatgagaccattcccctcctaccagccagcacccaccgagagattgagatggcacagaagctattgaactctgacctgggtgagctcatcaacaagatgaaactggcccagcagtatgtcatgaccagcctccagcaagagtacaaaaagcaaatgctgactgctgctcacgccctggctgtggatgccaaaaacttactcgatgtcattgaccaagcaagactgaaaatgcttgggcagacgagaccacactgagcctcccctaggagcacgtcttgctaccctcttttgaagatgttctctagccttccaccagcagcgaggaattaaccctgtgtcctcagtcgccagcacttacagctccaacttttttgaatgaccatctggttgaaaaatctttctcatataagtttaaccacactttgatttgggttcattttttgttttgtttttttcaatcatgatattcagaaaaatccaggatccaaaatgtggcgtttttctaagaatgaaaattatatgtaagcttttaagcatcatgaagaacaatttatgttcacattaagatacgttctaaagggggatggccaaggggtgacatcttaattcctaaactaccttagctgcatagtggaagaggagagcatgaagcaaagaattccaggaaacccaagaggctgagaattcttttgtctaccatagaattattatccagactggaatttttgtttgttagaacacccttcagttgcaatatgctaatcccactttacaaagaatataaaagctatattttgaagacttgagttatttcagaaaaaactacagccctttttgtcttacctgccttttactttcgtgtggatatgtgaagcattgggtcgggaactagctgtagaacacaactaaaaactcatgtcttttttcacagaataatgtgccagttttttgtagcaatgttatttctcttggaagcagaaatgctttgtaccagagcacctccaaactgcattgaggagaagttccagaaccatcccctttttccatttttatataatttataaagaaagattaaagccatgttgactattttacagccactggagttaactaacccttccttgtatctgtcttcccaggagagaatgaagcaaaacaggaatttggttttcttttgatgtccagttacaccatccattctgttaattttgaaaaaatataccctccctttagtttgttgggggatataaattattctcaggaagaatataatgaactgtacagttactttgacctattaaaaaggtgttaccagtaaa

SEQ ID NO: 3407 - DNA, 4492 bp, Homo sapiens
  source 1..4492: mol_type = genomic DNA
gaccactgtgagcccgcggcgtgaggcgtgggaggaagcgcggctgctgtcgcccagcgccgccccgtcgtcgtctgccttcgcttcacggcgccgagccgcggtccgagcagaactggggctcccttgcatcttccagttacaaattcagtgccttctgcagtttccccagagctcctcaagaataacggaagggagaatatgacagatacctagcatctagcaaaataatggcagctgcttaccttgaccccaacttgaatcacacaccaaattcgagtactaagactcacctgggtactggtatggaacgttctcctggtgcaatggagcgagtattaaaggtctttcattattttgaaagcaatagtgagccaaccacctgggccagtattatcaggcatggagatgctactgatgtcaggggcatcattcagaagatagtggacagtcacaaagtaaagcatgtggcctgctatggattccgcctcagtcacctgcggtcagaggaggttcactggcttcacgtggatatgggcgtctccagtgtgagggagaagtatgagcttgctcacccaccagaggagtggaaatatgaattgagaattcgttatttgccaaaaggatttctaaaccagtttactgaagataagccaactttgaatttcttctatcaacaggtgaagagcgattatatgttagagatagctgatcaagtggaccaggaaattgctttgaagttgggttgtctagaaatacggcgatcatactgggagatgcggggcaatgcactagaaaagaagtctaactatgaagtattagaaaaagatgttggtttaaagcgattttttcctaagagtttactggattctgtcaaggccaaaacactaagaaaactgatccaacaaacatttagacaatttgccaaccttaatagagaagaaagtattctgaaattctttgagatcctgtctccagtctacagatttgataaggaatgcttcaagtgtgctcttggttcaagctggattatttcagtggaactggcaatcggcccagaagaaggaatcagttacctaacggacaagggctgcaatcccacacatcttgctgacttcactcaagtgcaaaccattcagtattcaaacagtgaagacaaggacagaaaaggaatgctacaactaaaaatagcaggtgcacccgagcctctgacagtgacggcaccatccctaaccattgcggagaatatggctgacctaatagatgggtactgccggctggtgaatggaacctcgcagtcatttatcatcagacctcagaaagaaggtgaacgggctttgccatcaataccaaagttggccaacagcgaaaagcaaggcatgcggacacacgccgtctctgtgtcagaaacagatgattatgctgagattatagatgaagaagatacttacaccatgccctcaaccagggattatgagattcaaagagaaagaatagaacttggacgatgtattggagaaggccaatttggagatgtacatcaaggcatttatatgagtccagagaatccagctttggcggttgcaattaaaacatgtaaaaactgtacttcggacagcgtgagagagaaatttcttcaagaagccttaacaatgcgtcagtttgaccatcctcatattgtgaagctgattggagtcatcacagagaatcctgtctggataatcatggagctgtgcacacttggagagctgaggtcatttttgcaagtaaggaaatacagtttggatctagcatctttgatcctgtatgcctatcagcttagtacagctcttgcatatctagagagcaaaagatttgtacacagggacattgctgctcggaatgttctggtgtcctcaaatgattgtgtaaaattaggagactttggattatcccgatatatggaagatagtacttactacaaagcttccaaaggaaaattgcctattaaatggatggctccagagtcaatcaattttcgacgttttacctcagctagtgacgtatggatgtttggtgtgtgtatgtgggagatactgatgcatggtgtgaagccttttcaaggagtgaagaacaatgatgtaatcggtcgaattgaaaatggggaaagattaccaatgcctccaaattgtcctcctaccctctacagccttatgacgaaatgctgggcctatgaccccagcaggcggcccaggtttactgaacttaaagctcagctcagcacaatcctggaggaagagaaggctcagcaagaagagcgcatgaggatggagtccagaagacaggccacagtgtcctgggactccggagggtctgatgaagcaccgcccaagcccagcagaccgggttatcccagtccgaggtccagcgaaggattttatcccagcccacagcacatggtacaaaccaatcattaccaggtttctggctaccctggttcacatggaatcacagccatggctggcagcatctatccaggtcaggcatctcttttggaccaaacagattcatggaatcatagacctcaggagatagcaatgtggcagcccaatgtggaggactctacagtattggacctgcgagggattgggcaagtgttgccaacccatctgatggaagagcgtctaatccgacagcaacaggaaatggaagaagatcagcgctggctggaaaaagaggaaagatttctgaaacctgatgtgagactctctcgaggcagtattgacagggaggatggaagtcttcagggtccgattggaaaccaacatatatatcagcctgtgggtaaaccaggtaaagaagaaaagaattgggcggaaagaaatcctgcagctccaccaaagaaaccgcctcgccctggagctcccggtcatctgggaagccttgccagcctcagcagccctgctgacagctacaacgagggtgtcaagccaaatcagcttcagccccaggaaatcagcccccctcctactgccaacctggaccggtcgaatgataaggtgtacgagaatgtgacgggcctggtgaaagctgtcatcgagatgtccagtaaaatccagccagccccaccagaggagtatgtccctatggtgaaggaagtcggcttggccctgaggacattattggccactgtggatgagaccattcccctcctaccagccagcacccaccgagagattgagatggcacagaagctattgaactctgacctgggtgagctcatcaacaagatgaaactggcccagcagtatgtcatgaccagcctccagcaagagtacaaaaagcaaatgctgactgctgctcacgccctggctgtggatgccaaaaacttactcgatgtcattgaccaagcaagactgaaaatgcttgggcagacgagaccacactgagcctcccctaggagcacgtcttgctaccctcttttgaagatgttctctagccttccaccagcagcgaggaattaaccctgtgtcctcagtcgccagcacttacagctccaacttttttgaatgaccatctggttgaaaaatctttctcatataagtttaaccacactttgatttgggttcattttttgttttgtttttttcaatcatgatattcagaaaaatccaggatccaaaatgtggcgtttttctaagaatgaaaattatatgtaagcttttaagcatcatgaagaacaatttatgttcacattaagatacgttctaaagggggatggccaaggggtgacatcttaattcctaaactaccttagctgcatagtggaagaggagagcatgaagcaaagaattccaggaaacccaagaggctgagaattcttttgtctaccatagaattattatccagactggaatttttgtttgttagaacacccttcagttgcaatatgctaatcccactttacaaagaatataaaagctatattttgaagacttgagttatttcagaaaaaactacagccctttttgtcttacctgccttttactttcgtgtggatatgtgaagcattgggtcgggaactagctgtagaacacaactaaaaactcatgtcttttttcacagaataatgtgccagttttttgtagcaatgttatttctcttggaagcagaaatgctttgtaccagagcacctccaaactgcattgaggagaagttccagaaccatcccctttttccatttttatataatttataaagaaagattaaagccatgttgactattttacagccactggagttaactaacccttccttgtatctgtcttcccaggagagaatgaagcaaaacaggaatttggttttcttttgatgtccagttacaccatccattctgttaattttgaaaaaatataccctccctttagtttgttgggggatataaattattctcaggaagaatataatgaactgtacagttactttgacctattaaaaaggtgttaccagtaaa

SEQ ID NO: 3408 - DNA, 4564 bp, Homo sapiens
  source 1..4564: mol_type = genomic DNA
gaccactgtgagcccgcggcgtgaggcgtgggaggaagcgcggctgctgtcgcccagcgccgccccgtcgtcgtctgccttcgcttcacggcgccgagccgcggtccgagcagaactggggctcccttgcatcttccagttacaaattcagtgccttctgcagtttccccagagctcctcaagaataacggaagggagaatatgacagatacctagcatctagcaaaataatggcagctgcttaccttgaccccaacttgaatcacacaccaaattcgagtactaagactcacctgggtactggtatggaacgttctcctggtgcaatggagcgagtattaaaggtctttcattattttgaaagcaatagtgagccaaccacctgggccagtattatcaggcatggagatgctactgatgtcaggggcatcattcagaagatagtggacagtcacaaagtaaagcatgtggcctgctatggattccgcctcagtcacctgcggtcagaggaggttcactggcttcacgtggatatgggcgtctccagtgtgagggagaagtatgagcttgctcacccaccagaggagtggaaatatgaattgagaattcgttatttgccaaaaggatttctaaaccagtttactgaagataagccaactttgaatttcttctatcaacaggtgaagagcgattatatgttagagatagctgatcaagtggaccaggaaattgctttgaagttgggttgtctagaaatacggcgatcatactgggagatgcggggcaatgcactagaaaagaagtctaactatgaagtattagaaaaagatgttggtttaaagcgattttttcctaagagtttactggattctgtcaaggccaaaacactaagaaaactgatccaacaaacatttagacaatttgccaaccttaatagagaagaaagtattctgaaattctttgagatcctgtctccagtctacagatttgataaggaatgcttcaagtgtgctcttggttcaagctggattatttcagtggaactggcaatcggcccagaagaaggaatcagttacctaacggacaagggctgcaatcccacacatcttgctgacttcactcaagtgcaaaccattcagtattcaaacagtgaagacaaggacagaaaaggaatgctacaactaaaaatagcaggtgcacccgagcctctgacagtgacggcaccatccctaaccattgcggagaatatggctgacctaatagatgggtactgccggctggtgaatggaacctcgcagtcatttatcatcagacctcagaaagaaggtgaacgggctttgccatcaataccaaagttggccaacagcgaaaagcaaggcatgcggacacacgccgtctctgtgtcaggagtcagtcactgccaacataaagttaagaaagctaggcgctttctccctttggtcttctgttcccatgatcctccttctacggatgaaattagtggggacgaaacagatgattatgctgagattatagatgaagaagatacttacaccatgccctcaaccagggattatgagattcaaagagaaagaatagaacttggacgatgtattggagaaggccaatttggagatgtacatcaaggcatttatatgagtccagagaatccagctttggcggttgcaattaaaacatgtaaaaactgtacttcggacagcgtgagagagaaatttcttcaagaagccttaacaatgcgtcagtttgaccatcctcatattgtgaagctgattggagtcatcacagagaatcctgtctggataatcatggagctgtgcacacttggagagctgaggtcatttttgcaagtaaggaaatacagtttggatctagcatctttgatcctgtatgcctatcagcttagtacagctcttgcatatctagagagcaaaagatttgtacacagggacattgctgctcggaatgttctggtgtcctcaaatgattgtgtaaaattaggagactttggattatcccgatatatggaagatagtacttactacaaagcttccaaaggaaaattgcctattaaatggatggctccagagtcaatcaattttcgacgttttacctcagctagtgacgtatggatgtttggtgtgtgtatgtgggagatactgatgcatggtgtgaagccttttcaaggagtgaagaacaatgatgtaatcggtcgaattgaaaatggggaaagattaccaatgcctccaaattgtcctcctaccctctacagccttatgacgaaatgctgggcctatgaccccagcaggcggcccaggtttactgaacttaaagctcagctcagcacaatcctggaggaagagaaggctcagcaagaagagcgcatgaggatggagtccagaagacaggccacagtgtcctgggactccggagggtctgatgaagcaccgcccaagcccagcagaccgggttatcccagtccgaggtccagcgaaggattttatcccagcccacagcacatggtacaaaccaatcattaccaggtttctggctaccctggttcacatggaatcacagccatggctggcagcatctatccaggtcaggcatctcttttggaccaaacagattcatggaatcatagacctcaggagatagcaatgtggcagcccaatgtggaggactctacagtattggacctgcgagggattgggcaagtgttgccaacccatctgatggaagagcgtctaatccgacagcaacaggaaatggaagaagatcagcgctggctggaaaaagaggaaagatttctgaaacctgatgtgagactctctcgaggcagtattgacagggaggatggaagtcttcagggtccgattggaaaccaacatatatatcagcctgtgggtaaaccagatcctgcagctccaccaaagaaaccgcctcgccctggagctcccggtcatctgggaagccttgccagcctcagcagccctgctgacagctacaacgagggtgtcaagccttgcagacttcagccccaggaaatcagcccccctcctactgccaacctggaccggtcgaatgataaggtgtacgagaatgtgacgggcctggtgaaagctgtcatcgagatgtccagtaaaatccagccagccccaccagaggagtatgtccctatggtgaaggaagtcggcttggccctgaggacattattggccactgtggatgagaccattcccctcctaccagccagcacccaccgagagattgagatggcacagaagctattgaactctgacctgggtgagctcatcaacaagatgaaactggcccagcagtatgtcatgaccagcctccagcaagagtacaaaaagcaaatgctgactgctgctcacgccctggctgtggatgccaaaaacttactcgatgtcattgaccaagcaagactgaaaatgcttgggcagacgagaccacactgagcctcccctaggagcacgtcttgctaccctcttttgaagatgttctctagccttccaccagcagcgaggaattaaccctgtgtcctcagtcgccagcacttacagctccaacttttttgaatgaccatctggttgaaaaatctttctcatataagtttaaccacactttgatttgggttcattttttgttttgtttttttcaatcatgatattcagaaaaatccaggatccaaaatgtggcgtttttctaagaatgaaaattatatgtaagcttttaagcatcatgaagaacaatttatgttcacattaagatacgttctaaagggggatggccaaggggtgacatcttaattcctaaactaccttagctgcatagtggaagaggagagcatgaagcaaagaattccaggaaacccaagaggctgagaattcttttgtctaccatagaattattatccagactggaatttttgtttgttagaacacccttcagttgcaatatgctaatcccactttacaaagaatataaaagctatattttgaagacttgagttatttcagaaaaaactacagccctttttgtcttacctgccttttactttcgtgtggatatgtgaagcattgggtcgggaactagctgtagaacacaactaaaaactcatgtcttttttcacagaataatgtgccagttttttgtagcaatgttatttctcttggaagcagaaatgctttgtaccagagcacctccaaactgcattgaggagaagttccagaaccatcccctttttccatttttatataatttataaagaaagattaaagccatgttgactattttacagccactggagttaactaacccttccttgtatctgtcttcccaggagagaatgaagcaaaacaggaatttggttttcttttgatgtccagttacaccatccattctgttaattttgaaaaaatataccctccctttagtttgttgggggatataaattattctcaggaagaatataatgaactgtacagttactttgacctattaaaaaggtgttaccagtaaa

SEQ ID NO: 3409 - DNA, 1940 bp, Homo sapiens
  source 1..1940: mol_type = genomic DNA
aacagcacattctagcctccagccaagcaggaatgtctttttaaacagttgagcaaattcccagattagaaagtctggtgcactgatgtcactctttcctgagtaatttttgggtggttgtttactgcacactatctaccaggagcctagaaactttgaatgagtgtcattattagaactctagagttgtaggaatgtaggaagagctgtttgccacagttaggacgagggtttcaaactgtctgctgagccctggggcatctgcgtggaatgggaaactagcaaagtctcgctttggctgcattctgaggggtttatgtgatggcaaacagccaagatgaagaagctgcctagcagtcgctgcagcggctgcagcgttatgtgggacttcagatagcttctgagtagtcaagcagtgcacaatcctggaggaagagaaggctcagcaagaagagcgcatgaggatggagtccagaagacaggccacagtgtcctgggactccggagggtctgatgaagcaccgcccaagcccagcagaccgggttatcccagtccgaggtccagcgaaggattttatcccagcccacagcacatggtacaaaccaatcattaccaggtttctggctaccctggttcacatggaatcacagccatggctggcagcatctatccaggtcaggcatctcttttggaccaaacagattcatggaatcatagacctcaggagatagcaatgtggcagcccaatgtggaggactctacagtattggacctgcgagggattgggcaagtgttgccaacccatctgatggaagagcgtctaatccgacagcaacaggaaatggaagaagatcagcgctggctggaaaaagaggaaagatttctgaaacctgatgtgagactctctcgaggcagtattgacagggaggatggaagtcttcagggtccgattggaaaccaacatatatatcagcctgtgggtaaaccagatcctgcagctccaccaaagaaaccgcctcgccctggagctcccggtcatctgggaagccttgccagcctcagcagccctgctgacagctacaacgagggtgtcaagcttcagccccaggaaatcagcccccctcctactgccaacctggaccggtcgaatgataaggtgtacgagaatgtgacgggcctggtgaaagctgtcatcgagatgtccagtaaaatccagccagccccaccagaggagtatgtccctatggtgaaggaagtcggcttggccctgaggacattattggccactgtggatgagaccattcccctcctaccagccagcacccaccgagagattgagatggcacagaagctattgaactctgacctgggtgagctcatcaacaagatgaaactggcccagcagtatgtcatgaccagcctccagcaagagtacaaaaagcaaatgctgactgctgctcacgccctggctgtggatgccaaaaacttactcgatgtcattgaccaagcaagactgaaaatgcttgggcagacgagaccacactgagcctcccctaggagcacgtcttgctaccctcttttgaagatgttctctagccttccaccagcagcgaggaattaaccctgtgtcctcagtcgccagcacttacagctccaacttttttgaatgaccatctggttgaaaaatctttctcatataagtttaaccacactttgatttgggttcattttttgttttgtttttttcaatcatgatattcagaaaaatccaggatccaaaatgtggcgtttttctaagaatgaaaattatatgtaagcttttaagcatcatgaagaacaatttatgttcacattaagatacgttctaaagggggatggccaaggggtgacatcttaattcctaaactaccttagctgcatagtggaagaggagagcatg

SEQ ID NO: 3410 - DNA, 571 bp, Homo sapiens
  source 1..571: mol_type = genomic DNA
ataaccaactagctcctcgctgaaactggctcacaccgcggaagcccgggtcggtgtcggggcgagccttccctccttttcctggagcccgtctcaggcagaactggggctcccttgcatcttccagttacaaattcagtgccttctgcagtttccccagagctcctcaagaataacggaagggagaatatgacagatacctagcatctagcaaaataatggcagctgcttaccttgaccccaacttgaatcacacaccaaattcgagtactaagactcacctgggtactggtatggaacgttctcctggtgcaatggagcgagtattaaaggtctttcattattttgaaagcaatagtgagccaaccacctgggccagtattatcaggcatggagatgctactgatgtcaggggcatcattcagaagatagtggacagtcacaaagtaaagcatgtggcctgctatggattccgcctcagtcacctgcggtcagaggaggttcactggcttcacgtggatatgggcgtctccagtgtgagggagaagtatgagcttgctcacccaccaga

SEQ ID NO: 3411 - DNA, 4661 bp, Homo sapiens
  source 1..4661: mol_type = genomic DNA
taggaacacagagccatggggtcacattactaagctggtttcattctgttcagtagcttgatctagccaggatggtctgtgtttcagattgcggaagcatgagaagattctgtaactgagaggcattcttcaagctgctggaaaatattacagaaggaacaccttccaaattttgcttcaagctctgaaaaaaggagcacacaggggaaccttagtcttgcttgtggatcgaagcaaatactatcacagcgaggaactgggactttgtgtgcagactcctggcttgatctttataggattgggtgtatgttgttggaactggcaggccaagaggccctgaaaccagcaggtgccatctatatggagaaaagcggatgtagtccatttccagtgtgttgggctaaagaatatgacagatacctagcatctagcaaaataatggcagctgcttaccttgaccccaacttgaatcacacaccaaattcgagtactaagactcacctgggtactggtatggaacgttctcctggtgcaatggagcgagtattaaaggtctttcattattttgaaagcaatagtgagccaaccacctgggccagtattatcaggcatggagatgctactgatgtcaggggcatcattcagaagatagtggacagtcacaaagtaaagcatgtggcctgctatggattccgcctcagtcacctgcggtcagaggaggttcactggcttcacgtggatatgggcgtctccagtgtgagggagaagtatgagcttgctcacccaccagaggagtggaaatatgaattgagaattcgttatttgccaaaaggatttctaaaccagtttactgaagataagccaactttgaatttcttctatcaacaggtgaagagcgattatatgttagagatagctgatcaagtggaccaggaaattgctttgaagttgggttgtctagaaatacggcgatcatactgggagatgcggggcaatgcactagaaaagaagtctaactatgaagtattagaaaaagatgttggtttaaagcgattttttcctaagagtttactggattctgtcaaggccaaaacactaagaaaactgatccaacaaacatttagacaatttgccaaccttaatagagaagaaagtattctgaaattctttgagatcctgtctccagtctacagatttgataaggaatgcttcaagtgtgctcttggttcaagctggattatttcagtggaactggcaatcggcccagaagaaggaatcagttacctaacggacaagggctgcaatcccacacatcttgctgacttcactcaagtgcaaaccattcagtattcaaacagtgaagacaaggacagaaaaggaatgctacaactaaaaatagcaggtgcacccgagcctctgacagtgacggcaccatccctaaccattgcggagaatatggctgacctaatagatgggtactgccggctggtgaatggaacctcgcagtcatttatcatcagacctcagaaagaaggtgaacgggctttgccatcaataccaaagttggccaacagcgaaaagcaaggcatgcggacacacgccgtctctgtgtcagaaacagatgattatgctgagattatagatgaagaagatacttacaccatgccctcaaccagggattatgagattcaaagagaaagaatagaacttggacgatgtattggagaaggccaatttggagatgtacatcaaggcatttatatgagtccagagaatccagctttggcggttgcaattaaaacatgtaaaaactgtacttcggacagcgtgagagagaaatttcttcaagaagccttaacaatgcgtcagtttgaccatcctcatattgtgaagctgattggagtcatcacagagaatcctgtctggataatcatggagctgtgcacacttggagagctgaggtcatttttgcaagtaaggaaatacagtttggatctagcatctttgatcctgtatgcctatcagcttagtacagctcttgcatatctagagagcaaaagatttgtacacagggacattgctgctcggaatgttctggtgtcctcaaatgattgtgtaaaattaggagactttggattatcccgatatatggaagatagtacttactacaaagcttccaaaggaaaattgcctattaaatggatggctccagagtcaatcaattttcgacgttttacctcagctagtgacgtatggatgtttggtgtgtgtatgtgggagatactgatgcatggtgtgaagccttttcaaggagtgaagaacaatgatgtaatcggtcgaattgaaaatggggaaagattaccaatgcctccaaattgtcctcctaccctctacagccttatgacgaaatgctgggcctatgaccccagcaggcggcccaggtttactgaacttaaagctcagctcagcacaatcctggaggaagagaaggctcagcaagaagagcgcatgaggatggagtccagaagacaggccacagtgtcctgggactccggagggtctgatgaagcaccgcccaagcccagcagaccgggttatcccagtccgaggtccagcgaaggattttatcccagcccacagcacatggtacaaaccaatcattaccaggtttctggctaccctggttcacatggaatcacagccatggctggcagcatctatccaggtcaggcatctcttttggaccaaacagattcatggaatcatagacctcaggagatagcaatgtggcagcccaatgtggaggactctacagtattggacctgcgagggattgggcaagtgttgccaacccatctgatggaagagcgtctaatccgacagcaacaggaaatggaagaagatcagcgctggctggaaaaagaggaaagatttctgaaacctgatgtgagactctctcgaggcagtattgacagggaggatggaagtcttcagggtccgattggaaaccaacatatatatcagcctgtgggtaaaccagatcctgcagctccaccaaagaaaccgcctcgccctggagctcccggtcatctgggaagccttgccagcctcagcagccctgctgacagctacaacgagggtgtcaagcttcagccccaggaaatcagcccccctcctactgccaacctggaccggtcgaatgataaggtgtacgagaatgtgacgggcctggtgaaagctgtcatcgagatgtccagtaaaatccagccagccccaccagaggagtatgtccctatggtgaaggaagtcggcttggccctgaggacattattggccactgtggatgagaccattcccctcctaccagccagcacccaccgagagattgagatggcacagaagctattgaactctgacctgggtgagctcatcaacaagatgaaactggcccagcagtatgtcatgaccagcctccagcaagagtacaaaaagcaaatgctgactgctgctcacgccctggctgtggatgccaaaaacttactcgatgtcattgaccaagcaagactgaaaatgcttgggcagacgagaccacactgagcctcccctaggagcacgtcttgctaccctcttttgaagatgttctctagccttccaccagcagcgaggaattaaccctgtgtcctcagtcgccagcacttacagctccaacttttttgaatgaccatctggttgaaaaatctttctcatataagtttaaccacactttgatttgggttcattttttgttttgtttttttcaatcatgatattcagaaaaatccaggatccaaaatgtggcgtttttctaagaatgaaaattatatgtaagcttttaagcatcatgaagaacaatttatgttcacattaagatacgttctaaagggggatggccaaggggtgacatcttaattcctaaactaccttagctgcatagtggaagaggagagcatgaagcaaagaattccaggaaacccaagaggctgagaattcttttgtctaccatagaattattatccagactggaatttttgtttgttagaacacccttcagttgcaatatgctaatcccactttacaaagaatataaaagctatattttgaagacttgagttatttcagaaaaaactacagccctttttgtcttacctgccttttactttcgtgtggatatgtgaagcattgggtcgggaactagctgtagaacacaactaaaaactcatgtcttttttcacagaataatgtgccagttttttgtagcaatgttatttctcttggaagcagaaatgctttgtaccagagcacctccaaactgcattgaggagaagttccagaaccatcccctttttccatttttatataatttataaagaaagattaaagccatgttgactattttacagccactggagttaactaacccttccttgtatctgtcttcccaggagagaatgaagcaaaacaggaatttggttttcttttgatgtccagttacaccatccattctgttaattttgaaaaaatataccctccctttagtttgttgggggatataaattattctcaggaagaatataatgaactgtacagttactttgacctattaaaaaggtgttaccagtaaa

SEQ ID NO: 3412 - DNA, 4439 bp, Homo sapiens
  source 1..4439: mol_type = genomic DNA
tctctgactgcaatggaaagaggaaagagaaattagaagtatttttttaaattgtcatttgatttcttcagagttattgtgggcttctgaactattgcggaagcatgagaagattctgtaactgagaggcattcttcaagctgctggaaaatattacagaaggaacaccttccaaattttgcttcaagctctgaaaaaaggagcacacaggggaaccttagtcttgcttgtggatcgaagcaaatactatcacagcgaggaactgggactttgtgtgcagactcctggcttgatctttataggattgggtgtatgttgttggaactggcaggccaagaggccctgaaaccagcaggtgccatctatatggagaaaagcggatgtagtccatttccagtgtgttgggctaaagaatatgacagatacctagcatctagcaaaataatggcagctgcttaccttgaccccaacttgaatcacacaccaaattcgagtactaagactcacctgggtactggtatggaacgttctcctggtgcaatggagcgagtattaaaggtctttcattattttgaaagcaatagtgagccaaccacctgggccagtattatcaggcatggagatgctactgatgtcaggggcatcattcagaagatagtggacagtcacaaagtaaagcatgtggcctgctatggattccgcctcagtcacctgcggtcagaggaggttcactggcttcacgtggatatgggcgtctccagtgtgagggagaagtatgagcttgctcacccaccagaggagtggaaatatgaattgagaattcgttatttgccaaaaggatttctaaaccagtttactgaagataagccaactttgaatttcttctatcaacaggtgaagagcgattatatgttagagatagctgatcaagtggaccaggaaattgctttgaagttgggttgtctagaaatacggcgatcatactgggagatgcggggcaatgcactagaaaagaagtctaactatgaagtattagaaaaagatgttggtttaaagcgattttttcctaagagtttactggattctgtcaaggccaaaacactaagaaaactgatccaacaaacatttagacaatttgccaaccttaatagagaagaaagtattctgaaattctttgagatcctgtctccagtctacagatttgataaggaatgcttcaagtgtgctcttggttcaagctggattatttcagtggaactggcaatcggcccagaagaaggaatcagttacctaacggacaagggctgcaatcccacacatcttgctgacttcactcaagtgcaaaccattcagtattcaaacagtgaagacaaggacagaaaaggaatgctacaactaaaaatagcaggtgcacccgagcctctgacagtgacggcaccatccctaaccattgcggagaatatggctgacctaatagatgggtactgccggctggtgaatggaacctcgcagtcatttatcatcagacctcagaaagaaggtgaacgggctttgccatcaataccaaagttggccaacagcgaaaagcaaggcatgcggacacacgccgtctctgtgtcagaaacagatgattatgctgagattatagatgaagaagatacttacaccatgccctcaaccagggattatgagattcaaagagaaagaatagaacttggacgatgtattggagaaggccaatttggagatgtacatcaaggcatttatatgagtccagagaatccagctttggcggttgcaattaaaacatgtaaaaactgtacttcggacagcgtgagagagaaatttcttcaagaagccttaacaatgcgtcagtttgaccatcctcatattgtgaagctgattggagtcatcacagagaatcctgtctggataatcatggagctgtgcacacttggagagctgaggtcatttttgcaagtaaggaaatacagtttggatctagcatctttgatcctgtatgcctatcagcttagtacagctcttgcatatctagagagcaaaagatttgtacacagggacattgctgctcggaatgttctggtgtcctcaaatgattgtgtaaaattaggagactttggattatcccgatatatggaagatagtacttactacaaagcttccaaaggaaaattgcctattaaatggatggctccagagtcaatcaattttcgacgttttacctcagctagtgacgtatggatgtttggtgtgtgtatgtgggagatactgatgcatggtgtgaagccttttcaaggagtgaagaacaatgatgtaatcggtcgaattgaaaatggggaaagattaccaatgcctccaaattgtcctcctaccctctacagccttatgacgaaatgctgggcctatgaccccagcaggcggcccaggtttactgaacttaaagctcagctcagcacaatcctggaggaagagaaggctcagcaagaagagcgcatgaggatggagtccagaagacaggccacagtgtcctgggactccggagggtctgatgaagcaccgcccaagcccagcagaccgggttatcccagtccgaggtccagcgaaggattttatcccagcccacagcacatggtacaaaccaatcattaccaggtttctggctaccctggttcacatggaatcacagccatggctggcagcatctatccaggtcaggcatctcttttggaccaaacagattcatggaatcatagacctcaggagatagcaatgtggcagcccaatgtggaggactctacagtattggacctgcgagggattgggcaagtgttgccaacccatctgatggaagagcgtctaatccgacagcaacaggaaatggaagaagatcagcgctggctggaaaaagaggaaagatttctgaaacctgatgtgagactctctcgaggcagtattgacagggaggatggaagtcttcagggtccgattggaaaccaacatatatatcagcctgtgggtaaaccagatcctgcagctccaccaaagaaaccgcctcgccctggagctcccggtcatctgggaagccttgccagcctcagcagccctgctgacagctacaacgagggtgtcaagcttcagccccaggaaatcagcccccctcctactgccaacctggaccggtcgaatgataaggtgtacgagaatgtgacgggcctggtgaaagctgtcatcgagatgtccagtaaaatccagccagccccaccagaggagtatgtccctatggtgaaggaagtcggcttggccctgaggacattattggccactgtggatgagaccattcccctcctaccagccagcacccaccgagagattgagatggcacagaagctattgaactctgacctgggtgagctcatcaacaagatgaaactggcccagcagtatgtcatgaccagcctccagcaagagtacaaaaagcaaatgctgactgctgctcacgccctggctgtggatgccaaaaacttactcgatgtcattgaccaagcaagactgaaaatgcttgggcagacgagaccacactgagcctcccctaggagcacgtcttgctaccctcttttgaagatgttctctagccttccaccagcagcgaggaattaaccctgtgtcctcagtcgccagcacttacagctccaacttttttgaatgaccatctggttgaaaaatctttctcatataagtttaaccacactttgatttgggttcattttttgttttgtttttttcaatcatgatattcagaaaaatccaggatccaaaatgtggcgtttttctaagaatgaaaattatatgtaagcttttaagcatcatgaagaacaatttatgttcacattaagatacgttctaaagggggatggccaaggggtgacatcttaattcctaaactaccttagctgcatagtggaagaggagagcatgaagcaaagaattccaggaaacccaagaggctgagaattcttttgtctaccatagaattattatccagactggaatttttgtttgttagaacacccttcagttgcaatatgctaatcccactttacaaagaatataaaagctatattttgaagacttgagttatttcagaaaaaactacagccctttttgtcttacctgccttttactttcgtgtggatatgtgaagcattgggtcgggaactagctgtagaacacaactaaaaactcatgtcttttttcacagaataatgtgccagttttttgtagcaatgttatttctcttggaagcagaaatgctttgtaccagagcacctccaaactgcattgaggagaagttccagaaccatcccctttttccatttttatataatttataaagaaagattaaagccatgttgactatt

SEQ ID NO: 3413 - DNA, 3279 bp, Homo sapiens
  source 1..3279: mol_type = genomic DNA
agccctgtttgctctccgataaacaagtctgtgtattataacgtattggacaatgatgtcacttttatttccataaatgactcatgtgtgagcaaaatttgagtaatagtgttttaagaatatttcagcgtagtagaggatttaagcagatcgctttgcctactttaattatatgaaataccaggaggtcagatgtttaacctctttcaacatatctgtttcttttcctgcagaaacagatgattatgctgagattatagatgaagaagatacttacaccatgccctcaaccagggattatgagattcaaagagaaagaatagaacttggacgatgtattggagaaggccaatttggagatgtacatcaaggcatttatatgagtccagagaatccagctttggcggttgcaattaaaacatgtaaaaactgtacttcggacagcgtgagagagaaatttcttcaagaagccttaacaatgcgtcagtttgaccatcctcatattgtgaagctgattggagtcatcacagagaatcctgtctggataatcatggagctgtgcacacttggagagctgaggtcatttttgcaagtaaggaaatacagtttggatctagcatctttgatcctgtatgcctatcagcttagtacagctcttgcatatctagagagcaaaagatttgtacacagggacattgctgctcggaatgttctggtgtcctcaaatgattgtgtaaaattaggagactttggattatcccgatatatggaagatagtacttactacaaagcttccaaaggaaaattgcctattaaatggatggctccagagtcaatcaattttcgacgttttacctcagctagtgacgtatggatgtttggtgtgtgtatgtgggagatactgatgcatggtgtgaagccttttcaaggagtgaagaacaatgatgtaatcggtcgaattgaaaatggggaaagattaccaatgcctccaaattgtcctcctaccctctacagccttatgacgaaatgctgggcctatgaccccagcaggcggcccaggtttactgaacttaaagctcagctcagcacaatcctggaggaagagaaggctcagcaagaagagcgcatgaggatggagtccagaagacaggccacagtgtcctgggactccggagggtctgatgaagcaccgcccaagcccagcagaccgggttatcccagtccgaggtccagcgaaggattttatcccagcccacagcacatggtacaaaccaatcattaccaggtttctggctaccctggttcacatggaatcacagccatggctggcagcatctatccaggtcaggcatctcttttggaccaaacagattcatggaatcatagacctcaggagatagcaatgtggcagcccaatgtggaggactctacagtattggacctgcgagggattgggcaagtgttgccaacccatctgatggaagagcgtctaatccgacagcaacaggaaatggaagaagatcagcgctggctggaaaaagaggaaagatttctgaaacctgatgtgagactctctcgaggcagtattgacagggaggatggaagtcttcagggtccgattggaaaccaacatatatatcagcctgtgggtaaaccagatcctgcagctccaccaaagaaaccgcctcgccctggagctcccggtcatctgggaagccttgccagcctcagcagccctgctgacagctacaacgagggtgtcaagcttcagccccaggaaatcagcccccctcctactgccaacctggaccggtcgaatgataaggtgtacgagaatgtgacgggcctggtgaaagctgtcatcgagatgtccagtaaaatccagccagccccaccagaggagtatgtccctatggtgaaggaagtcggcttggccctgaggacattattggccactgtggatgagaccattcccctcctaccagccagcacccaccgagagattgagatggcacagaagctattgaactctgacctgggtgagctcatcaacaagatgaaactggcccagcagtatgtcatgaccagcctccagcaagagtacaaaaagcaaatgctgactgctgctcacgccctggctgtggatgccaaaaacttactcgatgtcattgaccaagcaagactgaaaatgcttgggcagacgagaccacactgagcctcccctaggagcacgtcttgctaccctcttttgaagatgttctctagccttccaccagcagcgaggaattaaccctgtgtcctcagtcgccagcacttacagctccaacttttttgaatgaccatctggttgaaaaatctttctcatataagtttaaccacactttgatttgggttcattttttgttttgtttttttcaatcatgatattcagaaaaatccaggatccaaaatgtggcgtttttctaagaatgaaaattatatgtaagcttttaagcatcatgaagaacaatttatgttcacattaagatacgttctaaagggggatggccaaggggtgacatcttaattcctaaactaccttagctgcatagtggaagaggagagcatgaagcaaagaattccaggaaacccaagaggctgagaattcttttgtctaccatagaattattatccagactggaatttttgtttgttagaacacccttcagttgcaatatgctaatcccactttacaaagaatataaaagctatattttgaagacttgagttatttcagaaaaaactacagccctttttgtcttacctgccttttactttcgtgtggatatgtgaagcattgggtcgggaactagctgtagaacacaactaaaaactcatgtcttttttcacagaataatgtgccagttttttgtagcaatgttatttctcttggaagcagaaatgctttgtaccagagcacctccaaactgcattgaggagaagttccagaaccatcccctttttccatttttatataatttataaagaaagattaaagccatgttgactattttacagccactggagttaactaacccttccttgtatctgtcttcccaggagagaatgaagcaaaacaggaatttggttttcttttgatgtccagttacaccatccattctgttaattttgaaaaaatataccctccctttagtttgttgggggatataaattattctcaggaagaatataatgaactgtacagttactttgacctattaaaaaggtgttaccagtaaa

SEQ ID NO: 3414 - DNA, 4129 bp, Homo sapiens
  source 1..4129: mol_type = genomic DNA
atatgacagatacctagcatctagcaaaataatggcagctgcttaccttgaccccaacttgaatcacacaccaaattcgagtactaagactcacctgggtactggtatggaacgttctcctggtgcaatggagcgagtattaaaggtctttcattattttgaaagcaatagtgagccaaccacctgggccagtattatcaggcatggagatgctactgatgtcaggggcatcattcagaagatagtggacagtcacaaagtaaagcatgtggcctgctatggattccgcctcagtcacctgcggtcagaggaggttcactggcttcacgtggatatgggcgtctccagtgtgagggagaagtatgagcttgctcacccaccagaggagtggaaatatgaattgagaattcgttatttgccaaaaggatttctaaaccagtttactgaagataagccaactttgaatttcttctatcaacaggtgaagagcgattatatgttagagatagctgatcaagtggaccaggaaattgctttgaagttgggttgtctagaaatacggcgatcatactgggagatgcggggcaatgcactagaaaagaagtctaactatgaagtattagaaaaagatgttggtttaaagcgattttttcctaagagtttactggattctgtcaaggccaaaacactaagaaaactgatccaacaaacatttagacaatttgccaaccttaatagagaagaaagtattctgaaattctttgagatcctgtctccagtctacagatttgataaggaatgcttcaagtgtgctcttggttcaagctggattatttcagtggaactggcaatcggcccagaagaaggaatcagttacctaacggacaagggctgcaatcccacacatcttgctgacttcactcaagtgcaaaccattcagtattcaaacagtgaagacaaggacagaaaaggaatgctacaactaaaaatagcaggtgcacccgagcctctgacagtgacggcaccatccctaaccattgcggagaatatggctgacctaatagatgggtactgccggctggtgaatggaacctcgcagtcatttatcatcagacctcagaaagaaggtgaacgggctttgccatcaataccaaagttggccaacagcgaaaagcaaggcatgcggacacacgccgtctctgtgtcagaaacagatgattatgctgagattatagatgaagaagatacttacaccatgccctcaaccagggattatgagattcaaagagaaagaatagaacttggacgatgtattggagaaggccaatttggagatgtacatcaaggcatttatatgagtccagagaatccagctttggcggttgcaattaaaacatgtaaaaactgtacttcggacagcgtgagagagaaatttcttcaagaagccttaacaatgcgtcagtttgaccatcctcatattgtgaagctgattggagtcatcacagagaatcctgtctggataatcatggagctgtgcacacttggagagctgaggtcatttttgcaagtaaggaaatacagtttggatctagcatctttgatcctgtatgcctatcagcttagtacagctcttgcatatctagagagcaaaagatttgtacacagggacattgctgctcggaatgttctggtgtcctcaaatgattgtgtaaaattaggagactttggattatcccgatatatggaagatagtacttactacaaagcttccaaaggaaaattgcctattaaatggatggctccagagtcaatcaattttcgacgttttacctcagctagtgacgtatggatgtttggtgtgtgtatgtgggagatactgatgcatggtgtgaagccttttcaaggagtgaagaacaatgatgtaatcggtcgaattgaaaatggggaaagattaccaatgcctccaaattgtcctcctaccctctacagccttatgacgaaatgctgggcctatgaccccagcaggcggcccaggtttactgaacttaaagctcagctcagcacaatcctggaggaagagaaggctcagcaagaagagcgcatgaggatggagtccagaagacaggccacagtgtcctgggactccggagggtctgatgaagcaccgcccaagcccagcagaccgggttatcccagtccgaggtccagcgaaggattttatcccagcccacagcacatggtacaaaccaatcattaccaggactctacagtattggacctgcgagggattgggcaagtgttgccaacccatctgatggaagagcgtctaatccgacagcaacaggaaatggaagaagatcagcgctggctggaaaaagaggaaagatttctgaaacctgatgtgagactctctcgaggcagtattgacagggaggatggaagtcttcagggtccgattggaaaccaacatatatatcagcctgtgggtaaaccagatcctgcagctccaccaaagaaaccgcctcgccctggagctcccggtcatctgggaagccttgccagcctcagcagccctgctgacagctacaacgagggtgtcaagcttcagccccaggaaatcagcccccctcctactgccaacctggaccggtcgaatgataaggtgtacgagaatgtgacgggcctggtgaaagctgtcatcgagatgtccagtaaaatccagccagccccaccagaggagtatgtccctatggtgaaggaagtcggcttggccctgaggacattattggccactgtggatgagaccattcccctcctaccagccagcacccaccgagagattgagatggcacagaagctattgaactctgacctgggtgagctcatcaacaagatgaaactggcccagcagtatgtcatgaccagcctccagcaagagtacaaaaagcaaatgctgactgctgctcacgccctggctgtggatgccaaaaacttactcgatgtcattgaccaagcaagactgaaaatgcttgggcagacgagaccacactgagcctcccctaggagcacgtcttgctaccctcttttgaagatgttctctagccttccaccagcagcgaggaattaaccctgtgtcctcagtcgccagcacttacagctccaacttttttgaatgaccatctggttgaaaaatctttctcatataagtttaaccacactttgatttgggttcattttttgttttgtttttttcaatcatgatattcagaaaaatccaggatccaaaatgtggcgtttttctaagaatgaaaattatatgtaagcttttaagcatcatgaagaacaatttatgttcacattaagatacgttctaaagggggatggccaaggggtgacatcttaattcctaaactaccttagctgcatagtggaagaggagagcatgaagcaaagaattccaggaaacccaagaggctgagaattcttttgtctaccatagaattattatccagactggaatttttgtttgttagaacacccttcagttgcaatatgctaatcccactttacaaagaatataaaagctatattttgaagacttgagttatttcagaaaaaactacagccctttttgtcttacctgccttttactttcgtgtggatatgtgaagcattgggtcgggaactagctgtagaacacaactaaaaactcatgtcttttttcacagaataatgtgccagttttttgtagcaatgttatttctcttggaagcagaaatgctttgtaccagagcacctccaaactgcattgaggagaagttccagaaccatcccctttttccatttttatataatttataaagaaagattaaagccatgttgactattttacagccactggagttaactaacccttccttgtatctgtcttcccaggagagaatgaagcaaaacaggaatttggttttcttttgatgtccagttacaccatccattctgttaattttgaaaaaatataccctccctttagtttgttgggggatataaattattctcaggaagaatataatgaactgtacagttactttgacctattaaaaaggtgttaccagtaaagttcttgttgtaa

SEQ ID NO: 3415 - DNA, 602 bp, Homo sapiens
  source 1..602: mol_type = genomic DNA
agcacggcctcgagggcgcgagcccgcgccgccgccgccgccgccggtcccggaccactgtgagcccgcggcgtgaggcgtgggaggaagcgcggctgctgtcgcccagcgccgccccgtcgtcgtctgccttcgcttcacggcgccgagccgcggtccgaatccatggttggttgaatctggatgtggaacccgctgacgtggatggctgactgtattaatatgacagatacctagcatctagcaaaataatggcagctgcttaccttgaccccaacttgaatcacacaccaaattcgagtactaagactcacctgggtactggtatggaacgttctcctggtgcaatggagcgagtattaaaggtctttcattattttgaaagcaatagtgagccaaccacctgggccagtattatcaggcatggagatgctactgatgtcaggggcatcattcagaagatagtggacagtcacaaagtaaagcatgtggcctgctatggattccgcctcagtcacctgcggtcagaggaggttcactggcttcacgtggatatgggcgtctccagtgtgagggagaagtatgagcttgctcacccacca

SEQ ID NO: 3416 - DNA, 570 bp, Homo sapiens
  source 1..570: mol_type = genomic DNA
acgtaaattttaagaaacttgttgggatggttgtgttctaaagttaaggaatcaaggatgatgtcaagaatatgacagatacctagcatctagcaaaataatggcagctgcttaccttgaccccaacttgaatcacacaccaaattcgagtactaagactcacctgggtactggtatggaacgttctcctggtgcaatggagcgagtattaaaggtctttcattattttgaaagcaatagtgagccaaccacctgggccagtattatcaggcatggagatgctactgatgtcaggggcatcattcagaagatagtggacagtcacaaagtaaagcatgtggcctgctatggattccgcctcagtcacctgcggtcagaggaggttcactggcttcacgtggatatgggcgtctccagtgtgagggagaagtatgagcttgctcacccaccagaggagtggaaatatgaattgagaattcgttatttgccaaaaggatttctaaaccagtttactgaagataagccaactttgaatttcttctatcaacaggtgaagagcgattatatgtt

SEQ ID NO: 3417 - DNA, 4405 bp, Homo sapiens
  source 1..4405: mol_type = genomic DNA
gcgcggctgctgtcgcccagcgccgccccgtcgtcgtctgccttcgcttcacggcgccgagccgcggtccgaagtcttgctgtgtcacccaggctgccaggctggagtggagtggcatgatctcggctgactgcaacctctgcctcccagaatatgacagatacctagcatctagcaaaataatggcagctgcttaccttgaccccaacttgaatcacacaccaaattcgagtactaagactcacctgggtactggtatggaacgttctcctggtgcaatggagcgagtattaaaggtctttcattattttgaaagcaatagtgagccaaccacctgggccagtattatcaggcatggagatgctactgatgtcaggggcatcattcagaagatagtggacagtcacaaagtaaagcatgtggcctgctatggattccgcctcagtcacctgcggtcagaggaggttcactggcttcacgtggatatgggcgtctccagtgtgagggagaagtatgagcttgctcacccaccagaggagtggaaatatgaattgagaattcgttatttgccaaaaggatttctaaaccagtttactgaagataagccaactttgaatttcttctatcaacaggtgaagagcgattatatgttagagatagctgatcaagtggaccaggaaattgctttgaagttgggttgtctagaaatacggcgatcatactgggagatgcggggcaatgcactagaaaagaagtctaactatgaagtattagaaaaagatgttggtttaaagcgattttttcctaagagtttactggattctgtcaaggccaaaacactaagaaaactgatccaacaaacatttagacaatttgccaaccttaatagagaagaaagtattctgaaattctttgagatcctgtctccagtctacagatttgataaggaatgcttcaagtgtgctcttggttcaagctggattatttcagtggaactggcaatcggcccagaagaaggaatcagttacctaacggacaagggctgcaatcccacacatcttgctgacttcactcaagtgcaaaccattcagtattcaaacagtgaagacaaggacagaaaaggaatgctacaactaaaaatagcaggtgcacccgagcctctgacagtgacggcaccatccctaaccattgcggagaatatggctgacctaatagatgggtactgccggctggtgaatggaacctcgcagtcatttatcatcagacctcagaaagaaggtgaacgggctttgccatcaataccaaagttggccaacagcgaaaagcaaggcatgcggacacacgccgtctctgtgtcagaaacagatgattatgctgagattatagatgaagaagatacttacaccatgccctcaaccagggattatgagattcaaagagaaagaatagaacttggacgatgtattggagaaggccaatttggagatgtacatcaaggcatttatatgagtccagagaatccagctttggcggttgcaattaaaacatgtaaaaactgtacttcggacagcgtgagagagaaatttcttcaagaagccttaacaatgcgtcagtttgaccatcctcatattgtgaagctgattggagtcatcacagagaatcctgtctggataatcatggagctgtgcacacttggagagctgaggtcatttttgcaagtaaggaaatacagtttggatctagcatctttgatcctgtatgcctatcagcttagtacagctcttgcatatctagagagcaaaagatttgtacacagggacattgctgctcggaatgttctggtgtcctcaaatgattgtgtaaaattaggagactttggattatcccgatatatggaagatagtacttactacaaagcttccaaaggaaaattgcctattaaatggatggctccagagtcaatcaattttcgacgttttacctcagctagtgacgtatggatgtttggtgtgtgtatgtgggagatactgatgcatggtgtgaagccttttcaaggagtgaagaacaatgatgtaatcggtcgaattgaaaatggggaaagattaccaatgcctccaaattgtcctcctaccctctacagccttatgacgaaatgctgggcctatgaccccagcaggcggcccaggtttactgaacttaaagctcagctcagcacaatcctggaggaagagaaggctcagcaagaagagcgcatgaggatggagtccagaagacaggccacagtgtcctgggactccggagggtctgatgaagcaccgcccaagcccagcagaccgggttatcccagtccgaggtccagcgaaggattttatcccagcccacagcacatggtacaaaccaatcattaccaggtttctggctaccctggttcacatggaatcacagccatggctggcagcatctatccaggtcaggcatctcttttggaccaaacagattcatggaatcatagacctcaggagatagcaatgtggcagcccaatgtggaggactctacagtattggacctgcgagggattgggcaagtgttgccaacccatctgatggaagagcgtctaatccgacagcaacaggaaatggaagaagatcagcgctggctggaaaaagaggaaagatttctgaaacctgatgtgagactctctcgaggcagtattgacagggaggatggaagtcttcagggtccgattggaaaccaacatatatatcagcctgtgggtaaaccagatcctgcagctccaccaaagaaaccgcctcgccctggagctcccggtcatctgggaagccttgccagcctcagcagccctgctgacagctacaacgagggtgtcaagcttcagccccaggaaatcagcccccctcctactgccaacctggaccggtcgaatgataaggtgtacgagaatgtgacgggcctggtgaaagctgtcatcgagatgtccagtaaaatccagccagccccaccagaggagtatgtccctatggtgaaggaagtcggcttggccctgaggacattattggccactgtggatgagaccattcccctcctaccagccagcacccaccgagagattgagatggcacagaagctattgaactctgacctgggtgagctcatcaacaagatgaaactggcccagcagtatgtcatgaccagcctccagcaagagtacaaaaagcaaatgctgactgctgctcacgccctggctgtggatgccaaaaacttactcgatgtcattgaccaagcaagactgaaaatgcttgggcagacgagaccacactgagcctcccctaggagcacgtcttgctaccctcttttgaagatgttctctagccttccaccagcagcgaggaattaaccctgtgtcctcagtcgccagcacttacagctccaacttttttgaatgaccatctggttgaaaaatctttctcatataagtttaaccacactttgatttgggttcattttttgttttgtttttttcaatcatgatattcagaaaaatccaggatccaaaatgtggcgtttttctaagaatgaaaattatatgtaagcttttaagcatcatgaagaacaatttatgttcacattaagatacgttctaaagggggatggccaaggggtgacatcttaattcctaaactaccttagctgcatagtggaagaggagagcatgaagcaaagaattccaggaaacccaagaggctgagaattcttttgtctaccatagaattattatccagactggaatttttgtttgttagaacacccttcagttgcaatatgctaatcccactttacaaagaatataaaagctatattttgaagacttgagttatttcagaaaaaactacagccctttttgtcttacctgccttttactttcgtgtggatatgtgaagcattgggtcgggaactagctgtagaacacaactaaaaactcatgtcttttttcacagaataatgtgccagttttttgtagcaatgttatttctcttggaagcagaaatgctttgtaccagagcacctccaaactgcattgaggagaagttccagaaccatcccctttttccatttttatataatttataaagaaagattaaagccatgttgactattttacagccactggagttaactaacccttccttgtatctgtcttcccaggagagaatgaagcaaaacaggaatttggttttcttttgatgtccagttacaccatccattctgttaattttgaaaaaatataccctccctttagtttgttgggggatataaattattctcaggaagaatataatgaactgtacagttactttgacctattaaaaaggtgttaccagtaaa

SEQ ID NO: 3418 - DNA, 630 bp, Homo sapiens
  source 1..630: mol_type = genomic DNA
gagcccgcgccgccgccgccgccgccggtcccggaccactgtgagcccgcggcgtgaggcgtgggaggaagcgcggctgctgtcgcccagcgccgccccgtcgtcgtctgccttcgcttcacggcgccgagccgcggtccgagcagaactggggctcccttgcatcttccagttacaaattcagtgccttctgcagtttccccagagctcctcaagaataacggaagggaggtatagtaatggttaagaaactttgcaaagaaagtgaataatgccagtactgtcaccttttggaacttgttggtatttcctgttgtctgtctttggaaggtatggaacctgtggtgacttaagagttgtataattgtgagagctaagcacagtccttgttattaaatgacagaatatgacagatacctagcatctagcaaaataatggcagctgcttaccttgaccccaacttgaatcacacaccaaattcgagtactaagactcacctgggtactggtatggaacgttctcctggtgcaatggagcgagtattaaaggtctttcattattttgaaagcaatagtgagccaaccacctgggccagtattatcaggcatggagatgctactgatgtcagg

SEQ ID NO: 3419 - DNA, 540 bp, Homo sapiens
  source 1..540: mol_type = genomic DNA
agccactggaggatcttgagcagaggcgtgacgtaaattttaagaaacttgttgggatggttgtgttctaaagttaaggaatcaaggatgatgtcaaggcagaactggggctcccttgcatcttccagttacaaattcagtgccttctgcagtttccccagagctcctcaagaataacggaagggagaatatgacagatacctagcatctagcaaaataatggcagctgcttaccttgaccccaacttgaatcacacaccaaattcgagtactaagactcacctgggtactggtatggaacgttctcctggtgcaatggagcgagtattaaaggtctttcattattttgaaagcaatagtgagccaaccacctgggccagtattatcaggcatggagatgctactgatgtcaggggcatcattcagaagatagtggacagtcacaaagtaaagcatgtggcctgctatggattccgcctcagtcacctgcggtcagaggaggttcactggcttcacgtggatatgggcgtctccagtgtg

SEQ ID NO: 3420 - DNA, 542 bp, Homo sapiens
  source 1..542: mol_type = genomic DNA
ttagtagagacggggttttaccgtcttggccaggctggtcttgaactcctgacttcaggtgatccacccaccttggcctcccaaagtgttgggattacaggcctgagccaccgtgcccggcagtgcttggtcttattaaacgctttatgaaagaatatgacagatacctagcatctagcaaaataatggcagctgcttaccttgaccccaacttgaatcacacaccaaattcgagtactaagactcacctgggtactggtatggaacgttctcctggtgcaatggagcgagtattaaaggtctttcattattttgaaagcaatagtgagccaaccacctgggccagtattatcaggcatggagatgctactgatgtcaggggcatcattcagaagatagtggacagtcacaaagtaaagcatgtggcctgctatggattccgcctcagtcacctgcggtcagaggaggttcactggcttcacgtggatatgggcgtctccagtgtgagggagaagtatgagcttgctcacccaccagaggag

SEQ ID NO: 3421 - DNA, 2393 bp, Homo sapiens
  source 1..2393: mol_type = genomic DNA
gcggagaatatggctgacctaatagatgggtactgccggctggtgaatggaacctcgcagtcatttatcatcagacctcagaaagaaggtgaacgggctttgccatcaataccaaagttggccaacagcgaaaagcaaggcatgcggacacacgccgtctctgtgtcaggagtcagtcactgccaacataaagttaagaaagctaggcgctttctccctttggtcttctgttcccatgatcctccttctacggatgaaattagtggggacgaaacagatgattatgctgagattatagatgaagaagatacttacaccatgccctcaaccagggattatgagattcaaagagaaagaatagaacttggacgatgtattggagaaggccaatttggagatgtacatcaaggcatttatatgagtccagagaatccagctttggcggttgcaattaaaacatgtaaaaactgtacttcggacagcgtgagagagaaatttcttcaagaagccttaacaatgcgtcagtttgaccatcctcatattgtgaagctgattggagtcatcacagagaatcctgtctggataatcatggagctgtgcacacttggagagctgaggtcatttttgcaagtaaggaaatacagtttggatctagcatctttgatcctgtatgcctatcagcttagtacagctcttgcatatctagagagcaaaagatttgtacacagggacattgctgctcggaatgttctggtgtcctcaaatgattgtgtaaaattaggagactttggattatcccgatatatggaagatagtacttactacaaagcttccaaaggaaaattgcctattaaatggatggctccagagtcaatcaattttcgacgttttacctcagctagtgacgtatggatgtttggtgtgtgtatgtgggagatactgatgcatggtgtgaagccttttcaaggagtgaagaacaatgatgtaatcggtcgaattgaaaatggggaaagattaccaatgcctccaaattgtcctcctaccctctacagccttatgacgaaatgctgggcctatgaccccagcaggcggcccaggtttactgaacttaaagctcagctcagcacaatcctggaggaagagaaggctcagcaagaagagcgcatgaggatggagtccagaagacaggccacagtgtcctgggactccggagggtctgatgaagcaccgcccaagcccagcagaccgggttatcccagtccgaggtccagcgaaggattttatcccagcccacagcacatggtacaaaccaatcattaccaggtttctggctaccctggttcacatggaatcacagccatggctggcagcatctatccaggtcaggcatctcttttggaccaaacagattcatggaatcatagacctcaggagatagcaatgtggcagcccaatgtggaggactctacagtattggacctgcgagggattgggcaagtgttgccaacccatctgatggaagagcgtctaatccgacagcaacaggaaatggaagaagatcagcgctggctggaaaaagaggaaagatttctgaaacctgatgtgagactctctcgaggcagtattgacagggaggatggaagtcttcagggtccgattggaaaccaacatatatatcagcctgtgggtaaaccagatcctgcagctccaccaaagaaaccgcctcgccctggagctcccggtcatctgggaagccttgccagcctcagcagccctgctgacagctacaacgagggtgtcaagccatggaggcttcagccccaggaaatcagcccccctcctactgccaacctggaccggtcgaatgataaggtgtacgagaatgtgacgggcctggtgaaagctgtcatcgagatgtccagtaaaatccagccagccccaccagaggagtatgtccctatggtgaaggaagtcggcttggccctgaggacattattggccactgtggatgagaccattcccctcctaccagccagcacccaccgagagattgagatggcacagaagctattgaactctgacctgggtgagctcatcaacaagatgaaactggcccagcagtatgtcatgaccagcctccagcaagagtacaaaaagcaaatgctgactgctgctcacgccctggctgtggatgccaaaaacttactcgatgtcattgaccaagcaagactgaaaatgcttgggcagacgagaccacactgagcctcccctaggagcacgtcttgctaccctcttttgaagatgttctctagccttccaccagcagcgaggaattaaccctgtgtcctcagtcgccagcacttacagctccaacttttttgaatgaccatctg

SEQ ID NO: 3422 - DNA, 4955 bp, Homo sapiens
  source 1..4955: mol_type = genomic DNA
gaccactgtgagcccgcggcgtgaggcgtgggaggaagcgcggctgctgtcgcccagcgccgccccgtcgtcgtctgccttcgcttcacggcgccgagccgcggtccgagcagaactggggctcccttgcatcttccagttacaaattcagtgccttctgcagtttccccagagctcctcaagaataacggaagggagaatatgacagatacctagcatctagcaaaataatggcagctgcttaccttgaccccaacttgaatcacacaccaaattcgagtactaagactcacctgggtactggtatggaacgttctcctggtgcaatggagcgagtattaaaggtctttcattattttgaaagcaatagtgagccaaccacctgggccagtattatcaggcatggagatgctactgatgtcaggggcatcattcagaagatagtggacagtcacaaagtaaagcatgtggcctgctatggattccgcctcagtcacctgcggtcagaggaggttcactggcttcacgtggatatgggcgtctccagtgtgagggagaagtatgagcttgctcacccaccagaggagtggaaatatgaattgagaattcgttatttgccaaaaggatttctaaaccagtttactgaagataagccaactttgaatttcttctatcaacaggtgaagagcgattatatgttagagatagctgatcaagtggaccaggaaattgctttgaagttgggttgtctagaaatacggcgatcatactgggagatgcggggcaatgcactagaaaagaagtctaactatgaagtattagaaaaagatgttggtttaaagcgattttttcctaagagtttactggattctgtcaaggccaaaacactaagaaaactgatccaacaaacatttagacaatttgccaaccttaatagagaagaaagtattctgaaattctttgagatcctgtctccagtctacagatttgataaggaatgcttcaagtgtgctcttggttcaagctggattatttcagtggaactggcaatcggcccagaagaaggaatcagttacctaacggacaagggctgcaatcccacacatcttgctgacttcactcaagtgcaaaccattcagtattcaaacagtgaagacaaggacagaaaaggaatgctacaactaaaaatagcaggtgcacccgagcctctgacagtgacggcaccatccctaaccattgcggagaatatggctgacctaatagatgggtactgccggctggtgaatggaacctcgcagtcatttatcatcagacctcagaaagaaggtgaacgggctttgccatcaataccaaagttggccaacagcgaaaagcaaggcatgcggacacacgccgtctctgtgtcagaaacagatgattatgctgagattatagatgaagaagatacttacaccatgccctcaaccagggattatgagattcaaagagaaagaatagaacttggacgatgtattggagaaggccaatttggagatgtacatcaaggcatttatatgagtccagagaatccagctttggcggttgcaattaaaacatgtaaaaactgtacttcggacagcgtgagagagaaatttcttcaagaagccttaacaatgcgtcagtttgaccatcctcatattgtgaagctgattggagtcatcacagagaatcctgtctggataatcatggagctgtgcacacttggagagctgaggtcatttttgcaagtaaggaaatacagtttggatctagcatctttgatcctgtatgcctatcagcttagtacagctcttgcatatctagagagcaaaagatttgtacacagggacattgctgctcggaatgttctggtgtcctcaaatgattgtgtaaaattaggagactttggattatcccgatatatggaagatagtacttactacaaagcttccaaaggaaaattgcctattaaatggatggctccagagtcaatcaattttcgacgttttacctcagctagtgacgtatggatgtttggtgtgtgtatgtgggagatactgatgcatggtgtgaagccttttcaaggagtgaagaacaatgatgtaatcggtcgaattgaaaatggggaaagattaccaatgcctccaaattgtcctcctaccctctacagccttatgacgaaatgctgggcctatgaccccagcaggcggcccaggtttactgaacttaaagctcagctcagcacaatcctggaggaagagaaggctcagcaagaagagcgcatgaggatggagtccagaagacaggccacagtgtcctgggactccggagggtctgatgaagcaccgcccaagcccagcagaccgggttatcccagtccgaggtccagcgaaggattttatcccagcccacagcacatggtacaaaccaatcattaccaggtttctggctaccctggttcacatggaatcacagccatggctggcagcatctatccaggtcaggcatctcttttggaccaaacagattcatggaatcatagacctcaggagatagcaatgtggcagcccaatgtggaggactctacagtattggacctgcgagggattgggcaagtgttgccaacccatctgatggaagagcgtctaatccgacagcaacaggaaatggaagaagatcagcgctggctggaaaaagaggaaagatttctgaaacctgatgtgagactctctcgaggcagtattgacagggaggatggaagtcttcagggtccgattggaaaccaacatatatatcagcctgtgggtaaaccagatcctgcagctccaccaaagaaaccgcctcgccctggagctcccggtcatctgggaagccttgccagcctcagcagccctgctgacagctacaacgagggtgtcaagcttcagccccaggaaatcagcccccctcctactgccaacctggaccggtcgaatgataaggtgtacgagaatgtgacgggcctggtgaaagctgtcatcgagatgtccagtaaaatccagccagccccaccagaggagtatgtccctatggtgaaggaagtcggcttggccctgaggacattattggccactgtggatgagaccattcccctcctaccagccagcacccaccgagagattgagatggcacagaagctattgaactctgacctgggtgagctcatcaacaagatgaaactggcccagcagtatgtcatgaccagcctccagcaagagtacaaaaagcaaatgctgactgctgctcacgccctggctgtggatgccaaaaacttactcgatgtcattgaccaagcaagactgaaaatgcttgggcagacgagaccacactgagcctcccctaggagcacgtcttgctaccctcttttgaagatgttctctagccttccaccagcagcgaggaattaaccctgtgtcctcagtcgccagcacttacagctccaacttttttgaatgaccatctggttgaaaaatctttctcatataagtttaaccacactttgatttgggttcattttttgttttgtttttttcaatcatgatattcagaaaaatccaggatccaaaatgtggcgtttttctaagaatgaaaattatatgtaagcttttaagcatcatgaagaacaatttatgttcacattaagatacgttctaaagggggatggccaaggggtgacatcttaattcctaaactaccttagctgcatagtggaagaggagagcatgaagcaaagaattccaggaaacccaagaggctgagaattcttttgtctaccatagaattattatccagactggaatttttgtttgttagaacacccttcagttgcaatatgctaatcccactttacaaagaatataaaagctatattttgaagacttgagttatttcagaaaaaactacagccctttttgtcttacctgccttttactttcgtgtggatatgtgaagcattgggtcgggaactagctgtagaacacaactaaaaactcatgtcttttttcacagaataatgtgccagttttttgtagcaatgttatttctcttggaagcagaaatgctttgtaccagagcacctccaaactgcattgaggagaagttccagaaccatcccctttttccatttttatataatttataaagaaagattaaagccatgttgactattttacagccactggagttaactaacccttccttgtatctgtcttcccaggagagaatgaagcaaaacaggaatttggttttcttttgatgtccagttacaccatccattctgttaattttgaaaaaatataccctccctttagtttgttgggggatataaattattctcaggaagaatataatgaactgtacagttactttgacctattaaaaaggtgttaccagtaaagttcttgttgtaatatcctttcttttggttctgtttcttcagatggcttttcaggtgacttgtcagataagataacatacaagagagttcccaataattatcaggaagcctctcactaattagtttctttttttttatttaatcttctaaacaagtcaaggatgttaccacagaagggtagcgtggcgtaagttaaccttttcattccatcgtcacctattaaatgcagagctcaggatggaagtagcaatggtcttcaatgaaagaaccttcccctgcgcagggtctcactattccgctaactcggactcaaagcataattcacttgtcaaggaaattgttagcatttcccaggcccaccctagtcttgctagaatctctgtgagccacagagcagggagcaaatagaactgagatctccagcactagggactcagactccaaagggagggatttgagtgaattttttccaggtaaatacatgctcttatgtgcaaaagca

SEQ ID NO: 3423 - DNA, 3236 bp, Homo sapiens
  source 1..3236: mol_type = genomic DNA
attgcggagaatatggctgacctaatagatgggtactgccggctggtgaatggaacctcgcagtcatttatcatcagacctcagaaagaaggtgaacgggctttgccatcaataccaaagttggccaacagcgaaaagcaaggcatgcggacacacgccgtctctgtgtcagaaacagatgattatgctgagattatagatgaagaagatacttacaccatgccctcaaaaagctatggaatagatgaagccagggattatgagattcaaagagaaagaatagaacttggacgatgtattggagaaggccaatttggagatgtacatcaaggcatttatatgagtccagagaatccagctttggcggttgcaattaaaacatgtaaaaactgtacttcggacagcgtgagagagaaatttcttcaagaagccttaacaatgcgtcagtttgaccatcctcatattgtgaagctgattggagtcatcacagagaatcctgtctggataatcatggagctgtgcacacttggagagctgaggtcatttttgcaagtaaggaaatacagtttggatctagcatctttgatcctgtatgcctatcagcttagtacagctcttgcatatctagagagcaaaagatttgtacacagggacattgctgctcggaatgttctggtgtcctcaaatgattgtgtaaaattaggagactttggattatcccgatatatggaagatagtacttactacaaagcttccaaaggaaaattgcctattaaatggatggctccagagtcaatcaattttcgacgttttacctcagctagtgacgtatggatgtttggtgtgtgtatgtgggagatactgatgcatggtgtgaagccttttcaaggagtgaagaacaatgatgtaatcggtcgaattgaaaatggggaaagattaccaatgcctccaaattgtcctcctaccctctacagccttatgacgaaatgctgggcctatgaccccagcaggcggcccaggtttactgaacttaaagctcagctcagcacaatcctggaggaagagaaggctcagcaagaagagcgcatgaggatggagtccagaagacaggccacagtgtcctgggactccggagggtctgatgaagcaccgcccaagcccagcagaccgggttatcccagtccgaggtccagcgaaggattttatcccagcccacagcacatggtacaaaccaatcattaccaggtttctggctaccctggttcacatggaatcacagccatggctggcagcatctatccaggtcaggcatctcttttggaccaaacagattcatggaatcatagacctcaggagatagcaatgtggcagcccaatgtggaggactctacagtattggacctgcgagggattgggcaagtgttgccaacccatctgatggaagagcgtctaatccgacagcaacaggaaatggaagaagatcagcgctggctggaaaaagaggaaagatttctgaaacctgatgtgagactctctcgaggcagtattgacagggaggatggaagtcttcagggtccgattggaaaccaacatatatatcagcctgtgggtaaaccagatcctgcagctccaccaaagaaaccgcctcgccctggagctcccggtcatctgggaagccttgccagcctcagcagccctgctgacagctacaacgagggtgtcaagcttcagccccaggaaatcagcccccctcctactgccaacctggaccggtcgaatgataaggtgtacgagaatgtgacgggcctggtgaaagctgtcatcgagatgtccagtaaaatccagccagccccaccagaggagtatgtccctatggtgaaggaagtcggcttggccctgaggacattattggccactgtggatgagaccattcccctcctaccagccagcacccaccgagagattgagatggcacagaagctattgaactctgacctgggtgagctcatcaacaagatgaaactggcccagcagtatgtcatgaccagcctccagcaagagtacaaaaagcaaatgctgactgctgctcacgccctggctgtggatgccaaaaacttactcgatgtcattgaccaagcaagactgaaaatgcttgggcagacgagaccacactgagcctcccctaggagcacgtcttgctaccctcttttgaagatgttctctagccttccaccagcagcgaggaattaaccctgtgtcctcagtcgccagcacttacagctccaacttttttgaatgaccatctggttgaaaaatctttctcatataagtttaaccacactttgatttgggttcattttttgttttgtttttttcaatcatgatattcagaaaaatccaggatccaaaatgtggcgtttttctaagaatgaaaattatatgtaagcttttaagcatcatgaagaacaatttatgttcacattaagatacgttctaaagggggatggccaaggggtgacatcttaattcctaaactaccttagctgcatagtggaagaggagagcatgaagcaaagaattccaggaaacccaagaggctgagaattcttttgtctaccatagaattattatccagactggaatttttgtttgttagaacacccttcagttgcaatatgctaatcccactttacaaagaatataaaagctatattttgaagacttgagttatttcagaaaaaactacagccctttttgtcttacctgccttttactttcgtgtggatatgtgaagcattgggtcgggaactagctgtagaacacaactaaaaactcatgtcttttttcacagaataatgtgccagttttttgtagcaatgttatttctcttggaagcagaaatgctttgtaccagagcacctccaaactgcattgaggagaagttccagaaccatcccctttttccatttttatataatttataaagaaagattaaagccatgttgactattttacagccactggagttaactaacccttccttgtatctgtcttcccaggagagaatgaagcaaaacaggaatttggttttcttttgatgtccagttacaccatccattctgttaattttgaaaaaatataccctccctttagtttgttgggggatataaattattctcaggaagaatataatgaactgtacagttactttgacctattaaaaaggtgttaccagt

SEQ ID NO: 3424 - DNA, 750 bp, Homo sapiens
  source 1..750: mol_type = genomic DNA
gggattacaggcacatgccaccacacccggctgatatttgtatttttagtagagacggggttttaccgtcttggccaggctggtcttgaactcctgacttcaggtgatccacccaccttggcctcccaaagtgttgggattacaggcctgagccaccgtgcccggcagtgcttggtcttattaaacgctttatgaaagttagcttggaaagttaacctaacttggaaagacacaatagcttgacactgttgctatttgttaaataaggcagaactggggctcccttgcatcttccagttacaaattcagtgccttctgcagtttccccagagctcctcaagaataacggaagggagaatatgacagatacctagcatctagcaaaataatggcagctgcttaccttgaccccaacttgaatcacacaccaaattcgagtactaagactcacctgggtactggtatggaacgttctcctggtgcaatggagcgagtattaaaggtctttcattattttgaaagcaatagtgagccaaccacctgggccagtattatcaggcatggagatgctactgatgtcaggggcatcattcagaagatagtggacagtcacaaagtaaagcatgtggcctgctatggattccgcctcagtcacctgcggtcagaggaggttcactggcttcacgtggatatgggcgtctccagtgtgagggagaagtatgagcttgctcacccaccagaggagtggaa

SEQ ID NO: 3425 - DNA, 475 bp, Homo sapiens
  source 1..475: mol_type = genomic DNA
gagcccgcgccgccgccgccgccgccggtcccggaccactgtgagcccgcggcgtgaggcgtgggaggaagcgcggctgctgtcgcccagcgccgccccgtcgtcgtctgccttcgcttcacggcgccgagccgcggtccgaatccatggttggttgaatctggatgtggaacccgctgacgtggatggctgactgtattgcagaactggggctcccttgcatcttccagttacaaattcagtgccttctgcagtttccccagagctcctcaagaataacggaagggagaatatgacagatacctagcatctagcaaaataatggcagctgcttaccttgaccccaacttgaatcacacaccaaattcgagtactaagactcacctgggtactggtatggaacgttctcctggtgcaatggagcgagtattaaaggtctttcattattttgaaagcaatagtgagccaaccacct

SEQ ID NO: 3426 - DNA, 4127 bp, Homo sapiens
  source 1..4127: mol_type = genomic DNA
atatgacagatacctagcatctagcaaaataatggcagctgcttaccttgaccccaacttgaatcacacaccaaattcgagtactaagactcacctgggtactggtatggaacgttctcctggtgcaatggagcgagtattaaaggtctttcattattttgaaagcaatagtgagccaaccacctgggccagtattatcaggcatggagatgctactgatgtcaggggcatcattcagaagatagtggacagtcacaaagtaaagcatgtggcctgctatggattccgcctcagtcacctgcggtcagaggaggttcactggcttcacgtggatatgggcgtctccagtgtgagggagaagtatgagcttgctcacccaccagaggagtggaaatatgaattgagaattcgttatttgccaaaaggatttctaaaccagtttactgaagataagccaactttgaatttcttctatcaacaggtgaagagcgattatatgttagagatagctgatcaagtggaccaggaaattgctttgaagttgggttgtctagaaatacggcgatcatactgggagatgcggggcaatgcactagaaaagaagtctaactatgaagtattagaaaaagatgttggtttaaagcgattttttcctaagagtttactggattctgtcaaggccaaaacactaagaaaactgatccaacaaacatttagacaatttgccaaccttaatagagaagaaagtattctgaaattctttgagatcctgtctccagtctacagatttgataaggaatgcttcaagtgtgctcttggttcaagctggattatttcagtggaactggcaatcggcccagaagaaggaatcagttacctaacggacaagggctgcaatcccacacatcttgctgacttcactcaagtgcaaaccattcagtattcaaacagtgaagacaaggacagaaaaggaatgctacaactaaaaatagcaggtgcacccgagcctctgacagtgacggcaccatccctaaccattgcggagaatatggctgacctaatagatgggtactgccggctggtgaatggaacctcgcagtcatttatcatcagacctcagaaagaaggtgaacgggctttgccatcaataccaaagttggccaacagcgaaaagcaaggcatgcggacacacgccgtctctgtgtcagaaacagatgattatgctgagattatagatgaagaagatacttacaccatgccctcaaccagggattatgagattcaaagagaaagaatagaacttggacgatgtattggagaaggccaatttggagatgtacatcaaggcatttatatgagtccagagaatccagctttggcggttgcaattaaaacatgtaaaaactgtacttcggacagcgtgagagagaaatttcttcaagaagccttaacaatgcgtcagtttgaccatcctcatattgtgaagctgattggagtcatcacagagaatcctgtctggataatcatggagctgtgcacacttggagagctgaggtcatttttgcaagtaaggaaatacagtttggatctagcatctttgatcctgtatgcctatcagcttagtacagctcttgcatatctagagagcaaaagatttgtacacagggacattgctgctcggaatgttctggtgtcctcaaatgattgtgtaaaattaggagactttggattatcccgatatatggaagatagtacttactacaaagcttccaaaggaaaattgcctattaaatggatggctccagagtcaatcaattttcgacgttttacctcagctagtgacgtatggatgtttggtgtgtgtatgtgggagatactgatgcatggtgtgaagccttttcaaggagtgaagaacaatgatgtaatcggtcgaattgaaaatggggaaagattaccaatgcctccaaattgtcctcctaccctctacagccttatgacgaaatgctgggcctatgaccccagcaggcggcccaggtttactgaacttaaagctcagctcagcacaatcctggaggaagagaaggctcagcaagaagagcgcatgaggatggagtccagaagacaggccacagtgtcctgggactccggagggtctgatgaagcaccgcccaagcccagcagaccgggttatcccagtccgaggtccagcgaaggattttatcccagcccacagcacatggtacaaaccaatcattaccaggactctacagtattggacctgcgagggattgggcaagtgttgccaacccatctgatggaagagcgtctaatccgacagcaacaggaaatggaagaagatcagcgctggctggaaaaagaggaaagatttctgaaacctgatgtgagactctctcgaggcagtattgacagggaggatggaagtcttcagggtccgattggaaaccaacatatatatcagcctgtgggtaaaccagatcctgcagctccaccaaagaaaccgcctcgccctggagctcccggtcatctgggaagccttgccagcctcagcagccctgctgacagctacaacgagggtgtcaagcttcagccccaggaaatcagcccccctcctactgccaacctggaccggtcgaatgataaggtgtacgagaatgtgacgggcctggtgaaagctgtcatcgagatgtccagtaaaatccagccagccccaccagaggagtatgtccctatggtgaaggaagtcggcttggccctgaggacattattggccactgtggatgagaccattcccctcctaccagccagcacccaccgagagattgagatggcacagaagctattgaactctgacctgggtgagctcatcaacaagatgaaactggcccagcagtatgtcatgaccagcctccagcaagagtacaaaaagcaaatgctgactgctgctcacgccctggctgtggatgccaaaaacttactcgatgtcattgaccaagcaagactgaaaatgcttgggcagacgagaccacactgagcctcccctaggagcacgtcttgctaccctcttttgaagatgttctctagccttccaccagcagcgaggaattaaccctgtgtcctcagtcgccagcacttacagctccaacttttttgaatgaccatctggttgaaaaatctttctcatataagtttaaccacactttgatttgggttcattttttgttttgtttttttcaatcatgatattcagaaaaatccaggatccaaaatgtggcgtttttctaagaatgaaaattatatgtaagcttttaagcatcatgaagaacaatttatgttcacattaagatacgttctaaagggggatggccaaggggtgacatcttaattcctaaactaccttagctgcatagtggaagaggagagcatgaagcaaagaattccaggaaacccaagaggctgagaattcttttgtctaccatagaattattatccagactggaatttttgtttgttagaacacccttcagttgcaatatgctaatcccactttacaaagaatataaaagctatattttgaagacttgagttatttcagaaaaaactacagccctttttgtcttacctgccttttactttcgtgtggatatgtgaagcattgggtcgggaactagctgtagaacacaactaaaaactcatgtcttttttcacagaataatgtgccagttttttgtagcaatgttatttctcttggaagcagaaatgctttgtaccagagcacctccaaactgcattgaggagaagttccagaaccatcccctttttccatttttatataatttataaagaaagattaaagccatgttgactattttacagccactggagttaactaacccttccttgtatctgtcttcccaggagagaatgaagcaaaacaggaatttggttttcttttgatgtccagttacaccatccattctgttaattttgaaaaaatataccctccctttagtttgttgggggatataaattattctcaggaagaatataatgaactgtacagttactttgacctattaaaaaggtgttaccagtaaagttcttgttgt

SEQ ID NO: 3427 - DNA, 3236 bp, Homo sapiens; identical to SEQ ID NO: 3423
  source 1..3236: mol_type = genomic DNA

SEQ ID NO: 3428 - DNA, 4414 bp, Homo sapiens
  source 1..4414: mol_type = genomic DNA
tgccttcgcttcacggcgccgagccgcggtccgagcagaactggggctcccttgcatcttccagttacaaattcagtgccttctgcagtttccccagagctcctcaagaataacggaagggagaatatgacagatacctagcatctagcaaaataatggcagctgcttaccttgaccccaacttgaatcacacaccaaattcgagtactaagactcacctgggtactggtatggaacgttctcctggtgcaatggagcgagtattaaaggtctttcattattttgaaagcaatagtgagccaaccacctgggccagtattatcaggcatggagatgctactgatgtcaggggcatcattcagaagatagtggacagtcacaaagtaaagcatgtggcctgctatggattccgcctcagtcacctgcggtcagaggaggttcactggcttcacgtggatatgggcgtctccagtgtgagggagaagtatgagcttgctcacccaccagaggagtggaaatatgaattgagaattcgttatttgccaaaaggatttctaaaccagtttactgaagataagccaactttgaatttcttctatcaacaggtgaagagcgattatatgttagagatagctgatcaagtggaccaggaaattgctttgaagttgggttgtctagaaatacggcgatcatactgggagatgcggggcaatgcactagaaaagaagtctaactatgaagtattagaaaaagatgttggtttaaagcgattttttcctaagagtttactggattctgtcaaggccaaaacactaagaaaactgatccaacaaacatttagacaatttgccaaccttaatagagaagaaagtattctgaaattctttgagatcctgtctccagtctacagatttgataaggaatgcttcaagtgtgctcttggttcaagctggattatttcagtggaactggcaatcggcccagaagaaggaatcagttacctaacggacaagggctgcaatcccacacatcttgctgacttcactcaagtgcaaaccattcagtattcaaacagtgaagacaaggacagaaaaggaatgctacaactaaaaatagcaggtgcacccgagcctctgacagtgacggcaccatccctaaccattgcggagaatatggctgacctaatagatgggtactgccggctggtgaatggaacctcgcagtcatttatcatcagacctcagaaagaaggtgaacgggctttgccatcaataccaaagttggccaacagcgaaaagcaaggcatgcggacacacgccgtctctgtgtcagaaacagatgattatgctgagattatagatgaagaagatacttacaccatgccctcaaccagggattatgagattcaaagagaaagaatagaacttggacgatgtattggagaaggccaatttggagatgtacatcaaggcatttatatgagtccagagaatccagctttggcggttgcaattaaaacatgtaaaaactgtacttcggacagcgtgagagagaaatttcttcaagaagccttaacaatgcgtcagtttgaccatcctcatattgtgaagctgattggagtcatcacagagaatcctgtctggataatcatggagctgtgcacacttggagagctgaggtcatttttgcaagtaaggaaatacagtttggatctagcatctttgatcctgtatgcctatcagcttagtacagctcttgcatatctagagagcaaaagatttgtacacagggacattgctgctcggaatgttctggtgtcctcaaatgattgtgtaaaattaggagactttggattatcccgatatatggaagatagtacttactacaaagcttccaaaggaaaattgcctattaaatggatggctccagagtcaatcaattttcgacgttttacctcagctagtgacgtatggatgtttggtgtgtgtatgtgggagatactgatgcatggtgtgaagccttttcaaggagtgaagaacaatgatgtaatcggtcgaattgaaaatggggaaagattaccaatgcctccaaattgtcctcctaccctctacagccttatgacgaaatgctgggcctatgaccccagcaggcggcccaggtttactgaacttaaagctcagctcagcacaatcctggaggaagagaaggctcagcaagaagagcgcatgaggatggagtccagaagacaggccacagtgtcctgggactccggagggtctgatgaagcaccgcccaagcccagcagaccgggttatcccagtccgaggtccagcgaaggattttatcccagcccacagcacatggtacaaaccaatcattaccaggtttctggctaccctggttcacatggaatcacagccatggctggcagcatctatccaggtcaggcatctcttttggaccaaacagattcatggaatcatagacctcaggagatagcaatgtggcagcccaatgtggaggactctacagtattggacctgcgagggattgggcaagtgttgccaacccatctgatggaagagcgtctaatccgacagcaacaggaaatggaagaagatcagcgctggctggaaaaagaggaaagatttctgaaacctgatgtgagactctctcgaggcagtattgacagggaggatggaagtcttcagggtccgattggaaaccaacatatatatcagcctgtgggtaaaccaggtaaagaagaaaagaattgggcggaaagaaatcctgcagctccaccaaagaaaccgcctcgccctggagctcccggtcatctgggaagccttgccagcctcagcagccctgctgacagctacaacgagggtgtcaagccatggaggcttcagccccaggaaatcagcccccctcctactgccaacctggaccggtcgaatgataaggtgtacgagaatgtgacgggcctggtgaaagctgtcatcgagatgtccagtaaaatccagccagccccaccagaggagtatgtccctatggtgaaggaagtcggcttggccctgaggacattattggccactgtggatgagaccattcccctcctaccagccagcacccaccgagagattgagatggcacagaagctattgaactctgacctgggtgagctcatcaacaagatgaaactggcccagcagtatgtcatgaccagcctccagcaagagtacaaaaagcaaatgctgactgctgctcacgccctggctgtggatgccaaaaacttactcgatgtcattgaccaagcaagactgaaaatgcttgggcagacgagaccacactgagcctcccctaggagcacgtcttgctaccctcttttgaagatgttctctagccttccaccagcagcgaggaattaaccctgtgtcctcagtcgccagcacttacagctccaacttttttgaatgaccatctggttgaaaaatctttctcatataagtttaaccacactttgatttgggttcattttttgttttgtttttttcaatcatgatattcagaaaaatccaggatccaaaatgtggcgtttttctaagaatgaaaattatatgtaagcttttaagcatcatgaagaacaatttatgttcacattaagatacgttctaaagggggatggccaaggggtgacatcttaattcctaaactaccttagctgcatagtggaagaggagagcatgaagcaaagaattccaggaaacccaagaggctgagaattcttttgtctaccatagaattattatccagactggaatttttgtttgttagaacacccttcagttgcaatatgctaatcccactttacaaagaatataaaagctatattttgaagacttgagttatttcagaaaaaactacagccctttttgtcttacctgccttttactttcgtgtggatatgtgaagcattgggtcgggaactagctgtagaacacaactaaaaactcatgtcttttttcacagaataatgtgccagttttttgtagcaatgttatttctcttggaagcagaaatgctttgtaccagagcacctccaaactgcattgaggagaagttccagaaccatcccctttttccatttttatataatttataaagaaagattaaagccatgttgactattttacagccactggagttaactaacccttccttgtatctgtcttcccaggagagaatgaagcaaaacaggaatttggttttcttttgatgtccagttacaccatccattctgttaattttgaaaaaatataccctccctttagtttgttgggggatataaattattctcaggaagaatataatgaactgtacagttactttgacctattaaaaaggtgttaccagt

SEQ ID NO: 3429 - DNA, 4589 bp, Homo sapiens
  source 1..4589: mol_type = genomic DNA
gcagttcccgcctcctcaggtccgggcgggtccctggccggggtagcacggaagggtctcccaggcggcgtagtagggcttccgtgttactggaaacctacttccggctgcaaatgggaaaaggagcctctaccttaaccaatccccgggaacctcaggcccgcggatgggagaaaccagagatgccaacttcctgcttccgaagtagtggctgggtcttaaagcaccgatgtttctgcattgaatagccctggaagacagaattcttgtctctccaaagatctggcagacttattcccaattataagagatccttgcaaaggaggtgtcttgcttcaccttcaccttccactgtgattgtaagttttctgaggcctcgccagccatgcggaactgaataggactagcaacttcatagacggttgtgaagacaagctagacggcagatgaaagttcttggcacagagtgaacacttgataaactatatggcagggagggctggaacggggcttgtttgaagagcaatatgagccagggttatagacctgagtttggggtaagagtggaacatccaaatggaagagtccagcagctgaaaggacatttgttcaaaggcctttttcattacagttttctccttcttctgatccagccacagcctccggagccgttgcacacctacctgcccggccgacttacctgtacttgccgccgtcccggctcacctggcggtgcccgaggagtagtcgctggagtccgcgcctccctgggactgcaatgtgccgatcttagctgctgcctgagaggatgtctggggtgtccgagcccctgagtcgagtaaagttgggcacgttacgccggcctgaaggccctgcagagcccatggtggtggtaccagtagatgtggaaaaggaggacgtgcgtatcctcaaggtctgcttctatagcaacagcttcaatcctgggaaaaacttcaaactggtcaaatgcactgtccagacggagatccgggagatcatcacctccatcctgctgagcgggcggatcgggcccaacatccggttggctgagtgctatgggctgaggctgaagcacatgaagtccgatgagatccactggctgcacccacagatgacggtgggtgaggtgcaggacaagtatgagtgtctgcacgtggaagccgagtggaggtatgaccttcaaatccgctacttgccagaagacttcatggagagcctgaaggaggacaggaccacgctgctctatttttaccaacagctccggaacgactacatgcagcgctacgccagcaaggtcagcgagggcatggccctgcagctgggctgcctggagctcaggcggttcttcaaggatatgccccacaatgcacttgacaagaagtccaacttcgagctcctagaaaaggaagtggggctggacttgtttttcccaaagcagatgcaggagaacttaaagcccaaacagttccggaagatgatccagcagaccttccagcagtacgcctcgctcagggaggaggagtgcgtcatgaagttcttcaacactctcgccggcttcgccaacatcgaccaggagacctaccgctgtgaactcattcaaggatggaacattactgtggacctggtcattggccctaaagggatccgccagctgactagtcaggacgcaaagcccacctgcctggccgagttcaagcagatcaggtccatcaggtgcctcccgctggaggagggccaggcagtacttcagctgggcattgaaggtgccccccaggccttgtccatcaaaacctcatccctagcagaggctgagaacatggctgacctcatagacggctactgccggctgcagggtgagcaccaaggctctctcatcatccatcctaggaaagatggtgagaagcggaacagcctgccccagatccccatgctaaacctggaggcccggcggtcccacctctcagagagctgcagcatagagtcagacatctacgcagagattcccgacgaaaccctgcgaaggcccggaggtccacagtatggcattgcccgtgaagatgtggtcctgaatcgtattcttggggaaggcttttttggggaggtctatgaaggtgtctacacaaatcacaaaggggagaaaatcaatgtagctgtcaagacctgcaagaaagactgcactctggacaacaaggagaagttcatgagcgaggcagtgatcatgaagaacctcgaccacccgcacatcgtgaagctgatcggcatcattgaagaggagcccacctggatcatcatggaattgtatccctatggggagctgggccactacctggagcggaacaagaactccctgaaggtgctcaccctcgtgctgtactcactgcagatatgcaaagccatggcctacctggagagcatcaactgcgtgcacagggacattgctgtccggaacatcctggtggcctcccctgagtgtgtgaagctgggggactttggtctttcccggtacattgaggacgaggactattacaaagcctctgtgactcgtctccccatcaaatggatgtccccagagtccattaacttccgacgcttcacgacagccagtgacgtctggatgttcgccgtgtgcatgtgggagatcctgagctttgggaagcagcccttcttctggctggagaacaaggatgtcatcggggtgctggagaaaggagaccggctgcccaagcctgatctctgtccaccggtcctttataccctcatgacccgctgctgggactacgaccccagtgaccggccccgcttcaccgagctggtgtgcagcctcagtgacgtttatcagatggagaaggacattgccatggagcaagagaggaatgctcgctaccgaacccccaaaatcttggagcccacagccttccaggaacccccacccaagcccagccgacctaagtacagaccccctccgcaaaccaacctcctggctccaaagctgcagttccaggaggaggacttcatccaacccagcagccgagaagaggcccagcagctgtgggaggctgaaaaggtcaaaatgcggcaaatcctggacaaacagcagaagcagatggtggaggactaccagtggctcaggcaggaggagaagtccctggaccccatggtttatatgaatgataagtccccattgacgccagagaaggaggtcggctacctggagttcacagggcccccacagaagcccccgaggctgggcgcacagtccatccagcccacagctaacctggaccggactgatgacctggtgtacctcaatgtcatggagctggtgcgggccgtgctggagctcaagaatgagctctgtcagctgccccccgagggctacgtggtggtggtgaagaatgtggggctgaccctgcggaagctcatcgggagcgtggatgatctcctgccttccttgccgtcatcttcacggacagagatcgagggcacccagaaactgctcaacaaagacctggcagagctcatcaacaagatgcggctggcacagcagaacgccgtgacctccctaagtgaggagtgcaagaggcagatgctgacggcttcacacaccctggctgtggacgccaagaacctgctcgacgctgtggaccaggccaaggttctggccaatctggcccacccacctgcagagtgacggagggtgggggccacctgcctgcgtcttccgcccctgcctgccatgtacctcccctgccttgctgttggtcatgtgggtcttccagggggaaggccaaggggagtcaccttcccttgccactttgcacgacgccctctccccacccctacccctggctgtactgctcaggctgcagctggacagaggggactctgggctatggacacagggtgacggtgacaaagatggctcagagggggactgctgctgcctggccactgctccctaagccagcctggtccatgcagggggctcctgggggtggggaggtgtcacatggtgcccctagctttatatatggacatggcaggccgatttgggaaccaagctattcctttcccttcctcttcggccctcagatgtcccttgatgcacagagaagctggggaggagctttgttttgggggtcaggcagccagtgagatgagggatgggcctggcattcttgtacagtgtatattgaaatttatttaatgtgagtttggtctggactgacagcatgtgccctcctgagggaggacctggggcacagtccaggaacaagctaattgggagtccaggcacaggatgctgtgttgtcaacaaaccaagcatcagggggaagaagcagagagatgcggccaagataggaccttgggccaaatccgctctcttcctgcccctctttctctttcttcctttactttcccttgcttttccctcttttcttactcctcctctttctctccccaacccccattctcatctgcacccttcttttctcatgtgtttgcataaacattcttttaacttctttctatttgacttgtggttgaattaaaattgtcccatttgc

SEQ ID NO: 3430 - DNA, 4147 bp, Homo sapiens
  source 1..4147: mol_type = genomic DNA
aaggaagtggggaggagagcagcaggggtgtggttaacaactcagaggaggagggagaatctaacctgtcagcccttttactcagccacagcctccggagccgttgcacacctacctgcccggccgacttacctgtacttgccgccgtcccggctcacctggcggtgcccgaggagtagtcgctggagtccgcgcctccctgggactgcaatgtgccgatcttagctgctgcctgagaggatgtctggggtgtccgagcccctgagtcgagtaaagttgggcacgttacgccggcctgaaggccctgcagagcccatggtggtggtaccagtagatgtggaaaaggaggacgtgcgtatcctcaaggtctgcttctatagcaacagcttcaatcctgggaaaaacttcaaactggtcaaatgcactgtccagacggagatccgggagatcatcacctccatcctgctgagcgggcggatcgggcccaacatccggttggctgagtgctatgggctgaggctgaagcacatgaagtccgatgagatccactggctgcacccacagatgacggtgggtgaggtgcaggacaagtatgagtgtctgcacgtggaagccgagtggaggtatgaccttcaaatccgctacttgccagaagacttcatggagagcctgaaggaggacaggaccacgctgctctatttttaccaacagctccggaacgactacatgcagcgctacgccagcaaggtcagcgagggcatggccctgcagctgggctgcctggagctcaggcggttcttcaaggatatgccccacaatgcacttgacaagaagtccaacttcgagctcctagaaaaggaagtggggctggacttgtttttcccaaagcagatgcaggagaacttaaagcccaaacagttccggaagatgatccagcagaccttccagcagtacgcctcgctcagggaggaggagtgcgtcatgaagttcttcaacactctcgccggcttcgccaacatcgaccaggagacctaccgctgtgaactcattcaaggatggaacattactgtggacctggtcattggccctaaagggatccgccagctgactagtcaggacgcaaagcccacctgcctggccgagttcaagcagatcaggtccatcaggtgcctcccgctggaggagggccaggcagtacttcagctgggcattgaaggtgccccccaggccttgtccatcaaaacctcatccctagcagaggctgagaacatggctgacctcatagacggctactgccggctgcagggtgagcaccaaggctctctcatcatccatcctaggaaagatggtgagaagcggaacagcctgccccagatccccatgctaaacctggaggcccggcggtcccacctctcagagagctgcagcatagagtcagacatctacgcagagattcccgacgaaaccctgcgaaggcccggaggtccacagtatggcattgcccgtgaagatgtggtcctgaatcgtattcttggggaaggcttttttggggaggtctatgaaggtgtctacacaaatcacaaaggggagaaaatcaatgtagctgtcaagacctgcaagaaagactgcactctggacaacaaggagaagttcatgagcgaggcagtgatcatgaagaacctcgaccacccgcacatcgtgaagctgatcggcatcattgaagaggagcccacctggatcatcatggaattgtatccctatggggagctgggccactacctggagcggaacaagaactccctgaaggtgctcaccctcgtgctgtactcactgcagatatgcaaagccatggcctacctggagagcatcaactgcgtgcacagggacattgctgtccggaacatcctggtggcctcccctgagtgtgtgaagctgggggactttggtctttcccggtacattgaggacgaggactattacaaagcctctgtgactcgtctccccatcaaatggatgtccccagagtccattaacttccgacgcttcacgacagccagtgacgtctggatgttcgccgtgtgcatgtgggagatcctgagctttgggaagcagcccttcttctggctggagaacaaggatgtcatcggggtgctggagaaaggagaccggctgcccaagcctgatctctgtccaccggtcctttataccctcatgacccgctgctgggactacgaccccagtgaccggccccgcttcaccgagctggtgtgcagcctcagtgacgtttatcagatggagaaggacattgccatggagcaagagaggaatgctcgctaccgaacccccaaaatcttggagcccacagccttccaggaacccccacccaagcccagccgacctaagtacagaccccctccgcaaaccaacctcctggctccaaagctgcagttccaggttcctgagggtctgtgtgccagctctcctacgctcaccagccctatggagtatccatctcccgttaactcactgcacaccccacctctccaccggcacaatgtcttcaaacgccacagcatgcgggaggaggacttcatccaacccagcagccgagaagaggcccagcagctgtgggaggctgaaaaggtcaaaatgcggcaaatcctggacaaacagcagaagcagatggtggaggactaccagtggctcaggcaggaggagaagtccctggaccccatggtttatatgaatgataagtccccattgacgccagagaaggaggtcggctacctggagttcacagggcccccacagaagcccccgaggctgggcgcacagtccatccagcccacagctaacctggaccggactgatgacctggtgtacctcaatgtcatggagctggtgcgggccgtgctggagctcaagaatgagctctgtcagctgccccccgagggctacgtggtggtggtgaagaatgtggggctgaccctgcggaagctcatcgggagcgtggatgatctcctgccttccttgccgtcatcttcacggacagagatcgagggcacccagaaactgctcaacaaagacctggcagagctcatcaacaagatgcggctggcacagcagaacgccgtgacctccctaagtgaggagtgcaagaggcagatgctgacggcttcacacaccctggctgtggacgccaagaacctgctcgacgctgtggaccaggccaaggttctggccaatctggcccacccacctgcagagtgacggagggtgggggccacctgcctgcgtcttccgcccctgcctgccatgtacctcccctgccttgctgttggtcatgtgggtcttccagggggaaggccaaggggagtcaccttcccttgccactttgcacgacgccctctccccacccctacccctggctgtactgctcaggctgcagctggacagaggggactctgggctatggacacagggtgacggtgacaaagatggctcagagggggactgctgctgcctggccactgctccctaagccagcctggtccatgcagggggctcctgggggtggggaggtgtcacatggtgcccctagctttatatatggacatggcaggccgatttgggaaccaagctattcctttcccttcctcttcggccctcagatgtcccttgatgcacagagaagctggggaggagctttgttttgggggtcaggcagccagtgagatgagggatgggcctggcattcttgtacagtgtatattgaaatttatttaatgtgagtttggtctggactgacagcatgtgccctcctgagggaggacctggggcacagtccaggaacaagctaattgggagtccaggcacaggatgctgtgttgtcaacaaaccaagcatcagggggaagaagcagagagatgcggccaagataggaccttgggccaaatccgctctcttcctgcccctctttctctttcttcctttactttcccttgcttttccctcttttcttactcctcctctttctctccccaacccccattctcatctgcacccttcttttctcatgtgtttgcataaacattcttttaacttctttctatttgacttgtggttgaattaaaattgtcccatttgc

SEQ ID NO: 3431 - DNA, 4715 bp, Homo sapiens
  source 1..4715: mol_type = genomic DNA
gcagttcccgcctcctcaggtccgggcgggtccctggccggggtagcacggaagggtctcccaggcggcgtagtagggcttccgtgttactggaaacctacttccggctgcaaatgggaaaaggagcctctaccttaaccaatccccgggaacctcaggcccgcggatgggagaaaccagagatgccaacttcctgcttccgaagtagtggctgggtcttaaagcaccgatgtttctgcattgaatagccctggaagacagaattcttgtctctccaaagatctggcagacttattcccaattataagagatccttgcaaaggaggtgtcttgcttcaccttcaccttccactgtgattgtaagttttctgaggcctcgccagccatgcggaactgaataggactagcaacttcatagacggttgtgaagacaagctagacggcagatgaaagttcttggcacagagtgaacacttgataaactatatggcagggagggctggaacggggcttgtttgaagagcaatatgagccagggttatagacctgagtttggggtaagagtggaacatccaaatggaagagtccagcagctgaaaggacatttgttcaaaggcctttttcattacagttttctccttcttctgatccagccacagcctccggagccgttgcacacctacctgcccggccgacttacctgtacttgccgccgtcccggctcacctggcggtgcccgaggagtagtcgctggagtccgcgcctccctgggactgcaatgtgccgatcttagctgctgcctgagaggatgtctggggtgtccgagcccctgagtcgagtaaagttgggcacgttacgccggcctgaaggccctgcagagcccatggtggtggtaccagtagatgtggaaaaggaggacgtgcgtatcctcaaggtctgcttctatagcaacagcttcaatcctgggaaaaacttcaaactggtcaaatgcactgtccagacggagatccgggagatcatcacctccatcctgctgagcgggcggatcgggcccaacatccggttggctgagtgctatgggctgaggctgaagcacatgaagtccgatgagatccactggctgcacccacagatgacggtgggtgaggtgcaggacaagtatgagtgtctgcacgtggaagccgagtggaggtatgaccttcaaatccgctacttgccagaagacttcatggagagcctgaaggaggacaggaccacgctgctctatttttaccaacagctccggaacgactacatgcagcgctacgccagcaaggtcagcgagggcatggccctgcagctgggctgcctggagctcaggcggttcttcaaggatatgccccacaatgcacttgacaagaagtccaacttcgagctcctagaaaaggaagtggggctggacttgtttttcccaaagcagatgcaggagaacttaaagcccaaacagttccggaagatgatccagcagaccttccagcagtacgcctcgctcagggaggaggagtgcgtcatgaagttcttcaacactctcgccggcttcgccaacatcgaccaggagacctaccgctgtgaactcattcaaggatggaacattactgtggacctggtcattggccctaaagggatccgccagctgactagtcaggacgcaaagcccacctgcctggccgagttcaagcagatcaggtccatcaggtgcctcccgctggaggagggccaggcagtacttcagctgggcattgaaggtgccccccaggccttgtccatcaaaacctcatccctagcagaggctgagaacatggctgacctcatagacggctactgccggctgcagggtgagcaccaaggctctctcatcatccatcctaggaaagatggtgagaagcggaacagcctgccccagatccccatgctaaacctggaggcccggcggtcccacctctcagagagctgcagcatagagtcagacatctacgcagagattcccgacgaaaccctgcgaaggcccggaggtccacagtatggcattgcccgtgaagatgtggtcctgaatcgtattcttggggaaggcttttttggggaggtctatgaaggtgtctacacaaatcacaaaggggagaaaatcaatgtagctgtcaagacctgcaagaaagactgcactctggacaacaaggagaagttcatgagcgaggcagtgatcatgaagaacctcgaccacccgcacatcgtgaagctgatcggcatcattgaagaggagcccacctggatcatcatggaattgtatccctatggggagctgggccactacctggagcggaacaagaactccctgaaggtgctcaccctcgtgctgtactcactgcagatatgcaaagccatggcctacctggagagcatcaactgcgtgcacagggacattgctgtccggaacatcctggtggcctcccctgagtgtgtgaagctgggggactttggtctttcccggtacattgaggacgaggactattacaaagcctctgtgactcgtctccccatcaaatggatgtccccagagtccattaacttccgacgcttcacgacagccagtgacgtctggatgttcgccgtgtgcatgtgggagatcctgagctttgggaagcagcccttcttctggctggagaacaaggatgtcatcggggtgctggagaaaggagaccggctgcccaagcctgatctctgtccaccggtcctttataccctcatgacccgctgctgggactacgaccccagtgaccggccccgcttcaccgagctggtgtgcagcctcagtgacgtttatcagatggagaaggacattgccatggagcaagagaggaatgctcgctaccgaacccccaaaatcttggagcccacagccttccaggaacccccacccaagcccagccgacctaagtacagaccccctccgcaaaccaacctcctggctccaaagctgcagttccaggttcctgagggtctgtgtgccagctctcctacgctcaccagccctatggagtatccatctcccgttaactcactgcacaccccacctctccaccggcacaatgtcttcaaacgccacagcatgcgggaggaggacttcatccaacccagcagccgagaagaggcccagcagctgtgggaggctgaaaaggtcaaaatgcggcaaatcctggacaaacagcagaagcagatggtggaggactaccagtggctcaggcaggaggagaagtccctggaccccatggtttatatgaatgataagtccccattgacgccagagaaggaggtcggctacctggagttcacagggcccccacagaagcccccgaggctgggcgcacagtccatccagcccacagctaacctggaccggactgatgacctggtgtacctcaatgtcatggagctggtgcgggccgtgctggagctcaagaatgagctctgtcagctgccccccgagggctacgtggtggtggtgaagaatgtggggctgaccctgcggaagctcatcgggagcgtggatgatctcctgccttccttgccgtcatcttcacggacagagatcgagggcacccagaaactgctcaacaaagacctggcagagctcatcaacaagatgcggctggcacagcagaacgccgtgacctccctaagtgaggagtgcaagaggcagatgctgacggcttcacacaccctggctgtggacgccaagaacctgctcgacgctgtggaccaggccaaggttctggccaatctggcccacccacctgcagagtgacggagggtgggggccacctgcctgcgtcttccgcccctgcctgccatgtacctcccctgccttgctgttggtcatgtgggtcttccagggggaaggccaaggggagtcaccttcccttgccactttgcacgacgccctctccccacccctacccctggctgtactgctcaggctgcagctggacagaggggactctgggctatggacacagggtgacggtgacaaagatggctcagagggggactgctgctgcctggccactgctccctaagccagcctggtccatgcagggggctcctgggggtggggaggtgtcacatggtgcccctagctttatatatggacatggcaggccgatttgggaaccaagctattcctttcccttcctcttcggccctcagatgtcccttgatgcacagagaagctggggaggagctttgttttgggggtcaggcagccagtgagatgagggatgggcctggcattcttgtacagtgtatattgaaatttatttaatgtgagtttggtctggactgacagcatgtgccctcctgagggaggacctggggcacagtccaggaacaagctaattgggagtccaggcacaggatgctgtgttgtcaacaaaccaagcatcagggggaagaagcagagagatgcggccaagataggaccttgggccaaatccgctctcttcctgcccctctttctctttcttcctttactttcccttgcttttccctcttttcttactcctcctctttctctccccaacccccattctcatctgcacccttcttttctcatgtgtttgcataaacattcttttaacttctttctatttgacttgtggttgaattaaaattgtcccatttgc

SEQ ID NO: 3432 - DNA, 3936 bp, Homo sapiens
  source 1..3936: mol_type = genomic DNA
ccacagcctccggagccgttgcacacctacctgcccggccgacttacctgtacttgccgccgtcccggctcacctggcggtgcccgaggagtagtcgctggagtccgcgcctccctgggactgcaatgtgccgatcttagctgctgcctgagaggatgtctggggtgtccgagcccctgagtcgagtaaagttgggcacgttacgccggcctgaaggccctgcagagcccatggtggtggtaccagtagatgtggaaaaggaggacgtgcgtatcctcaaggtctgcttctatagcaacagcttcaatcctgggaaaaacttcaaactggtcaaatgcactgtccagacggagatccgggagatcatcacctccatcctgctgagcgggcggatcgggcccaacatccggttggctgagtgctatgggctgaggctgaagcacatgaagtccgatgagatccactggctgcacccacagatgacggtgggtgaggtgcaggacaagtatgagtgtctgcacgtggaagccgagtggaggtatgaccttcaaatccgctacttgccagaagacttcatggagagcctgaaggaggacaggaccacgctgctctatttttaccaacagctccggaacgactacatgcagcgctacgccagcaaggtcagcgagggcatggccctgcagctgggctgcctggagctcaggcggttcttcaaggatatgccccacaatgcacttgacaagaagtccaacttcgagctcctagaaaaggaagtggggctggacttgtttttcccaaagcagatgcaggagaacttaaagcccaaacagttccggaagatgatccagcagaccttccagcagtacgcctcgctcagggaggaggagtgcgtcatgaagttcttcaacactctcgccggcttcgccaacatcgaccaggagacctaccgctgtgaactcattcaaggatggaacattactgtggacctggtcattggccctaaagggatccgccagctgactagtcaggacgcaaagcccacctgcctggccgagttcaagcagatcaggtccatcaggtgcctcccgctggaggagggccaggcagtacttcagctgggcattgaaggtgccccccaggccttgtccatcaaaacctcatccctagcagaggctgagaacatggctgacctcatagacggctactgccggctgcagggtgagcaccaaggctctctcatcatccatcctaggaaagatggtgagaagcggaacagcctgccccagatccccatgctaaacctggaggcccggcggtcccacctctcagagagctgcagcatagagtcagacatctacgcagagattcccgacgaaaccctgcgaaggcccggaggtccacagtatggcattgcccgtgaagatgtggtcctgaatcgtattcttggggaaggcttttttggggaggtctatgaaggtgtctacacaaatcacaaaggggagaaaatcaatgtagctgtcaagacctgcaagaaagactgcactctggacaacaaggagaagttcatgagcgaggcagtgatcatgaagaacctcgaccacccgcacatcgtgaagctgatcggcatcattgaagaggagcccacctggatcatcatggaattgtatccctatggggagctgggccactacctggagcggaacaagaactccctgaaggtgctcaccctcgtgctgtactcactgcagatatgcaaagccatggcctacctggagagcatcaactgcgtgcacagggacattgctgtccggaacatcctggtggcctcccctgagtgtgtgaagctgggggactttggtctttcccggtacattgaggacgaggactattacaaagcctctgtgactcgtctccccatcaaatggatgtccccagagtccattaacttccgacgcttcacgacagccagtgacgtctggatgttcgccgtgtgcatgtgggagatcctgagctttgggaagcagcccttcttctggctggagaacaaggatgtcatcggggtgctggagaaaggagaccggctgcccaagcctgatctctgtccaccggtcctttataccctcatgacccgctgctgggactacgaccccagtgaccggccccgcttcaccgagctggtgtgcagcctcagtgacgtttatcagatggagaaggacattgccatggagcaagagaggaatgctcgctaccgaacccccaaaatcttggagcccacagccttccaggaacccccacccaagcccagccgacctaagtacagaccccctccgcaaaccaacctcctggctccaaagctgcagttccaggaggaggacttcatccaacccagcagccgagaagaggcccagcagctgtgggaggctgaaaaggtcaaaatgcggcaaatcctggacaaacagcagaagcagatggtggaggactaccagtggctcaggcaggaggagaagtccctggaccccatggtttatatgaatgataagtccccattgacgccagagaaggaggtcggctacctggagttcacagggcccccacagaagcccccgaggctgggcgcacagtccatccagcccacagctaacctggaccggactgatgacctggtgtacctcaatgtcatggagctggtgcgggccgtgctggagctcaagaatgagctctgtcagctgccccccgagggctacgtggtggtggtgaagaatgtggggctgaccctgcggaagctcatcgggagcgtggatgatctcctgccttccttgccgtcatcttcacggacagagatcgagggcacccagaaactgctcaacaaagacctggcagagctcatcaacaagatgcggctggcacagcagaacgccgtgacctccctaagtgaggagtgcaagaggcagatgctgacggcttcacacaccctggctgtggacgccaagaacctgctcgacgctgtggaccaggccaaggttctggccaatctggcccacccacctgcagagtgacggagggtgggggccacctgcctgcgtcttccgcccctgcctgccatgtacctcccctgccttgctgttggtcatgtgggtcttccagggggaaggccaaggggagtcaccttcccttgccactttgcacgacgccctctccccacccctacccctggctgtactgctcaggctgcagctggacagaggggactctgggctatggacacagggtgacggtgacaaagatggctcagagggggactgctgctgcctggccactgctccctaagccagcctggtccatgcagggggctcctgggggtggggaggtgtcacatggtgcccctagctttatatatggacatggcaggccgatttgggaaccaagctattcctttcccttcctcttcggccctcagatgtcccttgatgcacagagaagctggggaggagctttgttttgggggtcaggcagccagtgagatgagggatgggcctggcattcttgtacagtgtatattgaaatttatttaatgtgagtttggtctggactgacagcatgtgccctcctgagggaggacctggggcacagtccaggaacaagctaattgggagtccaggcacaggatgctgtgttgtcaacaaaccaagcatcagggggaagaagcagagagatgcggccaagataggaccttgggccaaatccgctctcttcctgcccctctttctctttcttcctttactttcccttgcttttccctcttttcttactcctcctctttctctccccaacccccattctcatctgcacccttcttttctcatgtgtttgcataaacattcttttaacttctttctatttgacttgtggttgaattaaaattgtcccatttgc

SEQ ID NO: 3433 - DNA, 3914 bp, Homo sapiens
  source 1..3914: mol_type = genomic DNA
tctgtcttggagctcggtgggtgctgtccctggggccatgaggtatgtgggcctgtgtggggctctttcagggctgaccctctgctgtctctgcaggactgcaatgtgccgatcttagctgctgcctgagaggatgtctggggtgtccgagcccctgagtcgagtaaagttgggcacgttacgccggcctgaaggccctgcagagcccatggtggtggtaccagtagatgtggaaaaggaggacgtgcgtatcctcaaggtctgcttctatagcaacagcttcaatcctgggaaaaacttcaaactggtcaaatgcactgtccagacggagatccgggagatcatcacctccatcctgctgagcgggcggatcgggcccaacatccggttggctgagtgctatgggctgaggctgaagcacatgaagtccgatgagatccactggctgcacccacagatgacggtgggtgaggtgcaggacaagtatgagtgtctgcacgtggaagccgagtggaggtatgaccttcaaatccgctacttgccagaagacttcatggagagcctgaaggaggacaggaccacgctgctctatttttaccaacagctccggaacgactacatgcagcgctacgccagcaaggtcagcgagggcatggccctgcagctgggctgcctggagctcaggcggttcttcaaggatatgccccacaatgcacttgacaagaagtccaacttcgagctcctagaaaaggaagtggggctggacttgtttttcccaaagcagatgcaggagaacttaaagcccaaacagttccggaagatgatccagcagaccttccagcagtacgcctcgctcagggaggaggagtgcgtcatgaagttcttcaacactctcgccggcttcgccaacatcgaccaggagacctaccgctgtgaactcattcaaggatggaacattactgtggacctggtcattggccctaaagggatccgccagctgactagtcaggacgcaaagcccacctgcctggccgagttcaagcagatcaggtccatcaggtgcctcccgctggaggagggccaggcagtacttcagctgggcattgaaggtgccccccaggccttgtccatcaaaacctcatccctagcagaggctgagaacatggctgacctcatagacggctactgccggctgcagggtgagcaccaaggctctctcatcatccatcctaggaaagatggtgagaagcggaacagcctgccccagatccccatgctaaacctggaggcccggcggtcccacctctcagagagctgcagcatagagtcagacatctacgcagagattcccgacgaaaccctgcgaaggcccggaggtccacagtatggcattgcccgtgaagatgtggtcctgaatcgtattcttggggaaggcttttttggggaggtctatgaaggtgtctacacaaatcacaaaggggagaaaatcaatgtagctgtcaagacctgcaagaaagactgcactctggacaacaaggagaagttcatgagcgaggcagtgatcatgaagaacctcgaccacccgcacatcgtgaagctgatcggcatcattgaagaggagcccacctggatcatcatggaattgtatccctatggggagctgggccactacctggagcggaacaagaactccctgaaggtgctcaccctcgtgctgtactcactgcagatatgcaaagccatggcctacctggagagcatcaactgcgtgcacagggacattgctgtccggaacatcctggtggcctcccctgagtgtgtgaagctgggggactttggtctttcccggtacattgaggacgaggactattacaaagcctctgtgactcgtctccccatcaaatggatgtccccagagtccattaacttccgacgcttcacgacagccagtgacgtctggatgttcgccgtgtgcatgtgggagatcctgagctttgggaagcagcccttcttctggctggagaacaaggatgtcatcggggtgctggagaaaggagaccggctgcccaagcctgatctctgtccaccggtcctttataccctcatgacccgctgctgggactacgaccccagtgaccggccccgcttcaccgagctggtgtgcagcctcagtgacgtttatcagatggagaaggacattgccatggagcaagagaggaatgctcgctaccgaacccccaaaatcttggagcccacagccttccaggaacccccacccaagcccagccgacctaagtacagaccccctccgcaaaccaacctcctggctccaaagctgcagttccaggaggaggacttcatccaacccagcagccgagaagaggcccagcagctgtgggaggctgaaaaggtcaaaatgcggcaaatcctggacaaacagcagaagcagatggtggaggactaccagtggctcaggcaggaggagaagtccctggaccccatggtttatatgaatgataagtccccattgacgccagagaaggaggtcggctacctggagttcacagggcccccacagaagcccccgaggctgggcgcacagtccatccagcccacagctaacctggaccggactgatgacctggtgtacctcaatgtcatggagctggtgcgggccgtgctggagctcaagaatgagctctgtcagctgccccccgagggctacgtggtggtggtgaagaatgtggggctgaccctgcggaagctcatcgggagcgtggatgatctcctgccttccttgccgtcatcttcacggacagagatcgagggcacccagaaactgctcaacaaagacctggcagagctcatcaacaagatgcggctggcacagcagaacgccgtgacctccctaagtgaggagtgcaagaggcagatgctgacggcttcacacaccctggctgtggacgccaagaacctgctcgacgctgtggaccaggccaaggttctggccaatctggcccacccacctgcagagtgacggagggtgggggccacctgcctgcgtcttccgcccctgcctgccatgtacctcccctgccttgctgttggtcatgtgggtcttccagggggaaggccaaggggagtcaccttcccttgccactttgcacgacgccctctccccacccctacccctggctgtactgctcaggctgcagctggacagaggggactctgggctatggacacagggtgacggtgacaaagatggctcagagggggactgctgctgcctggccactgctccctaagccagcctggtccatgcagggggctcctgggggtggggaggtgtcacatggtgcccctagctttatatatggacatggcaggccgatttgggaaccaagctattcctttcccttcctcttcggccctcagatgtcccttgatgcacagagaagctggggaggagctttgttttgggggtcaggcagccagtgagatgagggatgggcctggcattcttgtacagtgtatattgaaatttatttaatgtgagtttggtctggactgacagcatgtgccctcctgagggaggacctggggcacagtccaggaacaagctaattgggagtccaggcacaggatgctgtgttgtcaacaaaccaagcatcagggggaagaagcagagagatgcggccaagataggaccttgggccaaatccgctctcttcctgcccctctttctctttcttcctttactttcccttgcttttccctcttttcttactcctcctctttctctccccaacccccattctcatctgcacccttcttttctcatgtgtttgcataaacattcttttaacttctttctatttgacttgtggttgaattaaaattgtcccatttgc

SEQ ID NO: 3434 - DNA, 4710 bp, Homo sapiens
  source 1..4710: mol_type = genomic DNA
gcagttcccgcctcctcaggtccgggcgggtccctggccggggtagcacggaagggtctcccaggcggcgtagtagggcttccgtgttactggaaacctacttccggctgcaaatgggaaaaggagcctctaccttaaccaatccccgggaacctcaggcccgcggatgggagaaaccagagatgccaacttcctgcttccgaagtagtggctgggtcttaaagcaccgatgtttctgcattgaatagccctggaagacagaattcttgtctctccaaagatctggcagacttattcccaattataagagatccttgcaaaggaggtgtcttgcttcaccttcaccttccactgtgattgtaagttttctgaggcctcgccagccatgcggaactgaataggactagcaacttcatagacggttgtgaagacaagctagacggcagatgaaagttcttggcacagagtgaacacttgataaactatatggcagggagggctggaacggggcttgtttgaagagcaatatgagccagggttatagacctgagtttggggtaagagtggaacatccaaatggaagagtccagcagctgaaaggacatttgttcaaaggcctttttcattacagttttctccttcttctgatccagccacagcctccggagccgttgcacacctacctgcccggccgacttacctgtacttgccgccgtcccggctcacctggcggtgcccgaggagtagtcgctggagtccgcgcctccctgggactgcaatgtgccgatcttagctgctgcctgagaggatgtctggggtgtccgagcccctgagtcgagtaaagttgggcacgttacgccggcctgaaggccctgcagagcccatggtggtggtaccagtagatgtggaaaaggaggacgtgcgtatcctcaaggtctgcttctatagcaacagcttcaatcctgggaaaaacttcaaactggtcaaatgcactgtccagacggagatccgggagatcatcacctccatcctgctgagcgggcggatcgggcccaacatccggttggctgagtgctatgggctgaggctgaagcacatgaagtccgatgagatccactggctgcacccacagatgacggtgggtgaggtgcaggacaagtatgagtgtctgcacgtggaagccgagtggaggtatgaccttcaaatccgctacttgccagaagacttcatggagagcctgaaggaggacaggaccacgctgctctatttttaccaacagctccggaacgactacatgcagcgctacgccagcaaggtcagcgagggcatggccctgcagctgggctgcctggagctcaggcggttcttcaaggatatgccccacaatgcacttgacaagaagtccaacttcgagctcctagaaaaggaagtggggctggacttgtttttcccaaagcagatgcaggagaacttaaagcccaaacagttccggaagatgatccagcagaccttccagcagtacgcctcgctcagggaggaggagtgcgtcatgaagttcttcaacactctcgccggcttcgccaacatcgaccaggagacctaccgctgtgaactcattcaaggatggaacattactgtggacctggtcattggccctaaagggatccgccagctgactagtcaggacgcaaagcccacctgcctggccgagttcaagcagatcaggtccatcaggtgcctcccgctggaggagggccaggcagtacttcagctgggcattgaaggtgccccccaggccttgtccatcaaaacctcatccctagcagaggctgagaacatggctgacctcatagacggctactgccggctgcagggtgagcaccaaggctctctcatcatccatcctaggaaagatggtgagaagcggaacagcctgccccagatccccatgctaaacctggaggcccggcggtcccacctctcagagagctgcagcatagagtcagacatctacgcagagattcccgacgaaaccctgcgaaggcccggaggtccacagtatggcattgcccgtgaagatgtggtcctgaatcgtattcttggggaaggcttttttggggaggtctatgaaggtgtctacacaaatcacaaaggggagaaaatcaatgtagctgtcaagacctgcaagaaagactgcactctggacaacaaggagaagttcatgagcgaggcagtgatcatgaagaacctcgaccacccgcacatcgtgaagctgatcggcatcattgaagaggagcccacctggatcatcatggaattgtatccctatggggagctgggccactacctggagcggaacaagaactccctgaaggtgctcaccctcgtgctgtactcactgcagatatgcaaagccatggcctacctggagagcatcaactgcgtgcacagggacattgctgtccggaacatcctggtggcctcccctgagtgtgtgaagctgggggactttggtctttcccggtacattgaggacgaggactattacaaagcctctgtgactcgtctccccatcaaatggatgtccccagagtccattaacttccgacgcttcacgacagccagtgacgtctggatgttcgccgtgtgcatgtgggagatcctgagctttgggaagcagcccttcttctggctggagaacaaggatgtcatcggggtgctggagaaaggagaccggctgcccaagcctgatctctgtccaccggtcctttataccctcatgacccgctgctgggactacgaccccagtgaccggccccgcttcaccgagctggtgtgcagcctcagtgacgtttatcagatggagaaggacattgccatggagcaagagaggaatgctcgctaccgaacccccaaaatcttggagcccacagccttccaggaacccccacccaagcccagccgacctaagtacagaccccctccgcaaaccaacctcctggctccaaagctgcagttccaggttcctgagggtctgtgtgccagctctcctacgctcaccagccctatggagtatccatctcccgttaactcactgcacaccccacctctccaccggcacaatgtcttcaaacgccacagcatgcgggaggaggacttcatccaacccagcagccgaggcccagcagctgtgggaggctgaaaaggtcaaaatgcggcaaatcctggacaaacagcagaagcagatggtggaggactaccagtggctcaggcaggaggagaagtccctggaccccatggtttatatgaatgataagtccccattgacgccagagaaggaggtcggctacctggagttcacagggcccccacagaagcccccgaggctgggcgcacagtccatccagcccacagctaacctggaccggactgatgacctggtgtacctcaatgtcatggagctggtgcgggccgtgctggagctcaagaatgagctctgtcagctgccccccgagggctacgtggtggtggtgaagaatgtggggctgaccctgcggaagctcatcgggagcgtggatgatctcctgccttccttgccgtcatcttcacggacagagatcgagggcacccagaaactgctcaacaaagacctggcagagctcatcaacaagatgcggctggcacagcagaacgccgtgacctccctaagtgaggagtgcaagaggcagatgctgacggcttcacacaccctggctgtggacgccaagaacctgctcgacgctgtggaccaggccaaggttctggccaatctggcccacccacctgcagagtgacggagggtgggggccacctgcctgcgtcttccgcccctgcctgccatgtacctcccctgccttgctgttggtcatgtgggtcttccagggggaaggccaaggggagtcaccttcccttgccactttgcacgacgccctctccccacccctacccctggctgtactgctcaggctgcagctggacagaggggactctgggctatggacacagggtgacggtgacaaagatggctcagagggggactgctgctgcctggccactgctccctaagccagcctggtccatgcagggggctcctgggggtggggaggtgtcacatggtgcccctagctttatatatggacatggcaggccgatttgggaaccaagctattcctttcccttcctcttcggccctcagatgtcccttgatgcacagagaagctggggaggagctttgttttgggggtcaggcagccagtgagatgagggatgggcctggcattcttgtacagtgtatattgaaatttatttaatgtgagtttggtctggactgacagcatgtgccctcctgagggaggacctggggcacagtccaggaacaagctaattgggagtccaggcacaggatgctgtgttgtcaacaaaccaagcatcagggggaagaagcagagagatgcggccaagataggaccttgggccaaatccgctctcttcctgcccctctttctctttcttcctttactttcccttgcttttccctcttttcttactcctcctctttctctccccaacccccattctcatctgcacccttcttttctcatgtgtttgcataaacattcttttaacttctttctatttgacttgtggttgaattaaaattgtcccatttgc

SEQ ID NO: 3435 - DNA, 4555 bp, Homo sapiens
  source 1..4555: mol_type = genomic DNA
gcagttcccgcctcctcaggtccgggcgggtccctggccggggtagcacggaagggtctcccaggcggcgtagtagggcttccgtgttactggaaacctacttccggctgcaaatgggaaaaggagcctctaccttaaccaatccccgggaacctcaggcccgcggatgggagaaaccagagatgccaacttcctgcttccgaagtagtggctgggtcttaaagcaccgatgtttctgcattgaatagccctggaagacagaattcttgtctctccaaagatctggcagacttattcccaattataagagatccttgcaaaggaggtgtcttgcttcaccttcaccttccactgtgattgtaagttttctgaggcctcgccagccatgcggaactgaataggactagcaacttcatagacggttgtgaagacaagctagacggcagatgaaagttcttggcacagagtgaacacttgataaactatatggcagccacagcctccggagccgttgcacacctacctgcccggccgacttacctgtacttgccgccgtcccggctcacctggcggtgcccgaggagtagtcgctggagtccgcgcctccctgggactgcaatgtgccgatcttagctgctgcctgagaggatgtctggggtgtccgagcccctgagtcgagtaaagttgggcacgttacgccggcctgaaggccctgcagagcccatggtggtggtaccagtagatgtggaaaaggaggacgtgcgtatcctcaaggtctgcttctatagcaacagcttcaatcctgggaaaaacttcaaactggtcaaatgcactgtccagacggagatccgggagatcatcacctccatcctgctgagcgggcggatcgggcccaacatccggttggctgagtgctatgggctgaggctgaagcacatgaagtccgatgagatccactggctgcacccacagatgacggtgggtgaggtgcaggacaagtatgagtgtctgcacgtggaagccgagtggaggtatgaccttcaaatccgctacttgccagaagacttcatggagagcctgaaggaggacaggaccacgctgctctatttttaccaacagctccggaacgactacatgcagcgctacgccagcaaggtcagcgagggcatggccctgcagctgggctgcctggagctcaggcggttcttcaaggatatgccccacaatgcacttgacaagaagtccaacttcgagctcctagaaaaggaagtggggctggacttgtttttcccaaagcagatgcaggagaacttaaagcccaaacagttccggaagatgatccagcagaccttccagcagtacgcctcgctcagggaggaggagtgcgtcatgaagttcttcaacactctcgccggcttcgccaacatcgaccaggagacctaccgctgtgaactcattcaaggatggaacattactgtggacctggtcattggccctaaagggatccgccagctgactagtcaggacgcaaagcccacctgcctggccgagttcaagcagatcaggtccatcaggtgcctcccgctggaggagggccaggcagtacttcagctgggcattgaaggtgccccccaggccttgtccatcaaaacctcatccctagcagaggctgagaacatggctgacctcatagacggctactgccggctgcagggtgagcaccaaggctctctcatcatccatcctaggaaagatggtgagaagcggaacagcctgccccagatccccatgctaaacctggaggcccggcggtcccacctctcagagagctgcagcatagagtcagacatctacgcagagattcccgacgaaaccctgcgaaggcccggaggtccacagtatggcattgcccgtgaagatgtggtcctgaatcgtattcttggggaaggcttttttggggaggtctatgaaggtgtctacacaaatcacaaaggggagaaaatcaatgtagctgtcaagacctgcaagaaagactgcactctggacaacaaggagaagttcatgagcgaggcagtgatcatgaagaacctcgaccacccgcacatcgtgaagctgatcggcatcattgaagaggagcccacctggatcatcatggaattgtatccctatggggagctgggccactacctggagcggaacaagaactccctgaaggtgctcaccctcgtgctgtactcactgcagatatgcaaagccatggcctacctggagagcatcaactgcgtgcacagggacattgctgtccggaacatcctggtggcctcccctgagtgtgtgaagctgggggactttggtctttcccggtacattgaggacgaggactattacaaagcctctgtgactcgtctccccatcaaatggatgtccccagagtccattaacttccgacgcttcacgacagccagtgacgtctggatgttcgccgtgtgcatgtgggagatcctgagctttgggaagcagcccttcttctggctggagaacaaggatgtcatcggggtgctggagaaaggagaccggctgcccaagcctgatctctgtccaccggtcctttataccctcatgacccgctgctgggactacgaccccagtgaccggccccgcttcaccgagctggtgtgcagcctcagtgacgtttatcagatggagaaggacattgccatggagcaagagaggaatgctcgctaccgaacccccaaaatcttggagcccacagccttccaggaacccccacccaagcccagccgacctaagtacagaccccctccgcaaaccaacctcctggctccaaagctgcagttccaggttcctgagggtctgtgtgccagctctcctacgctcaccagccctatggagtatccatctcccgttaactcactgcacaccccacctctccaccggcacaatgtcttcaaacgccacagcatgcgggaggaggacttcatccaacccagcagccgagaagaggcccagcagctgtgggaggctgaaaaggtcaaaatgcggcaaatcctggacaaacagcagaagcagatggtggaggactaccagtggctcaggcaggaggagaagtccctggaccccatggtttatatgaatgataagtccccattgacgccagagaaggaggtcggctacctggagttcacagggcccccacagaagcccccgaggctgggcgcacagtccatccagcccacagctaacctggaccggactgatgacctggtgtacctcaatgtcatggagctggtgcgggccgtgctggagctcaagaatgagctctgtcagctgccccccgagggctacgtggtggtggtgaagaatgtggggctgaccctgcggaagctcatcgggagcgtggatgatctcctgccttccttgccgtcatcttcacggacagagatcgagggcacccagaaactgctcaacaaagacctggcagagctcatcaacaagatgcggctggcacagcagaacgccgtgacctccctaagtgaggagtgcaagaggcagatgctgacggcttcacacaccctggctgtggacgccaagaacctgctcgacgctgtggaccaggccaaggttctggccaatctggcccacccacctgcagagtgacggagggtgggggccacctgcctgcgtcttccgcccctgcctgccatgtacctcccctgccttgctgttggtcatgtgggtcttccagggggaaggccaaggggagtcaccttcccttgccactttgcacgacgccctctccccacccctacccctggctgtactgctcaggctgcagctggacagaggggactctgggctatggacacagggtgacggtgacaaagatggctcagagggggactgctgctgcctggccactgctccctaagccagcctggtccatgcagggggctcctgggggtggggaggtgtcacatggtgcccctagctttatatatggacatggcaggccgatttgggaaccaagctattcctttcccttcctcttcggccctcagatgtcccttgatgcacagagaagctggggaggagctttgttttgggggtcaggcagccagtgagatgagggatgggcctggcattcttgtacagtgtatattgaaatttatttaatgtgagtttggtctggactgacagcatgtgccctcctgagggaggacctggggcacagtccaggaacaagctaattgggagtccaggcacaggatgctgtgttgtcaacaaaccaagcatcagggggaagaagcagagagatgcggccaagataggaccttgggccaaatccgctctcttcctgcccctctttctctttcttcctttactttcccttgcttttccctcttttcttactcctcctctttctctccccaacccccattctcatctgcacccttcttttctcatgtgtttgcataaacattcttttaacttctttctatttgacttgtggttgaattaaaattgtcccatttgc

SEQ ID NO: 3436 - DNA, 2614 bp, Homo sapiens
  source 1..2614: mol_type = genomic DNA
cgactgaggcggcgggcggagcggcaggcggcggcggcgcggcagcggagcgcagcatcatggcggaccgagacagcggcagcgagcagggtggtgcggcgctgggttcgggcggctccctggggcaccccggctcgggctcaggctccggcgggggcggtggtggcggcgggggcggcggcggcagtggcggcggcggcggcggggccccaggggggctgcagcacgagacgcaggagctggcctccaagcgggtggacatccagaacaagcgcttctacctggacgtgaagcagaacgccaagggccgcttcctgaagatcgccgaggtgggcgcgggcggcaacaagagccgccttactctctccatgtcagtggccgtggagttccgcgactacctgggcgacttcatcgagcactacgcgcagctgggccccagccagccgccggacctggcccaggcgcaggacgagccgcgccgggcgctcaaaagcgagttcctggtgcgcgagaaccgcaagtactacatggatctcaaggagaaccagcgcggccgcttcctgcgcatccgccagacggtcaaccgggggcctggcctgggctccacgcagggccagaccattgcgctgcccgcgcaggggctcatcgagttccgtgacgctctggccaagctcatcgacgactacggagtggaggaggagccggccgagctgcccgagggcacctccttgactgtggacaacaagcgcttcttcttcgatgtgggctccaacaagtacggcgtgtttatgcgagtgagcgaggtgaagcccacctatcgcaactccatcaccgtgccctacaaggtgtgggccaagttcggacacaccttctgcaagtactcggaggagatgaagaagattcaagagaagcagagggagaagcgggctgcctgtgagcagcttcaccagcagcaacagcagcagcaggaggagaccgccgctgccaccctgctactgcagggtgaggaagaaggggaagaagattgatcaaactgaatgaaacccccacacacacacacatgcatacacacacacacacagccacacacacagaaaatatactgtaaagaaagagagaaaataaaaagttaaaaagttaaaaaaaaaaaaaaacctgttaactccaagggagcaccacccacagaacctccaccaactgacagtttctcttcttgacttgccacccatcgctggatgttgtccactttatccaccatataaaacagtaagcagctgctaaaaacaaaaaaaatacaaaaagtaataacattatatgaactgtgtttcctacttgattaaaaaatataaagaactgagtgtttatttccctaattaaccaagaacttttgtacacgtttaagctattattattaaaaagtgtttgcaaaatggtcaagattataatattgctgaattatataaaagtccttttcatgttgagctaacatttgactttagcacaaaaaagagatattttagaacacgtaaaataatatttttagtttttctcattttgttaccaaatttcaaaccttacatggaggttattatagtatatttgacaccctatatacctgtgattagagatgtgtatatatatgagggctaggcatgctgtgtgtctgagctttgtctaaatgttatgcagaagtttgtagagttaaaggtacgtaggtttaattcatgcaaggtaaacaataagtgctctcttttatacaatatgcattgcatctggaccttaaacttataaaaatggtcagtgaaacttctgtgaacatgaagaaattattaaaaaaggcatttaaatgaaatttgctaagttgtgatttttatggttggaaccaaagttattcaaatagtaaaaggaaaaagaaagaaaaaggagatctcccataatatttttctgcatctgtttgctttgactgagtaggcgttttgtcattattgtgtatatgagatgtacttgtatcgttcataatatattttttttattatgtgtagaaagattttaaaaaactaacgtgcagcaatttccagtgaacctgtacttggacatcaggtagtgagtctatttgtggtcactagcactgtctcctaaacttgtaagaggtctgaagctattctttgatttttgctagtgctattaacttatgtagacctgttaaaaagcagagcaacacaattatagttatcctactgagccatggattctgagttttgttttaaaagtgaaagccaagttggtgtatgtaaaggatttccatgtagctgtggtgctagttattactggctacattatatgctaagtgtatttgtgttccccaagtgtacaagccttctatcaaaagtatgttctataactcatatattcaaggtgtagggtatgaaaatgcaaagtttaggagagcactttaccaagctggtgtcctccaaactgaaattgtttgtaacgatagtcttttacaggttttcctttaaagatgtttgtgtgcttttaattgacaactaacttcttgctgctgtatagtaaaatattaatatatttttatcattaaactgctgcatgactatca

SEQ ID NO: 3437 - DNA, 989 bp, Homo sapiens
  source 1..989: mol_type = genomic DNA
gcaggcgccacccatgagcccctctgcggccccctcccgggtcccacctcgcaggccagctggagggcgcgatcctggcgtcccccgacggcctggggccccaatccagaggcctgggtgggaggggaccaagggtgtagtaaggaagcgccttttgctggagggcaacggaccggggcggggagtcgggagaccagagtgggaggaaggcggggagtccaggttccgccccggagccgacttcctcctggtcggcggctgcagcggggtgagcggcggcagcggccggggatcctggagccatggggcgcgcgcgcgacgccatcctggatgcgctggagaacctgaccgccgaggagctcaagaagttcaagctgaagctgctgtcggtgccgctgcgcgagggctacgggcgcatcccgcggggcgcgctgctgtccatggacgccttggacctcaccgacaagctggtcagcttctacctggagacctacggcgccgagctcaccgctaacgtgctgcgcgacatgggcctgcaggagatggccgggcagctgcaggcggccacgcaccagggctctggagccgcgccagctgggatccaggcccctcctcagtcggcagccaagccaggcctgcactttatagaccagcaccgggctgcgcttatcgcgagggtcacaaacgttgagtggctgctggatgctctgtacgggaaggtcctgacggatgagcagtaccaggcagtgcgggccgagcccaccaacccaagcaagatgcggaagctcttcagtttcacaccagcctggaactggacctgcaaggacttgctcctccaggccctaagggagtcccagtcctacctggtggaggacctggagcggagctgaggctccttcccagcaacactccggtcagcccctggcaatcccaccaaatcatcctgaatctgatctttttatacacaatatacgaaaagccagcttgaa

SEQ ID NO: 3438 - DNA, 696 bp, Homo sapiens
  source 1..696: mol_type = genomic DNA
ccgacttcctcctggtcggcggctgcagcggggtgagcggcggcagcggccggggatcctggagccatggggcgcgcgcgcgacgccatcctggatgcgctggagaacctgaccgccgaggagctcaagaagttcaagctgaagctgctgtcggtgccgctgcgcgagggctacgggcgcatcccgcggggcgcgctgctgtccatggacgccttggacctcaccgacaagctggtcagcttctacctggagacctacggcgccgagctcaccgctaacgtgctgcgcgacatgggcctgcaggagatggccgggcagctgcaggcggccacgcaccagggcctgcactttatagaccagcaccgggctgcgcttatcgcgagggtcacaaacgttgagtggctgctggatgctctgtacgggaaggtcctgacggatgagcagtaccaggcagtgcgggccgagcccaccaacccaagcaagatgcggaagctcttcagtttcacaccagcctggaactggacctgcaaggacttgctcctccaggccctaagggagtcccagtcctacctggtggaggacctggagcggagctgaggctccttcccagcaacactccggtcagcccctggcaatcccaccaaatcatcctgaatctgatctttttatacacaatatacgaaaagccagcttgaa

SEQ ID NO: 3439 - DNA, 505 bp, Homo sapiens
  source 1..505: mol_type = genomic DNA
atggggcgcgcgcgcgacgccatcctggatgcgctggagaacctgaccgccgaggagctcaagaagttcaagctgcaggcggccacgcaccagggctctggagccgcgccagctgggatccaggcccctcctcagtcggcagccaagccaggcctgcactttatagaccagcaccgggctgcgcttatcgcgagggtcacaaacgttgagtggctgctggatgctctgtacgggaaggtcctgacggatgagcagtaccaggcagtgcgggccgagcccaccaacccaagcaagatgcggaagctcttcagtttcacaccagcctggaactggacctgcaaggacttgctcctccaggccctaagggagtcccagtcctacctggtggaggacctggagcggagctgaggctccttcccagcaacactccggtcagcccctggcaatcccaccaaatcatcctgaatctgatctttttatacacaatatacgaaaagccagcttg

SEQ ID NO: 3440 - DNA, 1989 bp, Homo sapiens
  source 1..1989: mol_type = genomic DNA
ctccttcccgctccgcgtcccgcccagcggcgcagggggccgggctccggctaggagggtgggggccgcgccggtgacagccgatccccgcccctgctgcccgccacgtccctcacgtaccactcggcagaggcgcggggaaacctggcgtactggctgtggcttctctagcgggactcggcatgaggctggcgcggctgcttcgcggagccgccttggccggcccgggcccggggctgcgcgccgccggcttcagccgcagcttcagctcggactcgggctccagcccggcgtccgagcgcggcgttccgggccaggtggacttctacgcgcgcttctcgccgtccccgctctccatgaagcagttcctggacttcggatcagtgaatgcttgtgaaaagacctcatttatgtttctgcggcaagagttgcctgtcagactggcaaatataatgaaagaaataagtctccttccagataatcttctcaggacaccatccgttcaattggtacaaagctggtatatccagagtcttcaggagcttcttgattttaaggacaaaagtgctgaggatgctaaagctatttatgactttacagatactgtgatacggatcagaaaccgacacaatgatgtcattcccacaatggcccagggtgtgattgaatacaaggagagctttggggtggatcctgtcaccagccagaatgttcagtactttttggatcgattctacatgagtcgcatttcaattagaatgttactcaatcagcactctttattgtttggtggaaaaggcaaaggaagtccatctcatcgaaaacacattggaagcataaatccaaactgcaatgtacttgaagttattaaagatggctatgaaaatgctaggcgtctgtgtgatttgtattatattaactctcccgaactagaacttgaagaactaaatgcaaaatcaccaggacagccaatacaagtggtttatgtaccatcccatctctatcacatggtgtttgaacttttcaagaatgcaatgagagccactatggaacaccatgccaacagaggtgtttacccccctattcaagttcatgtcacgctgggtaatgaggatttgactgtgaagatgagtgaccgaggaggtggcgttcctttgaggaaaattgacagacttttcaactacatgtattcaactgcaccaagacctcgtgttgagacctcccgcgcagtgcctctggctggttttggttatggattgcccatatcacgtctttacgcacaatacttccaaggagacctgaagctgtattccctagagggttacgggacagatgcagttatctacattaaggctctgtcaacagactcaatagaaagactcccagtgtataacaaagctgcctggaagcattacaacaccaaccacgaggctgatgactggtgcgtccccagcagagaacccaaagacatgacgacgttccgcagtgcctagacacacttgggacatcggaaaatccaaatgtggcttttgtattaaatttggaaggtatggtgttcagaactatattataccaagtactttatttatcgttttcacaaaactatttgagtagaataaatggaaactgaattccatttgtgcccgttaaacctcctaaaggatgaaattgcacctattttacacttatattttcacagttaattgaacatatttttaaacaactgtagttttgggcaacttttcactttgtggtagacttcagaagtgtggaaatcttcgggtttctataggaaactagttttttttttttaagaaatactttcatttatgtttgctagaaacattttctaaatgatagtgattagctggttagccatcttcctgttatttggaggagttctgccatcttttattcggtagtgacagctgtaatatggtcttcatgtttatcagtgacttgactacaagtaaagcagaaaacagttgg

SEQ ID NO: 3441 - DNA, 1515 bp, Homo sapiens
  source 1..1515: mol_type = genomic DNA
gccgggctccggctaggagggtgggggccgcgccggtgacagccgatccccgcccctgctgcccgccacgtccctcacgtaccactcggcagaggcgcggggaaacctggcgtactggctgtggcttctctagcgggactcggcatgaggctggcgcggctgcttcgcggagccgccttggccggcccgggcccggggctgcgcgccgccggcttcagccgcagcttcagctcggactcgggctccagcccggcgtccgagcgcggcgttccgggccaggtggacttctacgcgcgcttctcgccgtccccgctctccatgaagcagttcctggacttcggatcagtgaatgcttgtgaaaagacctcatttatgtttctgcggcaagagttgcctgtcagactggcaaatataatgaaagaaataagtctccttccagataatcttctcaggacaccatccgttcaattggtacaaagctggtatatccagagtcttcaggagcttcttgattttaaggacaaaagtgctgaggatgctaaagctatttatgaaaggcctagaagaacatggttgcaggtctctagtttatgctgtatggcctgcaagatgatctttacagatactgtgatacggatcagaaaccgacacaatgatgtcattcccacaatggcccagggtgtgattgaatacaaggagagctttggggtggatcctgtcaccagccagaatgttcagtactttttggatcgattctacatgagtcgcatttcaattagaatgttactcaatcagcactctttattgtttggtggaaaaggcaaaggaagtccatctcatcgaaaacacattggaagcataaatccaaactgcaatgtacttgaagttattaaagatggctatgaaaatgctaggcgtctgtgtgatttgtattatattaactctcccgaactagaacttgaagaactaaatgcaaaatcaccaggacagccaatacaagtggtttatgtaccatcccatctctatcacatggtgtttgaacttttcaagaatgcaatgagagccactatggaacaccatgccaacagaggtgtttacccccctattcaagttcatgtcacgctgggtaatgaggatttgactgtgaagatgagtgaccgaggaggtggcgttcctttgaggaaaattgacagacttttcaactacatgtattcaactgcaccaagacctcgtgttgagacctcccgcgcagtgcctctggctggttttggttatggattgcccatatcacgtctttacgcacaatacttccaaggagacctgaagctgtattccctagagggttacgggacagatgcagttatctacattaaggctctgtcaacagactcaatagaaagactcccagtgtataacaaagctgcctggaagcattacaacaccaaccacgaggctgatgactggtgcgtccccagcagagaacccaaagacatgacgacgttccgcagtgcctag

SEQ ID NO: 3442 - DNA, 2987 bp, Homo sapiens
  source 1..2987: mol_type = genomic DNA
gatccccgcccctgctgcccgccacgtccctcacgtaccactcggcagaggcgcggggaaacctggcgtactggctgtggcttctctagcgggactcggcatgaggctggcgcggctgcttcgcggagccgccttggccggcccgggcccggggctgcgcgccgccggcttcagccgcagcttcagctcggactcgggctccagcccggcgtccgagcgcggcgttccgggccaggtggacttctacgcgcgcttctcgccgtccccgctctccatgaagcagttcctggacttcggatcagtgaatgcttgtgaaaagacctcatttatgtttctgcggcaagagttgcctgtcagactggcaaatataatgaaagaaataagtctccttccagataatcttctcaggacaccatccgttcaattggtacaaagctggtatatccagagtcttcaggagcttcttgattttaaggacaaaagtgctgaggatgctaaagctatttatgactttacagatactgtgatacggatcagaaaccgacacaatgatgtcattcccacaatggcccagggtgtgattgaatacaaggagagctttggggtggatcctgtcaccagccagaatgttcagtactttttggatcgattctacatgagtcgcatttcaattagaatgttactcaatcagcactctttattgtttggtggaaaaggcaaaggaagtccatctcatcgaaaacacattggaagcataaatccaaactgcaatgtacttgaagttattaaagatggctatgaaaatgctaggcgtctgtgtgatttgtattatattaactctcccgaactagaacttgaagaactaaatgcaaaatcaccaggacagccaatacaagtggtttatgtaccatcccatctctatcacatggtgtttgaacttttcaagaatgcaatgagagccactatggaacaccatgccaacagaggtgtttacccccctattcaagttcatgtcacgctgggtaatgaggatttgactgtgaagatgagtgaccgaggaggtggcgttcctttgaggaaaattgacagacttttcaactacatgtattcaactgcaccaagacctcgtgttgagacctcccgcgcagtgcctctggctggttttggttatggattgcccatatcacgtctttacgcacaatacttccaaggagacctgaagctgtattccctagagggttacgggacagatgcagttatctacattaaggctctgtcaacagactcaatagaaagactcccagtgtataacaaagctgcctggaagcattacaacaccaaccacgaggctgatgactggtgcgtccccagcagagaacccaaagacatgacgacgttccgcagtgcctagacacacttgggacatcggaaaatccaaatgtggcttttgtattaaatttggaagtgtggcccagagttgctcagaattggagcagagcctgagacgtatctgcagatcctgtcatcagctggcaagtccaggagactgtgtcatttagagactgtgttgttagttatccctcaacatcttctaaggtggcaggaaataatattggaaataacattttaaagtaaaaattttaaagtttaaagaagagttttgccacttaaacaggggagctttgtctggaaaatacactgagttgaaacacttcatccttggaaggattatataagatgaacagttgtgataaatgtgtagattagagggatgtgaatgggcagttagtccagtgccctcatttaagaggccaagatcctgattcagaggaggcatcctttgcccagagctgcttagctaatctgaccaaatgttgggaaaaatgtctcacctaacccactattccttaattatggattttgtgaaaaacaatagaacatgttaatgagtaatttatattagttcgatgtattacaattttttagctttaaattacagttttcttataatgttgaaatgttttagaatcctttgaatctaagtatttgtttcctaaatgaaacatttgtacaacatttgatgtttttacttatgaaatattctcctcccccaagaaaatttaaactttttctctctatttaaaagctaagaaatgttttaaaggaaaaatgaaattatcttcctttagcttatttttaaggtaaaacagctttttactctgttattgtggtaatggacagaatattacatacaaaaatattctgggagagctttttcctagttggttttaaatcattgtgccacctgaaaggtttttagattttataggagctaatttgtccaccagcattaatgtaacacagtgtagttatgaaaatatattgaaggacaggaagtggacacgaagtgatttttgtaacctgagcagttaatgaatgtgccaacattttctaggaagggacagcaagaatattctgctctgtagttaaaatactggctggcttttgatgtcttcatgcttaattgtgatcactttcttgcactgtgatgtttttacgtgaatatgttgaagtagaagtctaccatattattttataaaatgttttctgtatggcaataaactgaaaacatggatcaacccttcttttgaaaataaactgagtcaatttagccttttaaaaatatagtcatctcttttaaatagaatcctcttccaccatcaaggctcaacattttgtaagcatccaaaaaattggtaattagggggcttgcactaaatttcactatcttcagtagagaggaactgtttggaacttagatttccaatgtgtatattctaatggagaaagcaagaggtagagtttgtatgtttgacttaccttagatttttattttccatacatactgcaaatgattgacttgttgcataaatgaagatcttctgttgtgtgcttttcaaacactgtaaataaatttgaaatttgaa

SEQ ID NO: 3443 - DNA, 1748 bp, Homo sapiens
  source 1..1748: mol_type = genomic DNA
ataatatgctcctttttcaggtaaagagacggaggctcagagaggttaaacagctcactcaaaggcacagagccagtacatggcagtacatctcttctcccggggccgccgtcgcggtgatactatttagggccacacgtcccagtgttcagctttcgtatttacgtactactgtttggcaagcggggactcctgaagctctctgaccctggaaaatgcgtggcttgcgtcacagaggagcgtttctggaacgcgctcgcagcacgacaccgcggtgtgtgcaagcggaacgccgccctgtccttgagccttttggctgagattgggagggcagaggaagcaggaaggatcagtgaatgcttgtgaaaagacctcatttatgtttctgcggcaagagttgcctgtcagactggcaaatataatgaaagaaataagtctccttccagataatcttctcaggacaccatccgttcaattggtacaaagctggtatatccagagtcttcaggagcttcttgattttaaggacaaaagtgctgaggatgctaaagctatttatgactttacagatactgtgatacggatcagaaaccgacacaatgatgtcattcccacaatggcccagggtgtgattgaatacaaggagagctttggggtggatcctgtcaccagccagaatgttcagtactttttggatcgattctacatgagtcgcatttcaattagaatgttactcaatcagcactctttattgtttggtggaaaaggcaaaggaagtccatctcatcgaaaacacattggaagcataaatccaaactgcaatgtacttgaagttattaaagatggctatgaaaatgctaggcgtctgtgtgatttgtattatattaactctcccgaactagaacttgaagaactaaatgcaaaatcaccaggacagccaatacaagtggtttatgtaccatcccatctctatcacatggtgtttgaacttttcaagaatgcaatgagagccactatggaacaccatgccaacagaggtgtttacccccctattcaagttcatgtcacgctgggtaatgaggatttgactgtgaagatgagtgaccgaggaggtggcgttcctttgaggaaaattgacagacttttcaactacatgtattcaactgcaccaagacctcgtgttgagacctcccgcgcagtgcctctggctggttttggttatggattgcccatatcacgtctttacgcacaatacttccaaggagacctgaagctgtattccctagagggttacgggacagatgcagttatctacattaaggctctgtcaacagactcaatagaaagactcccagtgtataacaaagctgcctggaagcattacaacaccaaccacgaggctgatgactggtgcgtccccagcagagaacccaaagacatgacgacgttccgcagtgcctagacacacttgggacatcggaaaatccaaatgtggcttttgtattaaatttggaagattcttcagttttgggacttggactggctttccttgcccctcagcttgcagatggcctgttgtgggaccttgtgatcatgaactcctcctcccacatctgatggagctaccaatcatcagatctcctctgcctctggggtgcgtctcaggctggccaatcacgttcttcatccacgtggactatgactggccctagggagaaaacatggagatatgaatgactgtgtggagc

SEQ ID NO: 3444 - DNA, 1338 bp, Homo sapiens
  source 1..1338: mol_type = genomic DNA
gcgctcgcagcacgacaccgcggtgtgtgcaagcggaacgccgccctgtccttgagccttttggctgagattgggagggcagaggaagcaggaaggatcagtgaatgcttgtgaaaagacctcatttatgtttctgcggcaagagttgcctgtcagactggcaaatataatgaaagaaataagtctccttccagataatcttctcaggacaccatccgttcaattggtacaaagctggtatatccagagtcttcaggagcttcttgattttaaggacaaaagtgctgaggatgctaaagctatttatgaggaataggtccaaaacaggcaggctttattggctcattcatcttgattccttgcagagcagagcaggtgttctctagagctttacagatactgtgatacggatcagaaaccgacacaatgatgtcattcccacaatggcccagggtgtgattgaatacaaggagagctttggggtggatcctgtcaccagccagaatgttcagtactttttggatcgattctacatgagtcgcatttcaattagaatgttactcaatcagcactctttattgtttggtggaaaaggcaaaggaagtccatctcatcgaaaacacattggaagcataaatccaaactgcaatgtacttgaagttattaaagatggctatgaaaatgctaggcgtctgtgtgatttgtattatattaactctcccgaactagaacttgaagaactaaatgcaaaatcaccaggacagccaatacaagtggtttatgtaccatcccatctctatcacatggtgtttgaacttttcaagaatgcaatgagagccactatggaacaccatgccaacagaggtgtttacccccctattcaagttcatgtcacgctgggtaatgaggatttgactgtgaagatgagtgaccgaggaggtggcgttcctttgaggaaaattgacagacttttcaactacatgtattcaactgcaccaagacctcgtgttgagacctcccgcgcagtgcctctggctggttttggttatggattgcccatatcacgtctttacgcacaatacttccaaggagacctgaagctgtattccctagagggttacgggacagatgcagttatctacattaaggctctgtcaacagactcaatagaaagactcccagtgtataacaaagctgcctggaagcattacaacaccaaccacgaggctgatgactggtgcgtccccagcagagaacccaaagacatgacgacgttccgcagtgcctagacacacttgggacatcggaaaatccaaatgtggcttttgtattaaattt

SEQ ID NO: 3445 - DNA, 2384 bp, Homo sapiens
  source 1..2384: mol_type = genomic DNA
cttttcctgagccgcttggatctttgtggaagcgggtgggctgcatatatacaggacggattcgtataggcttgcaccctggttccgaattttgcaaatattcgcagtctgggtcactgtcatccggactgggaatccccaagacccgttaagggaggatagaaggagctggaccctagctgccccagtgggcaaggacacttgaagatcaaatctgttccggcctggcagcctctccccagctgggcaggggccccaggcaccgtgatgtggagtcaagccgcctatacctcccttggctgccccagggctgctaggatccagcaatgcctgtgagaaaacctccttcaccttcctcaggcaggagctgcctgtgcgcctggccaacatcatgaaagagatcaacctgcttcccgaccgagtgctgagcacaccctccgtgcagctggtgcagagctggtatgtccagagcctcctggacatcatggagttcctggacaaggatcccgaggaccatcgcaccctgagccagttcactgacgccctggtcaccatccggaaccggcacaacgacgtggtgcccaccatggcacaaggcgtgcttgagtacaaggacacctacggcgatgaccccgtctccaaccagaacatccagtacttcctggaccgcttctacctcagccgcatctccatccgcatgctcatcaaccagcacaccctcatctttgatggcagcaccaacccagcccatcccaaacacatcggcagcatcgaccccaactgcaacgtctctgaggtggtcaaagatgcctacgacatggctaagctcctgtgtgacaagtattacatggcctcacctgacctggagatccaggagatcaatgcagccaactccaaacagccgattcacatggtctacgtcccctcccacctctaccacatgctctttgagctcttcaagaatgccatgagggcgactgtggaaagccatgagtccagcctcattctcccacccatcaaggtcatggtggccttgggtgaggaagatctgtccatcaagatgagtgaccgaggtgggggtgttcccttgaggaagattgagcgactcttcagctacatgtactccacagcacccaccccccagcctggcaccgggggaacgccgctggctggctttggttatgggctccccatttcccgcctctacgccaagtacttccagggagacctgcagctcttctccatggaaggctttgggaccgatgctgtcatctatctcaaggccctgtccacggactcggtggagcgcctgcctgtctacaacaagtcagcctggcgccactaccagaccatccaggaggccggcgactggtgtgtgcccagcacggagcccaagaacacgtccacgtaccgcgtcagctaagggccgccgtgcatctgcacctgagaggacggactgccgcctctgggtccccccaccgtggtgcccctcaccatcctcctgggggagcagggggtgggttctccctgatgaccaggttctgtctctatggaagtcactgcggtgataggtctgtgatggtccctaagtgccagtccatctctgtggagacccctcggtggcctccctatctctgtgggcgatgcctgagggttagggatgtctccaccctgatggggtgtcccagagacattttcccatggcagtcctcctctctgagaccagggctgtcacttttctgccaggggtactgggtccccctcagcaccctccacagcacaggccttccaagtggatgtcccgttgccttattcccccagcccacaaaggcaccctggccttggcctgctgaagtgttaggaagagggtgggtgccctccagacctggggactgagtggggaaaggagttacacccgtgagtggggaatgaggctggtcctgcagcctctccctccgctcagggcttgaaggtcggtggcggagggggtggctctcacagggcccaactctaaagtggaagaaccttgttagaccgagagcttgccatccagccaagctgctcgaggccctgcagtggccttggcaatgtctgtgccacctcctgagccctcccagcatgtcctcacatgctcatgcccacccgctcctccacaagcctagtccatcctgcctgagctccagcccccagcccccactgtgcccagacatgtgtgctcagggtggctttctccctaggaccttctgtgtatatagttagttttataaccctgaatgcccccacccttcccctaagcacacaggggttaaagctgtgtgtccctcccagtggctgtggcagtgacagtgacacccacacccacagtaaagaggagactgaatgag

SEQ ID NO: 3446 - DNA, 3440 bp, Homo sapiens
  source 1..3440: mol_type = genomic DNA
attggcgacgtcgaggcgccatgacgagccgattggctgggcgttggaatgcccgccagggcaagggtagggaggaggcggccgaaccgcgtcgctgggccgaaaggtgcgcgagcgctgcccgcgcggggaccacaaccaaagtcgcggccgccgcagccatgcgctgggtgtgggcgctgctgaagaatgcgtccctggcaggggcgcccaagtacatagagcacttcagcaagttctccccgtccccgctgtccatgaagcagtttctggacttcggatccagcaatgcctgtgagaaaacctccttcaccttcctcaggcaggagctgcctgtgcgcctggccaacatcatgaaagagatcaacctgcttcccgaccgagtgctgagcacaccctccgtgcagctggtgcagagctggtatgtccagagcctcctggacatcatggagttcctggacaaggatcccgaggaccatcgcaccctgagccagttcactgacgccctggtcaccatccggaaccggcacaacgacgtggtgcccaccatggcacaaggcgtgcttgagtacaaggacacctacggcgatgaccccgtctccaaccagaacatccagtacttcctggaccgcttctacctcagccgcatctccatccgcatgctcatcaaccagcacaccctcatctttgatggcagcaccaacccagcccatcccaaacacatcggcagcatcgaccccaactgcaacgtctctgaggtggtcaaagatgcctacgacatggctaagctcctgtgtgacaagtattacatggcctcacctgacctggagatccaggagatcaatgcagccaactccaaacagccgattcacatggtctacgtcccctcccacctctaccacatgctctttgagctcttcaagaatgccatgagggcgactgtggaaagccatgagtccagcctcattctcccacccatcaaggtcatggtggccttgggtgaggaagatctgtccatcaagatgagtgaccgaggtgggggtgttcccttgaggaagattgagcgactcttcagctacatgtactccacagcacccaccccccagcctggcaccgggggaacgccgctggctggctttggttatgggctccccatttcccgcctctacgccaagtacttccagggagacctgcagctcttctccatggaaggctttgggaccgatgctgtcatctatctcaaggccctgtccacggactcggtggagcgcctgcctgtctacaacaagtcagcctggcgccactaccagaccatccaggaggccggcgactggtgtgtgcccagcacggagcccaagaacacgtccacgtaccgcgtcagctaagggccgccgtgcatctgcacctgagaggacggactgccgcctctgggtccccccaccgtggtgcccctcaccatcctcctgggggagcagggggtgggttctccctgatgaccaggttctgtctctatggaagtcactgcggtgataggtctgtgatggtccctaagtgccagtccatctctgtggagacccctcggtggcctccctatctctgtgggcgatgcctgagggttagggatgtctccaccctgatggggtgtcccagagacattttcccatggcagtcctcctctctgagaccagggctgtcacttttctgccaggggtactgggtccccctcagcaccctccacagcacaggccttccaagtggatgtcccgttgccttattcccccagcccacaaaggcaccctggccttggcctgctgaagtgttaggaagagggtgggtgccctccagacctggggactgagtggggaaaggagttacacccgtgagtggggaatgaggctggtcctgcagcctctccctccgctcagggcttgaaggtcggtggcggagggggtggctctcacagggcccaactctaaagtggaagaaccttgttagaccgagagcttgccatccagccaagctgctcgaggccctgcagtggccttggcaatgtctgtgccacctcctgagccctcccagcatgtcctcacatgctcatgcccacccgctcctccacaagcctagtccatcctgcctgagctccagcccccagcccccactgtgcccagacatgtgtgctcagggtggctttctccctaggaccttctgtgtatatagttagttttataaccctgaatgcccccacccttcccctaagcacacaggggttaaagctgtgtgtccctcccagtggctgtggcagtgacagtgacacccacacccacagtaaagaggagactgaatgagactggcctggctgcatccctgggggaggggacccacacgtgcgcacgtacacacgcacactgcggtgccctgtgaccaccacatgacgcaccggggacgtccggcccagctcaggactgtgagtaaaacactgggcaaagccatctgttcagaacgccggatggcccagcacctggtgacagacctgttgtcccaccatactcagggcccagcagagtccggccaacccaacaactggagcagacagaaattctggtcactggcacatcataaggatttattgaaataaattgagaactgcctccccttcacatgcaggtgggcacccactatagctactgatggctttaaggatgtgggtgccttccaacctcccatggccctgccaccaggcccagatggtgccagtgtcctcatatctgtttccctccgaagcccctctcccagcacagatagcagaggggggataagggctgagtcccaggtacagggtgctggccgtaagccacagcccctgggcaggaatgagggagccagcatgcattggtgccatctgccgctctgtctgggcagatgggaggagctggaggggtttccaagcgggagcccccaggcctcatcggtaactctgaccagtgtcctggaagcgggactagctgctgaccagcgccacacatgaacacttcctccaaggacatttcctaaaaaggacacatgctgtccccaggctgctggtaaactccacccccatccagggagctggccccagccctcagtgtggcccagggaagcagagcttgcaccgcctgccagttctgagcccactgattccctgacaatgcctggggcagatgggggagggctgatgaacctttccaatctcgtagctgccggggacccccaggttttgcctctctgcctggctggggtgagggctgaccaggtcagcagctcctaggccttggctggtggaagtggtgtcctctgtccctatcagttcctgtttgctcagctcccaaagaggacttaggtgccctctgaggaagcagcaggaagtgaagggagtcctggcttggagaatgggtcaaagacca

SEQ ID NO: 3447 - DNA, 2341 bp, Homo sapiens
  source 1..2341: mol_type = genomic DNA
catgagctaccatgcccggccatactgttcttgcctgtaaaataacccactgcttaaaaataaataaataacctggcatttagaaataggctctgactccaacttaaaaagtgctttgaattctatcccaggtccatttttcaataaaaacagttaaaaaaaaaaaaaaaaaggcccaaaaagcaacatgtggcagtccttagcacttaggacaaaccatcccacctatctcaggaccttcagaagcattacagtgaaggcattcctggaccttcaagaaatgtttcaataatattaggacacctgttttaaaaagtaaagaatctacctaatgaaatctaaagaatttcttacgaaatgttaactggaaaaattgtggcacttgaaaggataaaaggcattgtgtttttttcgtgagaacactgaacaaatgaagaatatataaaataagtgaaaacataaaaatagggtctcacactgttgcccaggctgaagtgctcacggctcactgcagtttcaagttcctgggctcaaagatgggagtctccctatgttgcccaggctggtctccaacacctgggctcaagtggcttggcctcccaaagcgctgggattataggtctgtgccgcctccttccggtctcggtggcgcggcacgcgcggctctctaggcctccttcagctctgtggtgacggtggccgaggtggagggccggtctgaagagtggcgggactggcttcacttcctccgcggttcctcggagccgcctcgctcctcttcagggactttgctgagaagggctctcgggcgtccagaccccaccgcaaaggtgtttggcgatccgccgagaagttgttggccccaggagcatccctcggggccgaatgcgcagtggacgatgccccttctgacccaacagatccaagacgaggatgatcagtacagccttgtggccagccttgacaacgttaggaatctctccactatcttgaaagctattcatttccgagaacatgccacgtgtttcgcaactaaaaatggtatcaaagtaacagtggaaaatgcaaagtgtgtgcaagcaaatgcttttattcaggctggaatatttcaggagtttaaagttcaggaagagtctgttacttttcgaattaatttaactgtccttttagactgtttatctatttttggatcaagtcctatgccagggactttaactgcacttcgaatgtgttaccaaggttatggttaccctttgatgctgttcctggaagaaggaggagtggtgacagtctgcaaaatcaatacacaggaacctgaggagaccctggactttgatttctgcagcaccaatgttattaataaaattattctgcagtcagaggggctccgtgaagcattttctgaattggatatgacgagtgaagtcctacaaattaccatgtctcctgacaagccttatttcaggttatctacttttggaaatgcaggaagttcccaccttgactatcccaaagattctgatttgatggaagcatttcattgtaatcagacccaagtcaacagatacaagatttccttactgaaaccctctacaaaggcattagtcctatcttgtaaggtatctattcggacagataacagaggcttcctttcattacagtatatgattagaaatgaagatggacaaatatgttttgtggaatattactgctgccctgatgaagaagttcctgaatctgagtcttgagtatgacaattcactgatatttatgtgtacatttatgatagatgaagttcttattctgagtacagtactctttgtcatttcatattggattttctatagagaagaagcacaatggggaagataggagcaaggtcatgtaccctaatagttactatgttttgtaaatccattttgtagagggcatgtaaataaatgttttcctgtagtcatagattattcaggactgtcctttagttctgtcttttgaactcatgggaataattgtgagtcagcgtaacatttcaagagtctaaaggtggccgggtgtggtggctttaatcccagcactttgggaagccgaggtgggcggatcacctgaggtcaggagttcgagaccagcctgaccaacgtggagaaaccccatctctactaaaaatacaaaaaattagccggacgtggtggcacatgcctgtaatgccagctactcgggaggctgaggcaggagaattgcttgaacccgggaggcggaggttgtggtgagctgagatgacgccattgcactccagcctaggcaataagagcaaaactctgcctcaaaaaaaaaaaaaaaaaaa

SEQ ID NO: 3448 - DNA, 5770 bp, Homo sapiens
  source 1..5770: mol_type = genomic DNA
gcttgccatcacaccacacggggtcatttacttatcacctactccgcgctagagtactatgctaagtgcggaggacgcaaaaattaatgtcaaagataatccttgttcacagtattctgtctagcttaagaagagttcttagttgaatgaaagctaattctaacaacttgtgtgcacttcttttgaataaaaaccatcaacttatttgaattcttaagtttcctcctaaactccaacatttcaggaggaagaggtcacattctagtcatctttgcaatctcaaacccaaaggaagcctaacttggtacagtgcatggcacattcaatgtctgttgaatacaagtaaagctcatactacctagtctatttttcagtatctcttgagttaatgacctggttaacaagtcagagtcacagtcccaagggcaacaactttttaaaggctcccctaacgtacttcaggatccctgactgagagtggctgactatggcagtatatgggcatactaatcactggagaaataatagcgagaaataaccaaggaaaagcactactctccaaaaacattaaaaaaaaaaaacaactgaacaactagtaagaaagaacgctggatctgagcaccctgtaagtcgcttccccgtgggccgggtaaaggttttaaaacccgccgcctccaggaagacggccacgtgcacaaggattagctgcaaactccgtgcccagtctggccgggagaattgctaaaaccgacctaccgttaacacccgggctactctgaaattaagcaaggctgtagtcaagtaagtaacccaagaaaaggcgcacagagccgccgccgcaggtgtagcccggggacatcccctcctaccttgcaaacggggcctgggatccggtccctctcttcttcctccacctcctctgctgtggcgtgccgcttagctggcggctccgcatctatttcgtttctttttggcttcttcgcctgaactgcaaagcctccacgccgtttcctcttggttgccgccatcttgcctcgccgcccgcgctcttggcctcctttccggcgctgccgctcgctcctatttccgatctctatggttcggcggctctaagcgctcagctccgcggtcgtcctccaggtctgtgccgcctccttccggtctcggtggcgcggcacgcgcggctctctaggcctccttcagctctgtggtgacggtggccgaggtggagggccggtctgaagagtggcgggactggcttcacttcctccgcggttcctcggagccgcctcgctcctcttcagggactttgctgagaagggctctcgggcgtccagaccccaccgcaaaggtgtttggcgatccgccgagaagttgttggccccaggagcatccctcggggccgaatgcgcagtggacgatgccccttctgacccaacagatccaagacgaggatgatcagtacagccttgtggccagccttgacaacgttaggaatctctccactatcttgaaagctattcatttccgagaacatgccacgtgtttcgcaactaaaaatggtatcaaagtaacagtggaaaatgcaaagtgtgtgcaagcaaatgcttttattcaggctggaatatttcaggagtttaaagttcaggaagagtctgttacttttcgaattaatttaactgtccttttagactgtttatctatttttggatcaagtcctatgccagggactttaactgcacttcgaatgtgttaccaaggttatggttaccctttgatgctgttcctggaagaaggaggagtggtgacagtctgcaaaatcaatacacaggaacctgaggagaccctggactttgatttctgcagcaccaatgttattaataaaattattctgcagtcagaggggctccgtgaagcattttctgaattggatatgacgagtgaagtcctacaaattaccatgtctcctgacaagccttatttcaggttatctacttttggaaatgcaggaagttcccaccttgactatcccaaagattctgatttgatggaagcatttcattgtaatcagacccaagtcaacagatacaagatttccttactgaaaccctctacaaaggcattagtcctatcttgtaaggtatctattcggacagataacagaggcttcctttcattacagtatatgattagaaatgaagatggacaaatatgttttgtggaatattactgctgccctgatgaagaagttcctgaatctgagtcttgagtatgacaattcactgatatttatgtgtacatttatgatagatgaagttcttattctgagtacagtactctttgtcatttcatattggattttctatagagaagaagcacaatggggaagataggagcaaggtcatgtaccctaatagttactatgttttgtaaatccattttgtagagggcatgtaaataaatgttttcctgtagtcatagattattcaggactgtcctttagttctgtcttttgaactcatgggaataattgtgagtcagcgtaacatttcaagagtctaaaggtggccgggtgtggtggctttaatcccagcactttgggaagccgaggtgggcggatcacctgaggtcaggagttcgagaccagcctgaccaacgtggagaaaccccatctctactaaaaatacaaaaaattagccggacgtggtggcacatgcctgtaatgccagctactcgggaggctgaggcaggagaattgcttgaacccgggaggcggaggttgtggtgagctgagatgacgccattgcactccagcctaggcaataagagcaaaactctgcctcaaaaaaaaaaaaaaaaaaagtctaaaggcttaaagtttgatgcagctacctgaaatgatcttttatttatttattattagaaaaagcaaaggcatatgggcattgcttattagtttgaattctagagactagatcttaaagtagtggttctcaaagtgttgtgcccgcaccaacatcagaatggcctgcaaacttgtagcaaactctggggaggaggccagcattctgtattttaacaagcttccctcaggagattctgatgcctgctaaattttgggaaccactgttttaaaggaaactttttttttctttaatagcatttaattgtatgagatgattgcttttacatgtgatttccttgcaaatgttctgaagttgaggcatcaccaaacaagtctgaacaattctttatgtgatttatttttaaagtagaccttttgaagagatctatgaatgggatataaagcaattttcagtgttacaggttttcttcttcttctcaaaactgtttgctgtaagtaactgcaatcagtacttactactttccatttgcttatgagtttcttgacaaatcaaggtgtagaaaaccagttattaagtgattttgtactttcctggtagttgtcactaaaataatttttgtggcatataaatatatttaataaaatgcaaaaattatcttcctgtctagtagaaaaaattacatgagtaaagtgaagcttctgtctttgttactgtaccaggtgacaacagctgagtgtccctccatggacagtcactattggccttttgagtgagacagttctttaggataaaaacctgtcatcccattgcaggattcatttagcctttctggcccttacccactgatgctagtcattgtgaccaccccacctcccccaaataaaagtgtgccaaactattcattgttgagaaccattcaattgtattcaccaaaattggaggatatattggaatgccctaccttaatataggtcacatagcattagagaaaattggtttggagagtattacagcaaagtgtgctgcaaggaggctactccagcacaatggcaggcactgcttcccaggcatatggacaattctgggaggtggccagggtcagcacctgataactagtaagtgtctcaatctcagcatacaaaatttagcagtgactacaaaagaagttggaattttctaaaatgtttgtattcaagaaggaaacaaatgaatttactaaatgttgtcagagtattttttgtttagataaccaccaagaacagaacaaacctaaaagatacttgggaaaatatctaatcagtcaacattctaaggactgttaaatgtgaaatagcatagttattttttgtcttttgttactagtgtgaacaaagaacggcgcctaacatataatgggcatttagtaactctgttagatgaaagactctccaatttcagattttcttttagcatcttattagtcactacttaattctgatgatttagctctaaatttattttgatctcagtttttttatttttatttttggagacaagatcttgctctgttgcccaggctggagtacagttgtaggattacagttcactccagcctcaatctcctaggctcaagcaatcctcccatctcagcttcccaaatagctacgactacaggtgcatgcctccatgccctgctaatttttgtattttttgtagagatggggttttactatgttccctaggctaatcttgaactcctgagctcaagcaatccacccgcctcggcctcccaaagggctgggattacaggcgtgagctatcatgcctggcctaatgtattttttaaaagttgaatctaaaaagaatttaaaacaaatataaatcagctcagtaaggatggatatttttgtacatttaaaactattattttaggccgggagtggtggctcacacctgtaatcccagcattttgggaagccgaggcagggggatcatctgaggtcaggaagttcgagatcagcctggccaacatggtgaaacccctacctctactaaaaatacaaaaattagctgggtgtggtggtgggtgtctgtaatcccagctacttgagaggctgaggcaagagaatcacttgaaactggaaggcgggggttgcagtgagccgagattgcaccattgcactccagcctgggtgacagagcaagactccgtctcaaaaacaaaaaaaattaaaataaaaattattgttttagctgcatgtcttcagctatttagaattcaaagactaatgaattgtttctaagtcaccctaacatcaaggtacttattttataaagaatttcctccttatttgtgttctaattgacccaggaatttttactttaataaaagtttaactttatttcctatggaaaatcactagggggagtgctccctcaggcagagcaggcgacactttggtgccactacaaattgatgtgtagtatatagaagaatacagtcttatatttaaagacttttagttctgtctttttgaagtttatctctctttctagtaaaatggtgcttactgtgaatggataatcttttttttcatttttcatttgttgatttcccattcgatgatgtagtgcttccaccgagaattgatgaaatgcttcaaaataataaaagtatttgttaaattccactttaataaaaataaggcatgtaacacagtcattttaacaggaagccacagggtttctgtggtgttaccaaagtcctagtaaaaattaattaaaattgctaaaagggcagaatgtggcactctcaacagtggggtaggcagtccttcagaacatagagacttccttctttccttccctgtcttcacattgcttgtcccttatccccacctgaaataaaatctattgggtcctga

SEQ ID NO: 3449 - DNA, 1151 bp, Homo sapiens
  source 1..1151: mol_type = genomic DNA
gtggagggccggtctgaagagtggcgggactggcttcacttcctccgcggttcctcggagccgcctcgctcctcttcagggactttgctgagaagggctctcgggcgtccagaccccaccgcaaaggtgtttggcgatccgccgagaagttgttggccccaggagcatccctcggggccgaatgcgcagtggacgatgccccttctgacccaacagatccaagacgaggatgatcagtacagccttgtggccagccttgacaacgttaggaatctctccactatcttgaaagctattcatttccgagaacatgccacgtgtttcgcaactaaaaatggtatcaaagtaacagtggaaaatgcaaagtgtgtgcaagcaaatgcttttattcaggggactttaactgcacttcgaatgtgttaccaaggttatggttaccctttgatgctgttcctggaagaaggaggagtggtgacagtctgcaaaatcaatacacaggaacctgaggagaccctggactttgatttctgcagcaccaatgttattaataaaattattctgcagtcagaggggctccgtgaagcattttctgaattggatatgacgagtgaagtcctacaaattaccatgtctcctgacaagccttatttcaggttatctacttttggaaatgcaggaagttcccaccttgactatcccaaagattctgatttgatggaagcatttcattgtaatcagacccaagtcaacagatacaagatttccttactgaaaccctctacaaaggcattagtcctatcttgtaaggtatctattcggacagataacagaggcttcctttcattacagtatatgattagaaatgaagatggacaaatatgttttgtggaatattactgctgccctgatgaagaagttcctgaatctgagtcttgagtatgacaattcactgatatttatgtgtacatttatgatagatgaagttcttattctgagtacagtactctttgtcatttcatattggattttctatagagaagaagcacaatggggaagataggagcaaggtcatgtaccctaatagttactatgttttgtaaatccattttgtagagggcatgtaaataaatgttttcctgtagtcatagatt

SEQ ID NO: 3450 - DNA, 2135 bp, Homo sapiens
  source 1..2135: mol_type = genomic DNA
caagtgaattcatggtattttacttttttgggaaatactggaaatgaagacctgcaactgtaatttgaaataaggaaaactttaattttcagtataaaaattgctcaaatagaattgcctgattttaatgacaaaagtatatgggagtccacatttatgtaagaaatgaaactataaaatgtataaataatttgcaaatcagaattgctgtcgaaagttttactataatgaaagatattttcatactctcaaaaatatagaggaaaggggccaagattatagtaccagtcacaatcttttgatgaggacgaaatgaatcagcatgaacttgctgtgcataaaaagaaaattgaagaagtcgaaacctggttaaaagctcaagttttagaaaggcaaccaaaacagggtggatctattttattaataacaggtcctcctggatgtggaaagacaacgaccttaaaaatactatcaaaggagcatggtattcaagtacaagagtggattaatccagttttaccagacttccaaaaagatgatttcaaggggatgtttaatactgaatcaagcttccatatgtttccctatcagtctcagatagcagttttcaaagagtttctactaagagcgacaaagtataacaagttacaaatgcttggagatgatctgagaactgataagaagataattctggttgaagatttacctaaccagttttatcgggattctcatactttacatgaagttctaaggaagtatgtgaggattggtcgatgtcctcttatatttataatctcggacagtctcagtggagataataatcaaaggttattgtttcccaaagaaattcaggaagagtgttctatctcaaatattagtttcaaccctgtggcaccaacaattatgatgaaatttcttaatcgaatagtgactatagaagctaacaagaatggaggaaaaattactgtccctgacaaaacttctctagagttgctctgtcagggatgttctggtgatatcagaagtgcaataaacagcctccagttttcttcttcaaaaggagaaaacaacttacggccaaggaaaaaaggaatgtctttaaaatcagatgctgtgctgtcaaaatcaaaacgaagaaaaaaacctgatagggtttttgaaaatcaagaggtccaagctattggtggcaaagatgtttctctgtttctcttcagagctttggggaaaattctatattgtaaaagagcatctttaacagaattagactcacctcggttgccctctcatttatcagaatatgaacgggatacattacttgttgaacctgaggaggtagtagaaatgtcacacatgcctggagacttatttaatttatatcttcaccaaaactacatagatttcttcatggaaattgatgatattgtgagagccagtgaatttctgagttttgcagatatcctcagtggtgactggaatacacgctctttactcagggaatatagcacatctatagctacgagaggtgtgatgcattccaacaaagcccgaggatatgctcattgccaaggaggaggatcaagttttcgacccttgcacaaacctcagtggtttctaataaataaaaagtatcgggaaaattgcctggcagcaaaagcactttttcctgacttctgcctaccagctttatgcctccaaactcagctattgccataccttgctctactaaccattccaatgagaaatcaagctcagatttcttttatccaagatattggaaggctccctctgaagcgacactttggaagattgaaaatggaagccctgactgacagggaacatggaatgatagaccctgacagcggagatgaagcccagcttaatggaggacattctgcagaggaatctctgggtgaacccactcaagccactgtgccggaaacctggtctcttcctttgagtcagaatagtgccagtgaactgcctgctagccagccccagcccttttcagcccaaggagacatggaagaaaacataataatagaagactacgagagtgatgggacatagaagccagcctgctaatcagattgctacttcacagcttcatttttgtttcattcagtggtacttcagca

SEQ ID NO: 3451 - DNA, 3164 bp, Homo sapiens
  source 1..3164: mol_type = genomic DNA
acctgtataccttttgaaacgtcacagtctctaatcgtgaacgatttggggcggagggctgaacaatgtgttttctagtgtgtcgaggtgtttataggctatgtgtgcctccaaactgtaaagtagtccagtatactttccaatgtataagtttgtagaccttaaacttttcttctggctaacttaaaatcgttgaattcactagtttgcataaacatttaagaatttgaaaacacggttgaaaaacagtgttaccaagaaattttgtaataacatgttcaaatgaagacaaaaattttacagtttaagacttaaattcttcgtccacagcaagtgaattcatggtattttacttttttgggaaatactggaaatgaagacctgcaactgtaatttgaaataaggaaaactttaattttcagtataaaaattgctcaaatagaattgcctgattttaatgacaaaagtatatgggagtccacatttatgtaagaaatgaaactataaaatgtataaataatttgcaaatcagaattgctgtcgaaagttttactataatgaaagatattttcatactctcaaaaatatagaggaaaggggccaagattatagtaccagtcacaatcttttgatgaggacgaaatgaatcaggtaacagactgggttgacccatcatttgatgattttctagagtgtagtggcgtctctactattactgccacatcattaggtgtgaataactcaagtcatagaagaaaaaatgggccttctacattagaaagcagcagatttccagcgagaaaaagaggaaatctatcttccttagaacagatttatggtttagaaaattcaaaagaatatctgtctgaaaatgaaccatgggtggataaatataaaccagaaactcagcatgaacttgctgtgcataaaaagaaaattgaagaagtcgaaacctggttaaaagctcaagttttagaaaggcaaccaaaacagggtggatctattttattaataacaggtcctcctggatgtggaaagacaacgaccttaaaaatactatcaaaggagcatggtattcaagtacaagagtggattaatccagttttaccagacttccaaaaagatgatttcaaggggatgtttaatactgaatcaagcttccatatgtttccctatcagtctcagatagcagttttcaaagagtttctactaagagcgacaaagtataacaagttacaaatgcttggagatgatctgagaactgataagaagataattctggttgaagatttacctaaccagttttatcgggattctcatactttacatgaagttctaaggaagtatgtgaggattggtcgatgtcctcttatatttataatctcggacagtctcagtggagataataatcaaaggttattgtttcccaaagaaattcaggaagagtgttctatctcaaatattagtttcaaccctgtggcaccaacaattatgatgaaatttcttaatcgaatagtgactatagaagctaacaagaatggaggaaaaattactgtccctgacaaaacttctctagagttgctctgtcagggatgttctggtgatatcagaagtgcaataaacagcctccagttttcttcttcaaaaggagaaaacaacttacggccaaggaaaaaaggaatgtctttaaaatcagatgctgtgctgtcaaaatcaaaacgaagaaaaaaacctgatagggtttttgaaaatcaagaggtccaagctattggtggcaaagatgtttctctgtttctcttcagagctttggggaaaattctatattgtaaaagagcatctttaacagaattagactcacctcggttgccctctcatttatcagaatatgaacgggatacattacttgttgaacctgaggaggtagtagaaatgtcacacatgcctggagacttatttaatttatatcttcaccaaaactacatagatttcttcatggaaattgatgatattgtgagagccagtgaatttctgagttttgcagatatcctcagtggtgactggaatacacgctctttactcagggaatatagcacatctatagctacgagaggtgtgatgcattccaacaaagcccgaggatatgctcattgccaaggaggaggatcaagttttcgacccttgcacaaacctcagtggtttctaataaataaaaagtatcgggaaaattgcctggcagcaaaagcactttttcctgacttctgcctaccagctttatgcctccaaactcagctattgccataccttgctctactaaccattccaatgagaaatcaagctcagatttcttttatccaagatattggaaggctccctctgaagcgacactttggaagattgaaaatggaagccctgactgacagggaacatggaatgatagaccctgacagcggagatgaagcccagcttaatggaggacattctgcagaggaatctctgggtgaacccactcaagccactgtgccggaaacctggtctcttcctttgagtcagaatagtgccagtgaactgcctgctagccagccccagcccttttcagcccaaggagacatggaagaaaacataataatagaagactacgagagtgatgggacatagaagccagcctgctaatcagattgctacttcacagcttcatttttgtttcattcagtggtacttcagcagagttaatatgcttttctgatgaattacacaacagtttgttaattcttcattcttgtagtatttcatcacaagaaacctactcttctgtcatcttgaagtaaatagaagatcaagccttcaaatctcttaattttttcggtatttattaaatctgtgagtggtttaaggagcggtcagtgtgtataaagtgtgtttgaacattatgccaaatatcaagatgtgaaggactaattcaggatgcaaaaacgttattggggggttgtaaatatcaactattcaacagtttaggatgcaattacgagtgtaaactgtgtgccttatttacactttattgtctcccgcttctcagatagttttgatgtgttgtacagtggaatatcttagatactttttggaaagtatttacataagttatatcacaattaaaatgttgaatttaa

SEQ ID NO: 3452 - DNA, 2789 bp, Homo sapiens
  source 1..2789: mol_type = genomic DNA
agcccgggtagggccaggtggctgccctttcacctagggtagtccctggtcgcctccgctcttcgcctaaaaggggatgcagctccgggaaatatatgggagtccacatttatgtaagaaatgaaactataaaatgtataaataatttgcaaatcagaattgctgtcgaaagttttactataatgaaagatattttcatactctcaaaaatatagaggaaaggggccaagattatagtaccagtcacaatcttttgatgaggacgaaatgaatcaggtaacagactgggttgacccatcatttgatgattttctagagtgtagtggcgtctctactattactgccacatcattaggtgtgaataactcaagtcatagaagaaaaaatgggccttctacattagaaagcagcagatttccagcgagaaaaagaggaaatctatcttccttagaacagatttatggtttagaaaattcaaaagaatatctgtctgaaaatgaaccatgggtggataaatataaaccagaaactcagcatgaacttgctgtgcataaaaagaaaattgaagaagtcgaaacctggttaaaagctcaagttttagaaaggcaaccaaaacagggtggatctattttattaataacaggtcctcctggatgtggaaagacaacgaccttaaaaatactatcaaaggagcatggtattcaagtacaagagtggattaatccagttttaccagacttccaaaaagatgatttcaaggggatgtttaatactgaatcaagcttccatatgtttccctatcagtctcagatagcagttttcaaagagtttctactaagagcgacaaagtataacaagttacaaatgcttggagatgatctgagaactgataagaagataattctggttgaagatttacctaaccagttttatcgggattctcatactttacatgaagttctaaggaagtatgtgaggattggtcgatgtcctcttatatttataatctcggacagtctcagtggagataataatcaaaggttattgtttcccaaagaaattcaggaagagtgttctatctcaaatattagtttcaaccctgtggcaccaacaattatgatgaaatttcttaatcgaatagtgactatagaagctaacaagaatggaggaaaaattactgtccctgacaaaacttctctagagttgctctgtcagggatgttctggtgatatcagaagtgcaataaacagcctccagttttcttcttcaaaaggagaaaacaacttacggccaaggaaaaaaggaatgtctttaaaatcagatgctgtgctgtcaaaatcaaaacgaagaaaaaaacctgatagggtttttgaaaatcaagaggtccaagctattggtggcaaagatgtttctctgtttctcttcagagctttggggaaaattctatattgtaaaagagcatctttaacagaattagactcacctcggttgccctctcatttatcagaatatgaacgggatacattacttgttgaacctgaggaggtagtagaaatgtcacacatgcctggagacttatttaatttatatcttcaccaaaactacatagatttcttcatggaaattgatgatattgtgagagccagtgaatttctgagttttgcagatatcctcagtggtgactggaatacacgctctttactcagggaatatagcacatctatagctacgagaggtgtgatgcattccaacaaagcccgaggatatgctcattgccaaggaggaggatcaagttttcgacccttgcacaaacctcagtggtttctaataaataaaaagtatcgggaaaattgcctggcagcaaaagcactttttcctgacttctgcctaccagctttatgcctccaaactcagctattgccataccttgctctactaaccattccaatgagaaatcaagctcagatttcttttatccaagatattggaaggctccctctgaagcgacactttggaagattgaaaatggaagccctgactgacagggaacatggaatgatagaccctgacagcggagatgaagcccagcttaatggaggacattctgcagaggaatctctgggtgaacccactcaagccactgtgccggaaacctggtctcttcctttgagtcagaatagtgccagtgaactgcctgctagccagccccagcccttttcagcccaaggagacatggaagaaaacataataatagaagactacgagagtgatgggacatagaagccagcctgctaatcagattgctacttcacagcttcatttttgtttcattcagtggtacttcagcagagttaatatgcttttctgatgaattacacaacagtttgttaattcttcattcttgtagtatttcatcacaagaaacctactcttctgtcatcttgaagtaaatagaagatcaagccttcaaatctcttaattttttcggtatttattaaatctgtgagtggtttaaggagcggtcagtgtgtataaagtgtgtttgaacattatgccaaatatcaagatgtgaaggactaattcaggatgcaaaaacgttattggggggttgtaaatatcaactattcaacagtttaggatgcaattacgagtgtaaactgtgtgccttatttacactttattgtctcccgcttctcagatagttttgatgtgttgtacagtggaatatcttagatactttttggaaagtatttacataagttatatcacaattaaaatgttgaatttaa

SEQ ID NO: 3453 - DNA, 2943 bp, Homo sapiens
  source 1..2943: mol_type = genomic DNA
cgagaggctcggcgttgagcccgggtagggccaggtggctgccctttcacctagggtagtccctggtcgcctccgctcttcgcctaaaaggggatgcagctccgggaaacaagtgaattcatggtattttacttttttgggaaatactggaaatgaagacctgcaactgtaatttgaaataaggaaaactttaattttcagtataaaaattgctcaaatagaattgcctgattttaatgacaaaagtatatgggagtccacatttatgtaagaaatgaaactataaaatgtataaataatttgcaaatcagaattgctgtcgaaagttttactataatgaaagatattttcatactctcaaaaatatagaggaaaggggccaagattatagtaccagtcacaatcttttgatgaggacgaaatgaatcaggtaacagactgggttgacccatcatttgatgattttctagagtgtagtggcgtctctactattactgccacatcattaggtgtgaataactcaagtcatagaagaaaaaatgggccttctacattagaaagcagcagatttccagcgagaaaaagaggaaatctatcttccttagaacagatttatggtttagaaaattcaaaagaatatctgtctgaaaatgaaccatgggtggataaatataaaccagaaactcagcatgaacttgctgtgcataaaaagaaaattgaagaagtcgaaacctggttaaaagctcaagttttagaaaggcaaccaaaacagggtggatctattttattaataacaggtcctcctggatgtggaaagacaacgaccttaaaaatactatcaaaggagcatggtattcaagtacaagagtggattaatccagttttaccagacttccaaaaagatgatttcaaggggatgtttaatactgaatcaagcttccatatgtttccctatcagtctcagatagcagttttcaaagagtttctactaagagcgacaaagtataacaagttacaaatgcttggagatgatctgagaactgataagaagataattctggttgaagatttacctaaccagttttatcgggattctcatactttacatgaagttctaaggaagtatgtgaggattggtcgatgtcctcttatatttataatctcggacagtctcagtggagataataatcaaaggttattgtttcccaaagaaattcaggaagagtgttctatctcaaatattagtttcaaccctgtggcaccaacaattatgatgaaatttcttaatcgaatagtgactatagaagctaacaagaatggaggaaaaattactgtccctgacaaaacttctctagagttgctctgtcagggatgttctggtgatatcagaagtgcaataaacagcctccagttttcttcttcaaaaggagaaaacaacttacggccaaggaaaaaaggaatgtctttaaaatcagatgctgtgctgtcaaaatcaaaacgaagaaaaaaacctgatagggtttttgaaaatcaagaggtccaagctattggtggcaaagatgtttctctgtttctcttcagagctttggggaaaattctatattgtaaaagagcatctttaacagaattagactcacctcggttgccctctcatttatcagaatatgaacgggatacattacttgttgaacctgaggaggtagtagaaatgtcacacatgcctggagacttatttaatttatatcttcaccaaaactacatagatttcttcatggaaattgatgatattgtgagagccagtgaatttctgagttttgcagatatcctcagtggtgactggaatacacgctctttactcagggaatatagcacatctatagctacgagaggtgtgatgcattccaacaaagcccgaggatatgctcattgccaaggaggaggatcaagttttcgacccttgcacaaacctcagtggtttctaataaataaaaagtatcgggaaaattgcctggcagcaaaagcactttttcctgacttctgcctaccagctttatgcctccaaactcagctattgccataccttgctctactaaccattccaatgagaaatcaagctcagatttcttttatccaagatattggaaggctccctctgaagcgacactttggaagattgaaaatggaagccctgactgacagggaacatggaatgatagaccctgacagcggagatgaagcccagcttaatggaggacattctgcagaggaatctctgggtgaacccactcaagccactgtgccggaaacctggtctcttcctttgagtcagaatagtgccagtgaactgcctgctagccagccccagcccttttcagcccaaggagacatggaagaaaacataataatagaagactacgagagtgatgggacatagaagccagcctgctaatcagattgctacttcacagcttcatttttgtttcattcagtggtacttcagcagagttaatatgcttttctgatgaattacacaacagtttgttaattcttcattcttgtagtatttcatcacaagaaacctactcttctgtcatcttgaagtaaatagaagatcaagccttcaaatctcttaattttttcggtatttattaaatctgtgagtggtttaaggagcggtcagtgtgtataaagtgtgtttgaacattatgccaaatatcaagatgtgaaggactaattcaggatgcaaaaacgttattggggggttgtaaatatcaactattcaacagtttaggatgcaattacgagtgtaaactgtgtgccttatttacactttattgtctcccgcttctcagatagttttgatgtgttgtacagtggaatatcttagatactttttggaaagtatttacataagttatatcacaattaaaatgttgaatttaa

SEQ ID NO: 3454 - DNA, 3060 bp, Homo sapiens
  source 1..3060: mol_type = genomic DNA
gaggccgtacctccgagaggctcggcgttgagcccgggtagggccaggtggctgccctttcacctagggtagtccctggtcgcctccgctcttcgcctaaaaggggatgcagctccgggaaacaagtgaattcatggtattttacttttttgggaaatactggaaatgaagacctgcaactgtaatttgaaataaggaaaactttaattttcagtataaaaattgctcaaatagaattgcctgattttaatgacaaaaggtgaattatagtttaatgtactgcaagtcctaaactacggatgggaactattacagtttataatgtcaaaaacttttcttagaccaaaggtatcttccacaaagtatatgggagtccacatttatgtaagaaatgaaactataaaatgtataaataatttgcaaatcagaattgctgtcgaaagttttactataatgaaagatattttcatactctcaaaaatatagaggaaaggggccaagattatagtaccagtcacaatcttttgatgaggacgaaatgaatcaggtaacagactgggttgacccatcatttgatgattttctagagtgtagtggcgtctctactattactgccacatcattaggtgtgaataactcaagtcatagaagaaaaaatgggccttctacattagaaagcagcagatttccagcgagaaaaagaggaaatctatcttccttagaacagatttatggtttagaaaattcaaaagaatatctgtctgaaaatgaaccatgggtggataaatataaaccagaaactcagcatgaacttgctgtgcataaaaagaaaattgaagaagtcgaaacctggttaaaagctcaagttttagaaaggcaaccaaaacagggtggatctattttattaataacaggtcctcctggatgtggaaagacaacgaccttaaaaatactatcaaaggagcatggtattcaagtacaagagtggattaatccagttttaccagacttccaaaaagatgatttcaaggggatgtttaatactgaatcaagcttccatatgtttccctatcagtctcagatagcagttttcaaagagtttctactaagagcgacaaagtataacaagttacaaatgcttggagatgatctgagaactgataagaagataattctggttgaagatttacctaaccagttttatcgggattctcatactttacatgaagttctaaggaagtatgtgaggattggtcgatgtcctcttatatttataatctcggacagtctcagtggagataataatcaaaggttattgtttcccaaagaaattcaggaagagtgttctatctcaaatattagtttcaaccctgtggcaccaacaattatgatgaaatttcttaatcgaatagtgactatagaagctaacaagaatggaggaaaaattactgtccctgacaaaacttctctagagttgctctgtcagggatgttctggtgatatcagaagtgcaataaacagcctccagttttcttcttcaaaaggagaaaacaacttacggccaaggaaaaaaggaatgtctttaaaatcagatgctgtgctgtcaaaatcaaaacgaagaaaaaaacctgatagggtttttgaaaatcaagaggtccaagctattggtggcaaagatgtttctctgtttctcttcagagctttggggaaaattctatattgtaaaagagcatctttaacagaattagactcacctcggttgccctctcatttatcagaatatgaacgggatacattacttgttgaacctgaggaggtagtagaaatgtcacacatgcctggagacttatttaatttatatcttcaccaaaactacatagatttcttcatggaaattgatgatattgtgagagccagtgaatttctgagttttgcagatatcctcagtggtgactggaatacacgctctttactcagggaatatagcacatctatagctacgagaggtgtgatgcattccaacaaagcccgaggatatgctcattgccaaggaggaggatcaagttttcgacccttgcacaaacctcagtggtttctaataaataaaaagtatcgggaaaattgcctggcagcaaaagcactttttcctgacttctgcctaccagctttatgcctccaaactcagctattgccataccttgctctactaaccattccaatgagaaatcaagctcagatttcttttatccaagatattggaaggctccctctgaagcgacactttggaagattgaaaatggaagccctgactgacagggaacatggaatgatagaccctgacagcggagatgaagcccagcttaatggaggacattctgcagaggaatctctgggtgaacccactcaagccactgtgccggaaacctggtctcttcctttgagtcagaatagtgccagtgaactgcctgctagccagccccagcccttttcagcccaaggagacatggaagaaaacataataatagaagactacgagagtgatgggacatagaagccagcctgctaatcagattgctacttcacagcttcatttttgtttcattcagtggtacttcagcagagttaatatgcttttctgatgaattacacaacagtttgttaattcttcattcttgtagtatttcatcacaagaaacctactcttctgtcatcttgaagtaaatagaagatcaagccttcaaatctcttaattttttcggtatttattaaatctgtgagtggtttaaggagcggtcagtgtgtataaagtgtgtttgaacattatgccaaatatcaagatgtgaaggactaattcaggatgcaaaaacgttattggggggttgtaaatatcaactattcaacagtttaggatgcaattacgagtgtaaactgtgtgccttatttacactttattgtctcccgcttctcagatagttttgatgtgttgtacagtggaatatcttagatactttttggaaagtatttacataagttatatcacaattaaaatgttgaatttaa

SEQ ID NO: 3455 - DNA, 2648 bp, Homo sapiens
  source 1..2648: mol_type = genomic DNA
caagtgaattcatggtattttacttttttgggaaatactggaaatgaagacctgcaactgtaatttgaaataaggaaaactttaattttcagtataaaaattgctcaaatagaattgcctgattttaatgacaaaaggtaacagactgggttgacccatcatttgatgattttctagagtgtagtggcgtctctactattactgccacatcattaggtgtgaataactcaagtcatagaagaaaaaatgggccttctacattagaaagcagcagatttccagcgagaaaaagaggaaatctatcttccttagaacagatttatggtttagaaaattcaaaagaatatctgtctgaaaatgaaccatgggtggataaatataaaccagaaactcagcatgaacttgctgtgcataaaaagaaaattgaagaagtcgaaacctggttaaaagctcaagttttagaaaggcaaccaaaacagggtggatctattttattaataacaggtcctcctggatgtggaaagacaacgaccttaaaaatactatcaaaggagcatggtattcaagtacaagagtggattaatccagttttaccagacttccaaaaagatgatttcaaggggatgtttaatactgaatcaagcttccatatgtttccctatcagtctcagatagcagttttcaaagagtttctactaagagcgacaaagtataacaagttacaaatgcttggagatgatctgagaactgataagaagataattctggttgaagatttacctaaccagttttatcgggattctcatactttacatgaagttctaaggaagtatgtgaggattggtcgatgtcctcttatatttataatctcggacagtctcagtggagataataatcaaaggttattgtttcccaaagaaattcaggaagagtgttctatctcaaatattagtttcaaccctgtggcaccaacaattatgatgaaatttcttaatcgaatagtgactatagaagctaacaagaatggaggaaaaattactgtccctgacaaaacttctctagagttgctctgtcagggatgttctggtgatatcagaagtgcaataaacagcctccagttttcttcttcaaaaggagaaaacaacttacggccaaggaaaaaaggaatgtctttaaaatcagatgctgtgctgtcaaaatcaaaacgaagaaaaaaacctgatagggtttttgaaaatcaagaggtccaagctattggtggcaaagatgtttctctgtttctcttcagagctttggggaaaattctatattgtaaaagagcatctttaacagaattagactcacctcggttgccctctcatttatcagaatatgaacgggatacattacttgttgaacctgaggaggtagtagaaatgtcacacatgcctggagacttatttaatttatatcttcaccaaaactacatagatttcttcatggaaattgatgatattgtgagagccagtgaatttctgagttttgcagatatcctcagtggtgactggaatacacgctctttactcagggaatatagcacatctatagctacgagaggtgtgatgcattccaacaaagcccgaggatatgctcattgccaaggaggaggatcaagttttcgacccttgcacaaacctcagtggtttctaataaataaaaagtatcgggaaaattgcctggcagcaaaagcactttttcctgacttctgcctaccagctttatgcctccaaactcagctattgccataccttgctctactaaccattccaatgagaaatcaagctcagatttcttttatccaagatattggaaggctccctctgaagcgacactttggaagattgaaaatggaagccctgactgacagggaacatggaatgatagaccctgacagcggagatgaagcccagcttaatggaggacattctgcagaggaatctctgggtgaacccactcaagccactgtgccggaaacctggtctcttcctttgagtcagaatagtgccagtgaactgcctgctagccagccccagcccttttcagcccaaggagacatggaagaaaacataataatagaagactacgagagtgatgggacatagaagccagcctgctaatcagattgctacttcacagcttcatttttgtttcattcagtggtacttcagcagagttaatatgcttttctgatgaattacacaacagtttgttaattcttcattcttgtagtatttcatcacaagaaacctactcttctgtcatcttgaagtaaatagaagatcaagccttcaaatctcttaattttttcggtatttattaaatctgtgagtggtttaaggagcggtcagtgtgtataaagtgtgtttgaacattatgccaaatatcaagatgtgaaggactaattcaggatgcaaaaacgttattggggggttgtaaatatcaactattcaacagtttaggatgcaattacgagtgtaaactgtgtgccttatttacactttattgtctcccgcttctcagatagttttgatgtgttgtacagtggaatatcttagatactttttggaaagtatttacataagttatatcacaattaaaatgttgaattt

SEQ ID NO: 3456 - DNA, 3002 bp, Homo sapiens
  source 1..3002: mol_type = genomic DNA
gcaacgcccgcgagggtcggctcccggggcgctgacaaccgcctcgtggccctcggccggcctctgaagagggcagtgaggggcccccacctgggcgcccgatgcccagagcactctgcgcccccagcctgccccagcccagtccctcccggccgcgcgccctgaccgcaagtgaattcatggtattttacttttttgggaaatactggaaatgaagacctgcaactgtaatttgaaataaggaaaactttaattttcagtataaaaattgctcaaatagaattgcctgattttaatgacaaaagtatatgggagtccacatttatgtaagaaatgaaactataaaatgtataaataatttgcaaatcagaattgctgtcgaaagttttactataatgaaagatattttcatactctcaaaaatatagaggaaaggggccaagattatagtaccagtcacaatcttttgatgaggacgaaatgaatcaggtaacagactgggttgacccatcatttgatgattttctagagtgtagtggcgtctctactattactgccacatcattaggtgtgaataactcaagtcatagaagaaaaaatgggccttctacattagaaagcagcagatttccagcgagaaaaagaggaaatctatcttccttagaacagatttatggtttagaaaattcaaaagaatatctgtctgaaaatgaaccatgggtggataaatataaaccagaaactcagcatgaacttgctgtgcataaaaagaaaattgaagaagtcgaaacctggttaaaagctcaagttttagaaaggcaaccaaaacagggtggatctattttattaataacaggtcctcctggatgtggaaagacaacgaccttaaaaatactatcaaaggagcatggtattcaagtacaagagtggattaatccagttttaccagacttccaaaaagatgatttcaaggggatgtttaatactgaatcaagcttccatatgtttccctatcagtctcagatagcagttttcaaagagtttctactaagagcgacaaagtataacaagttacaaatgcttggagatgatctgagaactgataagaagataattctggttgaagatttacctaaccagttttatcgggattctcatactttacatgaagttctaaggaagtatgtgaggattggtcgatgtcctcttatatttataatctcggacagtctcagtggagataataatcaaaggttattgtttcccaaagaaattcaggaagagtgttctatctcaaatattagtttcaaccctgtggcaccaacaattatgatgaaatttcttaatcgaatagtgactatagaagctaacaagaatggaggaaaaattactgtccctgacaaaacttctctagagttgctctgtcagggatgttctggtgatatcagaagtgcaataaacagcctccagttttcttcttcaaaaggagaaaacaacttacggccaaggaaaaaaggaatgtctttaaaatcagatgctgtgctgtcaaaatcaaaacgaagaaaaaaacctgatagggtttttgaaaatcaagaggtccaagctattggtggcaaagatgtttctctgtttctcttcagagctttggggaaaattctatattgtaaaagagcatctttaacagaattagactcacctcggttgccctctcatttatcagaatatgaacgggatacattacttgttgaacctgaggaggtagtagaaatgtcacacatgcctggagacttatttaatttatatcttcaccaaaactacatagatttcttcatggaaattgatgatattgtgagagccagtgaatttctgagttttgcagatatcctcagtggtgactggaatacacgctctttactcagggaatatagcacatctatagctacgagaggtgtgatgcattccaacaaagcccgaggatatgctcattgccaaggaggaggatcaagttttcgacccttgcacaaacctcagtggtttctaataaataaaaagtatcgggaaaattgcctggcagcaaaagcactttttcctgacttctgcctaccagctttatgcctccaaactcagctattgccataccttgctctactaaccattccaatgagaaatcaagctcagatttcttttatccaagatattggaaggctccctctgaagcgacactttggaagattgaaaatggaagccctgactgacagggaacatggaatgatagaccctgacagcggagatgaagcccagcttaatggaggacattctgcagaggaatctctgggtgaacccactcaagccactgtgccggaaacctggtctcttcctttgagtcagaatagtgccagtgaactgcctgctagccagccccagcccttttcagcccaaggagacatggaagaaaacataataatagaagactacgagagtgatgggacatagaagccagcctgctaatcagattgctacttcacagcttcatttttgtttcattcagtggtacttcagcagagttaatatgcttttctgatgaattacacaacagtttgttaattcttcattcttgtagtatttcatcacaagaaacctactcttctgtcatcttgaagtaaatagaagatcaagccttcaaatctcttaattttttcggtatttattaaatctgtgagtggtttaaggagcggtcagtgtgtataaagtgtgtttgaacattatgccaaatatcaagatgtgaaggactaattcaggatgcaaaaacgttattggggggttgtaaatatcaactattcaacagtttaggatgcaattacgagtgtaaactgtgtgccttatttacactttattgtctcccgcttctcagatagttttgatgtgttgtacagtggaatatcttagatactttttggaaagtatttacataagttatatcacaattaaaatgttgaatttaa

SEQ ID NO: 3457 - DNA, 2117 bp, Homo sapiens
  source 1..2117: mol_type = genomic DNA
gtgaattatagtttaatgtactgcaagtcctaaactacggatgggaactattacagtttataatgtcaaaaacttttcttagaccaaaggtatcttccacaaaggtaacagactgggttgacccatcatttgatgattttctagagtgtagtggcgtctctactattactgccacatcattaggtgtgaataactcaagtcatagaagaaaaaatgggccttctacattagaaagcagcagatttccagcgagaaaaagaggaaatctatcttccttagaacagatttatggtttagaaaattcaaaagaatatctgtctgaaaatgaaccatgggtggataaatataaaccagaaactcagcatgaacttgctgtgcataaaaagaaaattgaagaagtcgaaacctggttaaaagctcaagttttagaaaggcaaccaaaacagggtggatctattttattaataacaggtcctcctggatgtggaaagacaacgaccttaaaaatactatcaaaggagcatggtattcaagtacaagagtggattaatccagttttaccagacttccaaaaagatgatttcaaggggatgtttaatactgaatcaagcttccatatgtttccctatcagtctcagatagcagttttcaaagagtttctactaagagcgacaaagtataacaagttacaaatgcttggagatgatctgagaactgataagaagataattctggttgaagatttacctaaccagttttatcgggattctcatactttacatgaagttctaaggaagtatgtgaggattggtcgatgtcctcttatatttataatctcggacagtctcagtggagataataatcaaaggttattgtttcccaaagaaattcaggaagagtgttctatctcaaatattagtttcaaccctgtggcaccaacaattatgatgaaatttcttaatcgaatagtgactatagaagctaacaagaatggaggaaaaattactgtccctgacaaaacttctctagagttgctctgtcagggatgttctggtgatatcagaagtgcaataaacagcctccagttttcttcttcaaaaggagaaaacaacttacggccaaggaaaaaaggaatgtctttaaaatcagatgctgtgctgtcaaaatcaaaacgaagaaaaaaacctgatagggtttttgaaaatcaagaggtccaagctattggtggcaaagatgtttctctgtttctcttcagagctttggggaaaattctatattgtaaaagagcatctttaacagaattagactcacctcggttgccctctcatttatcagaatatgaacgggatacattacttgttgaacctgaggaggtagtagaaatgtcacacatgcctggagacttatttaatttatatcttcaccaaaactacatagatttcttcatggaaattgatgatattgtgagagccagtgaatttctgagttttgcagatatcctcagtggtgactggaatacacgctctttactcagggaatatagcacatctatagctacgagaggtgtgatgcattccaacaaagcccgaggatatgctcattgccaaggaggaggatcaagttttcgacccttgcacaaacctcagtggtttctaataaataaaaagtatcgggaaaattgcctggcagcaaaagcactttttcctgacttctgcctaccagctttatgcctccaaactcagctattgccataccttgctctactaaccattccaatgagaaatcaagctcagatttcttttatccaagatattggaaggctccctctgaagcgacactttggaagattgaaaatggaagccctgactgacagggaacatggaatgatagaccctgacagcggagatgaagcccagcttaatggaggacattctgcagaggaatctctgggtgaacccactcaagccactgtgccggaaacctggtctcttcctttgagtcagaatagtgccagtgaactgcctgctagccagccccagcccttttcagcccaaggagacatggaagaaaacataataatagaagactacgagagtgatgggacatagaagccagcc

SEQ ID NO: 3458 - DNA, 859 bp, Homo sapiens
  source 1..859: mol_type = genomic DNA
ctcgcatcttcagggacagttatctgctttttaaaggagcaagtgaattcatggtattttacttttttgggaaatactggaaatgaagacctgcaactgtaatttgaaataaggaaaactttaattttcagtataaaaattgctcaaatagaattgcctgattttaatgacaaaagtatatgggagtccacatttatgtaagaaatgaaactataaaatgtataaataatttgcaaatcagaattgctgtcgaaagttttactataatgaaagatattttcatactctcaaaaatatagaggaaaggggccaagattatagtaccagtcacaatcttttgatgaggacgaaatgaatcaggtaacagactgggttgacccatcatttgatgattttctagagtgtagtggcgtctctactattactgccacatcattaggtgtgaataactcaagtcatagaagaaaaaatgggccttctacattagaaagcagcagatttccagcgagaaaaagaggaaatctatcttccttagaacagatttatggtttagaaaattcaaaagaatatctgtctgaaaatgaaccatgggtggataaatataaaccagaaactcagcatgaacttgctgtgcataaaaagaaaattgaagaagtcgaaacctggttaaaagctcaagttttagaaaggcaaccaaaacagggtggatctattttattaataacaggtcctcctggatgtggaaagacaacgaccttaaaaatactatcaaaggagcatggtattcaagtacaagagtggattaatccagttttaccagacttccaaaaagatgatttcaaggggatgtttaatactg

SEQ ID NO: 3459 - DNA, 496 bp, Homo sapiens
  source 1..496: mol_type = genomic DNA
gggtcggctcccggggcgctgacaaccgcctcgtggccctcggccggcctctgaagagggcagtgaggggcccccacctgggcgcccgatgcccagagcactctgcgcccccagcctgccccagcccagtccctcccggccgcgcgccctgaccggtgaattatagtttaatgtactgcaagtcctaaactacggatgggaactattacagtttataatgtcaaaaacttttcttagaccaaaggtatcttccacaaagtatatgggagtccacatttatgtaagaaatgaaactataaaatgtataaataatttgcaaatcagaattgctgtcgaaagttttactataatgaaagatattttcatactctcaaaaatatagaggaaaggggccaagattatagtaccagtcacaatcttttgatgaggacgaaatgaatcaggtaacagactgggttgacccatcatttgatgattttctagagtgtagtggcgt

SEQ ID NO: 3460 - DNA, 3233 bp, Homo sapiens
  source 1..3233: mol_type = genomic DNA
ccccgggaggccgtacctccgagaggctcggcgttgagcccgggtagggccaggtggctgccctttcacctagggtagtccctggtcgcctccgctcttcgcctaaaaggggatgcagctccgggaaagtaaggccgccgcggttgcggctatattatgtatatgtcttagagacgtgagtctatctctgccttcaagctttcctgggctctcgtcgctcctcctcccgacccgcccatcccatctggggatgagaagattgagggtgcagagccctgtcctgcagcggggatttgcgagctcaacccggcaccccactgattacaggattacgttggacgaatatttgagcttagtattccctgttcactgtgtggggtggtggtgggtcggctaggaatagtcttgaaggtctacctctgacatctcatttcagtaacctcgcatcttcagggacagttatctgctttttaaaggagcaagtgaattcatggtattttacttttttgggaaatactggaaatgaagacctgcaactgtaatttgaaataaggaaaactttaattttcagtataaaaattgctcaaatagaattgcctgattttaatgacaaaaggtgaattatagtttaatgtactgcaagtcctaaactacggatgggaactattacagtttataatgtcaaaaacttttcttagaccaaaggtatcttccacaaaggtaacagactgggttgacccatcatttgatgattttctagagtgtagtggcgtctctactattactgccacatcattaggtgtgaataactcaagtcatagaagaaaaaatgggccttctacattagaaagcagcagatttccagcgagaaaaagaggaaatctatcttccttagaacagatttatggtttagaaaattcaaaagaatatctgtctgaaaatgaaccatgggtggataaatataaaccagaaactcagcatgaacttgctgtgcataaaaagaaaattgaagaagtcgaaacctggttaaaagctcaagttttagaaaggcaaccaaaacagggtggatctattttattaataacaggtcctcctggatgtggaaagacaacgaccttaaaaatactatcaaaggagcatggtattcaagtacaagagtggattaatccagttttaccagacttccaaaaagatgatttcaaggggatgtttaatactgaatcaagcttccatatgtttccctatcagtctcagatagcagttttcaaagagtttctactaagagcgacaaagtataacaagttacaaatgcttggagatgatctgagaactgataagaagataattctggttgaagatttacctaaccagttttatcgggattctcatactttacatgaagttctaaggaagtatgtgaggattggtcgatgtcctcttatatttataatctcggacagtctcagtggagataataatcaaaggttattgtttcccaaagaaattcaggaagagtgttctatctcaaatattagtttcaaccctgtggcaccaacaattatgatgaaatttcttaatcgaatagtgactatagaagctaacaagaatggaggaaaaattactgtccctgacaaaacttctctagagttgctctgtcagggatgttctggtgatatcagaagtgcaataaacagcctccagttttcttcttcaaaaggagaaaacaacttacggccaaggaaaaaaggaatgtctttaaaatcagatgctgtgctgtcaaaatcaaaacgaagaaaaaaacctgatagggtttttgaaaatcaagaggtccaagctattggtggcaaagatgtttctctgtttctcttcagagctttggggaaaattctatattgtaaaagagcatctttaacagaattagactcacctcggttgccctctcatttatcagaatatgaacgggatacattacttgttgaacctgaggaggtagtagaaatgtcacacatgcctggagacttatttaatttatatcttcaccaaaactacatagatttcttcatggaaattgatgatattgtgagagccagtgaatttctgagttttgcagatatcctcagtggtgactggaatacacgctctttactcagggaatatagcacatctatagctacgagaggtgtgatgcattccaacaaagcccgaggatatgctcattgccaaggaggaggatcaagttttcgacccttgcacaaacctcagtggtttctaataaataaaaagtatcgggaaaattgcctggcagcaaaagcactttttcctgacttctgcctaccagctttatgcctccaaactcagctattgccataccttgctctactaaccattccaatgagaaatcaagctcagatttcttttatccaagatattggaaggctccctctgaagcgacactttggaagattgaaaatggaagccctgactgacagggaacatggaatgatagaccctgacagcggagatgaagcccagcttaatggaggacattctgcagaggaatctctgggtgaacccactcaagccactgtgccggaaacctggtctcttcctttgagtcagaatagtgccagtgaactgcctgctagccagccccagcccttttcagcccaaggagacatggaagaaaacataataatagaagactacgagagtgatgggacatagaagccagcctgctaatcagattgctacttcacagcttcatttttgtttcattcagtggtacttcagcagagttaatatgcttttctgatgaattacacaacagtttgttaattcttcattcttgtagtatttcatcacaagaaacctactcttctgtcatcttgaagtaaatagaagatcaagccttcaaatctcttaattttttcggtatttattaaatctgtgagtggtttaaggagcggtcagtgtgtataaagtgtgtttgaacattatgccaaatatcaagatgtgaaggactaattcaggatgcaaaaacgttattggggggttgtaaatatcaactattcaacagtttaggatgcaattacgagtgtaaactgtgtgccttatttacactttattgtctcccgcttctcagatagttttgatgtgttgtacagtggaatatcttagatactttttggaaagtatttacataagttatatcacaattaaaatgttgaatttaa

SEQ ID NO: 3461 - DNA, 2323 bp, Homo sapiens
  source 1..2323: mol_type = genomic DNA
acctccgagaggctcggcgttgagcccgggtagggccaggtggctgccctttcacctagggtagtccctggtcgcctccgctcttcgcctaaaaggggatgcagctccgggaaacaagtgaattcatggtattttacttttttgggaaatactggaaatgaagacctgcaactgtaatttgaaataaggaaaactttaattttcagtataaaaattgctcaaatagaattgcctgattttaatgacaaaaggtaacagactgggttgacccatcatttgatgattttctagagtgtagtggcgtctctactattactgccacatcattaggtgtgaataactcaagtcatagaagaaaaaatgggccttctacattagaaagcagcagatttccagcgagaaaaagaggaaatctatcttccttagaacagatttatggtttagaaaattcaaaagaatatctgtctgaaaatgaaccatgggtggataaatataaaccagaaactcagcatgaacttgctgtgcataaaaagaaaattgaagaagtcgaaacctggttaaaagctcaagttttagaaaggcaaccaaaacagggtggatctattttattaataacaggtcctcctggatgtggaaagacaacgaccttaaaaatactatcaaaggagcatggtattcaagtacaagagtggattaatccagttttaccagacttccaaaaagatgatttcaaggggatgtttaatactgaatcaagcttccatatgtttccctatcagtctcagatagcagttttcaaagagtttctactaagagcgacaaagtataacaagttacaaatgcttggagatgatctgagaactgataagaagataattctggttgaagatttacctaaccagttttatcgggattctcatactttacatgaagttctaaggaagtatgtgaggattggtcgatgtcctcttatatttataatctcggacagtctcagtggagataataatcaaaggttattgtttcccaaagaaattcaggaagagtgttctatctcaaatattagtttcaaccctgtggcaccaacaattatgatgaaatttcttaatcgaatagtgactatagaagctaacaagaatggaggaaaaattactgtccctgacaaaacttctctagagttgctctgtcagggatgttctggtgatatcagaagtgcaataaacagcctccagttttcttcttcaaaaggagaaaacaacttacggccaaggaaaaaaggaatgtctttaaaatcagatgctgtgctgtcaaaatcaaaacgaagaaaaaaacctgatagggtttttgaaaatcaagaggtccaagctattggtggcaaagatgtttctctgtttctcttcagagctttggggaaaattctatattgtaaaagagcatctttaacagaattagactcacctcggttgccctctcatttatcagaatatgaacgggatacattacttgttgaacctgaggaggtagtagaaatgtcacacatgcctggagacttatttaatttatatcttcaccaaaactacatagatttcttcatggaaattgatgatattgtgagagccagtgaatttctgagttttgcagatatcctcagtggtgactggaatacacgctctttactcagggaatatagcacatctatagctacgagaggtgtgatgcattccaacaaagcccgaggatatgctcattgccaaggaggaggatcaagttttcgacccttgcacaaacctcagtggtttctaataaataaaaagtatcgggaaaattgcctggcagcaaaagcactttttcctgacttctgcctaccagctttatgcctccaaactcagctattgccataccttgctctactaaccattccaatgagaaatcaagctcagatttcttttatccaagatattggaaggctccctctgaagcgacactttggaagattgaaaatggaagccctgactgacagggaacatggaatgatagaccctgacagcggagatgaagcccagcttaatggaggacattctgcagaggaatctctgggtgaacccactcaagccactgtgccggaaacctggtctcttcctttgagtcagaatagtgccagtgaactgcctgctagccagccccagcccttttcagcccaaggagacatggaagaaaacataataatagaagactacgagagtgatgggacatagaagccagcctgctaatcagattgctacttcacagcttcatttttgtttcattcagtggtacttcagca

SEQ ID NO: 3462 - DNA, 5886 bp, Homo sapiens
  source 1..5886: mol_type = genomic DNA
cccgcctctggcgcgtcgcgggctgctgacgtaatgcggtagcgcggggaatttcgagtggtgttggagcgccggaggctagtgggtggctgacccccagcatcctcgggagcgaccatggactccctggccgagtctcggtggcctccgggcctggcagtcatgaagacaatagatgatttgctgcggtgtggaatttgcttcgagtatttcaacattgcaatgataatacctcagtgttcacataactactgctctctctgtataagaaaatttctgtcctataaaactcagtgtccaacttgctgtgtgactgtcacagagccggatctgaaaaataaccgcatattagatgaactggtaaaaagcttgaattttgcacggaatcatctgctgcagtttgctttagagtcaccagccaaatctcctgcttcttcctcttcaaagaatcttgctgtcaaagtatatactcctgtagcctccagacagtctttaaagcaggggagcaggttaatggataatttcttgatcagagaaatgagtggttctacatcagagttgttgataaaagaaaataaaagcaaattcagccctcaaaaagaggcgagccctgctgcaaagaccaaagagacacgttctgtagaagagatcgctccagatccctcagaggctaagcgtcctgagccaccctcgacatccactttgaaacaagttactaaagtggattgtcctgtttgcggggttaacattccagaaagtcacattaataagcatttagacagctgtttatcacgcgaagagaagaaggaaagcctcagaagttctgttcacaaaaggaagccgctgcccaaaactgtatataatttgctctctgatcgtgatttaaagaaaaagctaaaagagcatggattatctattcaaggaaataaacaacagctcattaaaaggcaccaagaatttgtacacatgtacaatgcccaatgcgatgctttgcatcctaaatcagctgctgaaatagttcgagaaatcgaaaatatagagaagactaggatgcgtcttgaagctagtaaactcaatgaaagtgtaatggtttttacaaaggaccaaacagaaaaggaaatagatgaaatccacagtaaatatcgtaaaaaacataagagtgaatttcagcttctggtggatcaggctagaaaaggatacaagaaaattgctggaatgtcacaaaaaacagtaacaataacaaaagaagatgaatctacagaaaagctatcttctgtatgcatgggacaggaagataatatgacctcagtaacaaaccacttttctcaatcaaagctggactccccagaggaattggaacctgacagagaagaggattcttctagctgtattgatattcaagaagttctttcttcatcagaatcagattcatgcaatagttccagttcagacatcataagagatcttttagaagaagaggaagcctgggaagcatcacataaaaacgatcttcaagacacagaaataagtccaagacagaatcgccgcacaagagccgctgaaagtgctgagattgaaccaagaaacaagcgtaataggaattaatgtgggcttttgctgacttttcaaatgcattgattagaataccgtacttttggttgccacagatagattttctatttataaatgcccaaggaaagatgctaaattctaaatattacggttagctgatattcattcttttctgcttttccagaggggaaaaatgttacaaaatatccttacttggtcagttgcctcctgcctctaaaacatctctctctaaaaatactgacatttcacacaggtaccagctttgcagaggaggtagactctttggcactttggcacagggatttggtttggtttggtttggtttgataattaaatttcagaatgtccttaggccattctccttctcttccatggagaatccagcctcacaaaaggattctttcaacttctttattgcaagaaacagttgagttaaatgtttgtttttggaaaggcgggatgtcagttcacatccttggtgtgtgtaagtaccgatgcacgccaccaccatgcctgtgttacagcagctccatgatggttgttgcccgaggttaatgtagttgtttgttagacctgtgtcttacacatttctcagagtaggatattagtattataatttaaagctacgacagtcacaaagtcacaataacttagaaacattgcgcatattcttctgaaatagcacttaaaaatgattagtgtcagtattttttcacttgggtcaatcaaatctgtaacactgaatccaagctattaaacaaaaagtatgcaatgaatgaattttgtaaatgaatagagagtatcagtttacaataatgttcttaaaacagtatcctctggatagttgagtatgggttagaaatcattgaaatggattggtcagaaattgctatctgtgtaaaatgtctaccagtagccagatgcttccagagttcttaatgcctctctggcatttcagagccagcatcccccaactcccacccctctgccatcacccaacccaaacacatcagctttcaaatgagatgatagtaaatgcggcaatgttaagacaagaaatttatgatttgccagattcaacatttatgacctccccttccaaagactgtctccgttgaccttgtctttttggtatgccttggggtttctgataatgtgtggagtctcattatggctgagagtttagtgttttcacagtgaagtgcagacatttgatttctttatgagttccctgtgttagaaatggctatagaaaaatttgtcataataatttcatttgcatgaaatcctgaggggtgcattaaggaaactaaaagcaccacttaccaaatctatcggcagaactgatgtgaggtaagtgagcatgtcaaacaaaataggagctcacatggatatatttatgtcactgagttgtcagaaattatgtcaaaatgaaaactgtttgtttcatgacaaattatatagtctataaattaaactggaagtaattattactttaattgcagcaaaaggagtttgtgagggagcggtgagacccaagattgggaaagtaggcacatgagttcattcagcaaatatttggttatctatgtctgtcactgtgctgacactgggaatacaaaggtggccaaagatcatctagaacaatggttcccagtggggtgggcagaaagattttgccccccaggagacagctggcaatgtgtggagacacttttggaggtggagggtggtgaggggtactaccagtatcaatgggtggaggccagggatgaggctaaacacccaaccctcatggattagtttgccagggctgccgtcacaagatactgcagacggggaagcttacacaacagaaatgtgtattctcagaattctggaggctggaagtccaagatcagtagggtttcttcttcggcctctctccttggcttccactcatggtgtccttgcatggtcttttctctgtgtgcacatgactgtgcaggactggtgtcccgatttcttgtagggacagcagtcattggatcagggcccatgcgtatggcctcattttacttcagttacctcttttttagatagagggccctatctctaaatactgtcacattctgagataccggcagttaagacttccaacatatttagtggtaggggttaaggggcacgctttagactacaacactccacagtaaagaattatccagtctaacatgtcagttgtgccaagactgagaaacctgtaatgtaaaggaactcccaagtctacctgaaaagtaaggtctaaagagcatttattgagcactatctgttagcacttagcatatgtttaatattcatacattgaaagaaatgtatgttcatatccatctgacaaagattaaggaacttagagtaagtaatagatccaaaattgaaactgataaacttctggttctaaaattcaccttttagtgaaaatacagtttctcaccaaacttacagtaattcagagttattaactctttctacctcctcactcccctcaaagttataacatctcccatcaacatcagctcagaatggcagtgatgcttatggtttgtgggggtgcaggtgagctgctggatgcactttagatggcctagtatgccaggccgtcctttcatcctctactctcgtctttctttttcgacctcatgttgaggattactggtctagttgaaaaaagaattcatacacataagaccatgtatataatagagggaggtatgcctttaaaaacaaaattacatggtaaagactgatgtgtcaacagggatagacaacatagagaaggctagaactgtttctggaaaaaaacccaaaaacaatggatttcaaacttcttagcatccgataaaagaaagtagcaattattcaaatgagaaacacttctgtctgttatgtacatattatgaaagtatgaacataagagggaaaaccacaaccattacattttttaccatttcagtaatttttttttggtttttagtctgtttttagacatccttaagaacaactatctgaggctgtaaacaagtatttacattaacacccatgatactgactttatactccctacctgcattgagaccttaaagggggcatttctccattccttctgtgtatttctgggtatccccaggttcagatattcagaatacagatacaagtccatgcttgcatatgttgctgctccccccgacagacttctaccagcatctgccctcctcaccgctgctctgtcacgtgcactgcggctggccctgctggaaagtcctaccttgcctaggacgccatccccgatatagccccaagatgcaaacctgccaagtgctagggcagccctgccttcctgtccatttcagtctcttggccttgctgtgttccaagtggaaatgggagtgtgctttcctggtttgctagtgtactatcacccggaccacagcgtcctgtgcaaaaatttgcttcctctctcttcccctttcactctttctcttttctcttccccacccccttttttttctctttccccttacctttctttcctttccactcttcctgtccttccttccttcaactattaggactatatgtcaagtaatgtgcaaaacaaagacagttcctgccctgatggagcttgtagatcagaagggaagatgagcattaagtaattatatagattaatgtacaactgtgatgagtgcaacaaaagagaggttcatggcactatcaaacatgcaatggacggattttgtttttgcctataaactcttgccatagaaagcttgaaaatcagtccagggggacagcattaatcaccatgttctttccttatccctgtcttccccaaaattcatgtgttgaaacttaacaagaggtgggaactttaggatgtgattaagtcgtgagggcacagctcttatagatggggtcacggtccttctaaaagggcttgagggagtggttttgtttccttccatcccttccgccacatgaggacacagtcttcgttccctctggaggactcagcaacaacacaccatcttggaagcagagagcagtcctcaccagacacggaatctgccagtgccttgatcttggacttaccagcctccatacctgtgagaaataaatttctattgtctataagttacccagactgtggtattttcttctggcagcacaaatggacacccagaaactgatgcatgcatcttctgactcctttgattccaaaatacaaaatattagaataaagttatggaagtc

SEQ ID NO: 3463 - DNA, 581 bp, Homo sapiens
  source 1..581: mol_type = genomic DNA
taaaaacttctgttcagagcaaggacggatagtcactgcgattagggtgggcgacccggaggggggtcatgagcctggaccttgacagatctggtgaggtaagtgcggcagaagcctggcgcatgcgcagtacaagcccttaagcggcgccccgcccacatactactacaacttccggcaggctccgcgcccgcctctggcgcgtcgcgggctgctgacgtaatgcggtagcgcggggaatttcgagtggtgttggagcgccggaggctagtgggtggctgacccccagcatcctcgggagcgaccatggactccctggccgagtctcggtggcctccgggcctggcagtcatgaagacaatagatgatttgctgcggtgtggaatttgcttcgagtatttcaacattgcaatgataatacctcagtgttcacataactactgctctctctgtataagaaaatttctgtcctataaaactcagtgtccaacttgctgtgtgactgtcacagagccggatctgaaaaataaccgcatattagatgaactggtaaaaagcttgaattttgcacggaatcatct

SEQ ID NO: 3464 - DNA, 1786 bp, Homo sapiens
  source 1..1786: mol_type = genomic DNA
ccggaagtggtcggcgcgcggcgcggcgcgcctgggcgctaagatggcggcggcgtgagttgcatgttgtgtgaggatcccggggccgccgcgtcgctcgggccccgccatggccgtcaccatcacgctcaaaacgctgcagcagcagaccttcaagatccgcatggagcctgacgagacggtgaaggtgctaaaggagaagatagaagctgagaagggtcgtgatgccttccccgtggctggacagaaactcatctatgccggcaagatcttgagtgacgatgtccctatcagggactatcgcatcgatgagaagaactttgtggtcgtcatggtgaccaagaccaaagccggccagggtacctcagcacccccagaggcctcacccacagctgccccagagtcctctacatccttcccgcctgcccccacctcaggcatgtcccatcccccacctgccgccagagaggacaagagcccatcagaggaatccgcccccacgacgtccccagagtctgtgtcaggctctgttccctcttcaggtagcagcgggcgagaggaagacgcggcctccacgctagtgacgggctctgagtatgagacgatgctgacggagatcatgtccatgggctatgagcgagagcgggtcgtggccgccctgagagccagctacaacaacccccaccgagccgtggagtatctgctcacgggaattcctgggagccccgagccggaacacggttctgtccaggagagccaggtatcggagcagccggccacggaagcagcaggagagaaccccctggagttcctgcgggaccagccccagttccagaacatgcggcaggtgattcagcagaaccctgcgctgctgcccgccctgctccagcagctgggccaggagaaccctcagcttttacagcaaatcagccggcaccaggagcagttcatccagatgctgaacgagccccctggggagctggcggacatctcagatgtggagggggaggtgggcgccataggagaggaggccccgcagatgaactacatccaggtgacgccgcaggagaaagaagctatagagaggttgaaggccctgggcttcccagagagcctggtcatccaggcctatttcgcgtgtgaaaaaaatgagaacttggctgccaacttcctcctgagtcagaactttgatgacgagtgatgccaggaagccaggccaccgaagcccccaccctacccttattccatgaaagttttataaaagaaaaaatatatatatattcatgtttatttaagaaatggaaaaaaaaatcaaaaatcttaaaaaaacaagcaaacagtccagcttcctgtcctcctaaagtggcccctgttcccatctcccgggccagacagctgtccccccgtcctcctccccagcccagcctgctcagagaagctggcaggactgggaggcgacagatgggcccctcttggcctctgtcccagctctctgcagccagacggaaaggcggctgcttgcctctccatcctccgaaaaacccctgaggacccccccccatcctcttctaggatgaggggaagctggagccccaactttgatcctccattggagtggcccaaatctttccatctagggcaagtcctgaaaggcccaaggccccctccccagtctggccttggcctccagcctggagaagggctaacatcagctcattgtcaaggccacccccaccccagaacagaaccgtgtctctgataaaggttttgaagtgaataaagtttt

SEQ ID NO: 3465 - DNA, 1350 bp, Homo sapiens
  source 1..1350: mol_type = genomic DNA
gcgcggcgcggcgcgcctgggcgctaagatggcggcggcgtgagttgcatgttgtgtgaggatcccggggccgccgcgtcgctcgggccccgccatggccgtcaccatcacgctcaaaacgctgcagcagcagaccttcaagatccgcatggagcctgacgagacggtgaaggtgctaaaggagaagatagaagctgagaagggtcgtgatgccttccccgtggctggacagaaactcatctatgccggcaagatcttgagtgacgatgtccctatcagggactatcgcatcgatgagaagaactttgtggtcgtcatggtgaccaagaccaaagccggccagggtacctcagcacccccagaggcctcacccacagctgccccagagtcctctacatccttcccgcctgcccccacctcaggcatgtcccatcccccacctgccgccagagaggacaagagcccatcagaggaatccgcccccacgacgtccccagagtctgtgtcaggtgacgggctctgagtatgagacgatgctgacggagatcatgtccatgggctatgagcgagagcgggtcgtggccgccctgagagccagctacaacaacccccaccgagccgtggagtatctgctcacgggaattcctgggagccccgagccggaacacggttctgtccaggagagccaggtatcggagcagccggccacggaagcagcaggagagaaccccctggagttcctgcgggaccagccccagttccagaacatgcggcaggtgattcagcagaaccctgcgctgctgcccgccctgctccagcagctgggccaggagaaccctcagcttttacagcaaatcagccggcaccaggagcagttcatccagatgctgaacgagccccctggggagctggcggacatctcagatgtggagggggaggtgggcgccataggagaggaggccccgcagatgaactacatccaggtgacgccgcaggagaaagaagctatagagaggttgaaggccctgggcttcccagagagcctggtcatccaggcctatttcgcgtgtgaaaaaaatgagaacttggctgccaacttcctcctgagtcagaactttgatgacgagtgatgccaggaagccaggccaccgaagcccccaccctacccttattccatgaaagttttataaaagaaaaaatatatatatattcatgtttatttaagaaatggaaaaaaaaatcaaaaatcttaaaaaaacaagcaaacagtccagcttcctgtcctcctaaagtggcccctgttcccatctcccgggccagacagctgtccccccgtcctcctccccagcc

SEQ ID NO: 3466 - DNA, 1746 bp, Homo sapiens
  source 1..1746: mol_type = genomic DNA
ggcggcgtgagttgcatgttgtgtgaggatcccggggccgccgcgtcgctcgggccccgccatggccgtcaccatcacgctcaaaacgctgcagcagcagaccttcaagatccgcatggagcctgacgagacggtgaaggtgctaaaggagaagatagaagctgagaagggtcgtgatgccttccccgtggctggacagaaactcatctatgccggcaagatcttgagtgacgatgtccctatcagggactatcgcatcgatgagaagaactttgtggtcgtcatggtgaccaagaccaaagccggccagggtacctcagcacccccagaggcctcacccacagctgccccagagtcctctacatccttcccgcctgcccccacctcaggcatgtcccatcccccacctgccgccagagaggacaagagcccatcagaggaatccgcccccacgacgtccccagagtctgtgtcaggctctgttccctcttcaggtagcagcgggcgagaggaagacgcggcctccacgctagtgacgggctctgagtatgagacgatgctgacggagatcatgtccatgggctatgagcgagagcgggtcgtggccgccctgagagccagctacaacaacccccaccgagccgtggagtatctgctcacgggaattcctgggagccccgagccggaacacggttctgtccaggagagccaggtatcggagcagccggccacggaagcagcaggagagaaccccctggagttcctgcgggaccagccccagttccagaacatgcggcaggtgattcagcagaaccctgcgctgctgcccgccctgctccagcagctgggccaggagaaccctcagcttttacagcaaatcagccggcaccaggagcagttcatccagatgctgaacgagccccctggggagctggcggacatctcagatgtggagggggaggtgggcgccataggagaggaggccccgcagatgaactacatccaggtgacgccgcaggagaaagaagctatagagaggttgaaggccctgggcttcccagagagcctggtcatccaggcctatttcgcgtgtgaaaaaaatgagaacttggctgccaacttcctcctgagtcagaactttgatgacgagtgatgccaggaagccaggccaccgaagcccccaccctacccttattccatgaaagttttataaaagaaaaaatatatatatattcatgtttatttaagaaatggaaaaaaaaatcaaaaatcttaaaaaaacaagcaaacagtccagcttcctgtcctcctaaagtggcccctgttcccatctcccgggccagacagctgtccccccgtcctcctccccagcccagcctgctcagagaagctggcaggactgggaggcgacagatgggcccctcttggcctctgtcccagctctctgcagccagacggaaaggcggctgcttgcctctccatcctccgaaaaacccctgaggacccccccccatcctcttctaggatgaggggaagctggagccccaactttgatcctccattggagtggcccaaatctttccatctagggcaagtcctgaaaggcccaaggccccctccccagtctggccttggcctccagcctggagaagggctaacatcagctcattgtcaaggccacccccaccccagaacagaaccgtgtctctgataaaggttttgaagtgaataaagttttaaaaacta

SEQ ID NO: 3467 - DNA, 1526 bp, Homo sapiens
  source 1..1526: mol_type = genomic DNA
gcgtgagttgcatgttgtgtgaggatcccggggccgccgcgtcgctcgggccccgccatggccgtcaccatcacgctcaaaacgctgcagcagcagaccttcaagatccgcatggagcctgacgagacggtgaaggtgctaaaggagaagatagaagctgagaagggtcgtgatgccttccccgtggctggacagaaactcatctatgccggcaagatcttgagtgacgatgtccctatcagggactatcgcatcgatgagaagaactttgtggtcgtcatggtgaccaagaccaaagccggccagggtacctcagcacccccagaggcctcacccacagctgccccagagtcctctacatccttcccgcctgcccccacctcaggcatgtcccatcccccacctgccgccagagaggacaagagcccatcagaggaatccgcccccacgacgtccccagagtctgtgtcaggctctgttccctcttcaggtagcagcgggcgagaggaagacgcggcctccacgctagtgacgggctctgagtatgagacgatgctgacggagatcatgtccatgggctatgagcgagagcgggtcgtggccgccctgagagccagctacaacaacccccaccgagccgtggagtatctgctcacgggaattcctgggagccccgagccggaacacggttctgtccaggagagccaggtatcggagcagccggccacggaagcagcaggagagaaccccctggagttcctgcgggaccagccccagttccagaacatgcggcaggtgattcagcagaaccctgcgctgctgcccgccctgctccagcagctgggccaggagaaccctcagcttttacagttgaaggccctgggcttcccagagagcctggtcatccaggcctatttcgcgtgtgaaaaaaatgagaacttggctgccaacttcctcctgagtcagaactttgatgacgagtgatgccaggaagccaggccaccgaagcccccaccctacccttattccatgaaagttttataaaagaaaaaatatatatatattcatgtttatttaagaaatggaaaaaaaaatcaaaaatcttaaaaaaacaagcaaacagtccagcttcctgtcctcctaaagtggcccctgttcccatctcccgggccagacagctgtccccccgtcctcctccccagcccagcctgctcagagaagctggcaggactgggaggcgacagatgggcccctcttggcctctgtcccagctctctgcagccagacggaaaggcggctgcttgcctctccatcctccgaaaaacccctgaggacccccccccatcctcttctaggatgaggggaagctggagccccaactttgatcctccattggagtggcccaaatctttccatctagggcaagtcctgaaaggcccaaggccccctccccagtctggccttggcctccagcctggagaagggctaacatcagctcattgtcaaggccacccccaccccagaac

SEQ ID NO: 3468 - DNA, 4119 bp, Homo sapiens
  source 1..4119: mol_type = genomic DNA
gagtcacgatgatggcggccaccatcctgtggtgagctagcggattccctgcttgtctcgccgaccccctcgcgccttctgcagactccgtggctggcgctcggcgcgtgaggaagcacggcggcccgagttcgcggggaaggccgcagtcgcggaggcagcggcgcggtccggggcacgggctgggggagaggccgctccgctgggcgaatgtgacaagcccccacccccaccgccttcctccccagagcgcgaggagcgcgggcgaccccggggccccgccaggccacagaccccgcccagcggccagcacccggcgcaggcccggcagccgagctgcgcggcggcaccatgcaggtcaccctgaagaccctccagcagcagaccttcaagatagacattgaccccgaggagacggtgaaagcactgaaagagaagattgaatctgaaaaggggaaagatgcctttccagtagcaggtcaaaaattaatttatgcaggcaaaatcctcaatgatgatactgctctcaaagaatataaaattgatgagaaaaactttgtggtggttatggtgaccaaacccaaagcagtgtccacaccagcaccagctacaactcagcagtcagctcctgccagcactacagcagttacttcctccaccaccacaactgtggctcaggctccaacccctgtccctgccttggcccccacttccacacctgcatccatcactccagcatcagcgacagcatcttctgaacctgcacctgctagtgcagctaaacaagagaagcctgcagaaaagccagcagagacaccagtggctactagcccaacagcaactgacagtacatcgggtgattcttctcggtcaaacctttttgaagatgcaacgagtgcacttgtgacgggtcagtcttacgagaatatggtaactgagatcatgtcaatgggctatgaacgagagcaagtaattgcagccctgagagccagtttcaacaaccctgacagagcagtggagtatcttttaatgggaatccctggagatagagaaagtcaggctgtggttgacccccctcaagcagctagtactggggctcctcagtcttcagcagtggctgcagctgcagcaactacgacagcaacaactacaacaacaagttctggaggacatccccttgaatttttacggaatcagcctcagtttcaacagatgagacaaattattcagcagaatccttccttgcttccagcgttactacagcagataggtcgagagaatcctcaattacttcagcaaattagccaacaccaggagcattttattcagatgttaaatgaaccagttcaagaagctggtggtcaaggaggaggaggtggaggtggcagtggaggaattgcagaagctggaagtggtcatatgaactacattcaagtaacacctcaggaaaaagaagctatagaaaggttaaaggcattaggatttcctgaaggacttgtgatacaagcgtattttgcttgtgagaagaatgagaatttggctgccaattttcttctacagcagaactttgatgaagattgaaagggacttttttatatctcacacttcacaccagtgcattacactaacttgttcactggattgtctgggatgacttgggctcatatccacaatacttggtataaggtagtagattgttgggggtggggagggagggatctaggatacagggcagggataaatacagtgcatgtctgcttcaattagcagatgccgcaactccacacagtgtgtaaaatatatacaaccaaaaatcagcttttgcaggtctttatttcttctgtaaaacagtaggtaacttttcctaggtttcactctttttagtgtactagatccagaaacttagtgtaatgccctgctttatatttctttgacttaacattggtttcagaaagaatcttagctacctagaatttacagtctctgtttcatggcaacactggataatggctttgtgaaatttaaaaaatttttgtagcgactgtaaacagaaatgccaaattgatggttaattgttgctgcttcaaaaataagtataaaattaatatgtaaggaagcccattctttcatgttaaatacttggggtgggaggggagaaagggaaccttttcttaaaatgaaaataattactgctattttaaaatttcttgatcattgaatgtgagacccttctaacatgatttgagaagctgtacaagtataggcagagttattttcctgtttacattttttttttgttttggggaaaaaattggtaggtgtctaattactgtttacttcattgttatattgcagtaaaagttttaaaacaaccattgcatgtttgcttttgatgtatccctttgtgaaattagcacttttggggccaatggagaaatgcagcattcactctccctgtcttttccccttccctcagcagaaacgtgtttatcagcaagtcgtgagtcaaactgctgccttttaaaaaacccacaaaatgctgattcagttcaaaattaatgcaaatgtttcaaaactgggtttctgatatttgtaaatgtgtttctttattagataagagtgtattaccattaaagtcattagtataatattgctttcaaaaagaaatggtagacaaaactataatccagcatcttttattgcattggaaagactggcaaagtcttttggatgggttgggagatgtggctggaaagtactttggaaaatatacaatcaagatatctcatggcatattaaaagaaaaatcttaatagcagtgttggcttttatttggattttttcatctcagttttttctgtggaatctccttcattggcattgttatttaatcataaacggggcagatgtctacttgttcagtttttcaaatctgttttcctgagtataaataagagtatttaaagaaataatttggattgcttttgttttttgtttccttttttttaaccatctgatactaagaagatgaatttgcacagatttctctgcataatttctcaatatctttagcacagtatggtgatgatgacttttaagcatttacatcacgtactcataacctattatgaaaataaatgaaactggctgggtatggtggctcatgcctataatcccagcactttgggaggccgaggtgggcagatcacttgaggccaggagattgagaccagcctgaccgtcatggcgaaaccccgtctatactaaaaatacaaaaaatagccaggcatggtggcgcacgcctgtggtcccagctacttgggaggctgaggcatgagaattgcttgaacccgggaagtgaaggttgccgtgagctgagatcacaccactgccataaacatgacaggcttttggactttgtattacctgtatgttttataatggatcatgcataatttctcaggagaataaaatgagaattcatatatacgttcatctttcaagtcagagcaatgagttgggaaaagaggtggcatttctgatcggataatggaatactctcatttattttatgacattctctgtctactcagatcatagtgaaaactggaaacaaaaaaaaaaaacagcctcttcttggaaagtgacagcagaaggtggcatggagcttgtgtccttggacaacaaatctggatatactaggattaattatcagaagacagctcaggccaagttttgatcgttccatacagtaccttgtttatctgcttcttaaagaatcagccgagacaccataaaagaaataggctttttgtgccttttgctgttaatgtttaatttacaaactgttttggtaaatctcttaatgtaagtagctatttgactttggaattttgcattcgaggtatactgtcatttcttgaaatctttttctcgtttagttgctctgtgggaaatgtgaggaagcctaagtttgtatttgtaaatttcttatgccatcctctagtcaaattttttttcattgtttaaaaatacggaagtgttccaatataattttttcctgtactggatggctaggattctagagaattgattataaaatattttcaatacatccaa

SEQ ID NO: 3469 - DNA, 1049 bp, Homo sapiens
  source 1..1049: mol_type = genomic DNA
tagcggattccctgcttgtctcgccgaccccctcgcgccttctgcagactccgtggctggcgctcggcgcgtgaggaagcacggcggcccgagttcgcggggaaggccgcagtcgcggaggcagcggcgcggtccggggcacgggctgggggagaggccgctccgctgggcgaatgtgacaagcccccacccccaccgccttcctccccagagcgcgaggagcgcgggcgaccccggggccccgccaggccacagaccccgcccagcggccagcacccggcgcaggcccggcagccgagctgcgcggcggcaccatgcaggtcaccctgaagaccctccagcagcagaccttcaagatagacattgaccccgaggagacggtgaaagcactgaaagagaagattgaatctgaaaaggggaaagatgcctttccagtagcaggtcaaaaattaatttatgcaggcaaaatcctcaatgatgatactgctctcaaagaatataaaattgatgagaaaaactttgtggtggttatggtgaccaaacccaaagcagtgtccacaccagcaccagctacaactcagcagtcagctcctgccagcactacagcagttacttcctccaccaccacaactgtggctcaggctccaacccctgtccctgccttggcccccacttccacacctgcatccatcactccagcatcagcgacagcatcttctgaacctgcacctgctagtgcagctaaacaagagaagcctgcagaaaagccagcagagacaccagtggctactagcccaacagcaactgacagtacatcgggtgattcttctcggtcaaacctttttgaagatgcaacgagtgcacttgtgacgggtcagtcttacgagaatatggtaactgagatcatgtcaatgggctatgaacgagagcaagtaattgcagccctgagagccagtttcaacaaccctgacagagcagtggagtatcttttaatgatcatagtgaaaactggaaacaaaaaaaaaaaacagcctcttcttggaaagtga

SEQ ID NO: 3470 - DNA, 1527 bp, Homo sapiens
  source 1..1527: mol_type = genomic DNA
ggtgggggagggagacgtaggcgtcgccactacccctgtgtggacctggttagccgcttagttcccagagttggtaacccgagaagatgagccttaagaaaaaaaaaagtatcaggttccgtttgccgccgagaggtgaaagcactgaaagagaagattgaatctgaaaaggggaaagatgcctttccagtagcaggtcaaaaattaatttatgcaggcaaaatcctcaatgatgatactgctctcaaagaatataaaattgatgagaaaaactttgtggtggttatggtgaccaaacccaaagcagtgtccacaccagcaccagctacaactcagcagtcagctcctgccagcactacagcagttacttcctccaccaccacaactgtggctcaggctccaacccctgtccctgccttggcccccacttccacacctgcatccatcactccagcatcagcgacagcatcttctgaacctgcacctgctagtgcagctaaacaagagaagcctgcagaaaagccagcagagacaccagtggctactagcccaacagcaactgacagtacatcgggtgattcttctcggtcaaacctttttgaagatgcaacgagtgcacttgtgacgggtcagtcttacgagaatatggtaactgagatcatgtcaatgggctatgaacgagagcaagtaattgcagccctgagagccagtttcaacaaccctgacagagcagtggagtatcttttaatgggaatccctggagatagagaaagtcaggctgtggttgacccccctcaagcagctagtactggggctcctcagtcttcagcagtggctgcagctgcagcaactacgacagcaacaactacaacaacaagttctggaggacatccccttgaatttttacggaatcagcctcagtttcaacagatgagacaaattattcagcagaatccttccttgcttccagcgttactacagcagataggtcgagagaatcctcaattacttcagcaaattagccaacaccaggagcattttattcagatgttaaatgaaccagttcaagaagctggtggtcaaggaggaggaggtggaggtggcagtggaggaattgcagaagctggaagtggtcatatgaactacattcaagtaacacctcaggaaaaagaagctatagaaaggttaaaggcattaggatttcctgaaggacttgtgatacaagcgtattttgcttgtgagaagaatgagaatttggctgccaattttcttctacagcagaactttgatgaagattgaaagggacttttttatatctcacacttcacaccagtgcattacactaacttgttcactggattgtctgggatgacttgggctcatatccacaatacttggtataaggtagtagattgttgggggtggggagggagggatctaggatacagggcagggataaatacagtgcatgtctgcttcaattagcagatgccgcaactccacacagtgtgtaaaatatatacaacc

SEQ ID NO: 3471 - DNA, 716 bp, Homo sapiens
  source 1..716: mol_type = genomic DNA
gccttccgccccgcccccaattctggggcggagtcctcggccgcgccggcgcaaagcgtcgccgcaccccacgcctgcgcgcttcgcccgcccggccccatccccccaggtttttcgcgtgggggagggggcacgtctcggcgagtcacgatgatggcggccaccatcctgtgagcgcgaggagcgcgggcgaccccggggccccgccaggccacagaccccgcccagcggccagcacccggcgcaggcccggcagccgagctgcgcggcggcaccatgcaggtcaccctgaagaccctccagcagcagaccttcaagatagacattgaccccgaggagacggtgaaagcactgaaagagaagattgaatctgaaaaggggaaagatgcctttccagtagcaggtcaaaaattaatttatgcaggcaaaatcctcaatgatgatactgctctcaaagaatataaaattgatgagaaaaactttgtggtggttatggtgaccaaacccaaagcagtgtccacaccagcaccagctacaactcagcagtcagctcctgccagcactacagcagttacttcctccaccaccacaactgtggctcaggctccaacccctgtccctgccttggcccccacttccacacctgcatccatcactccagcatcagcgacagcatcttctgaacctgcacctgctagtgcagctaaacaagagaa

SEQ ID NO: 3472 - DNA, 456 bp, Homo sapiens
  source 1..456: mol_type = genomic DNA
ataatactaagtttaaaccagcagctttctgcccaactctatttttaaaagtagttgattctattttgggtggagatcaggggctttggtgttaagtagacctgagttccatttgtggttttgtaacttatttgctatgaccttgggcaaattacggttagtttcattctctgtataatagggataatacctgccttgcagagatgtgaagattagatggtgaaagcactgaaagagaagattgaatctgaaaaggggaaagatgcctttccagtagcaggtcaaaaattaatttatgcaggcaaaatcctcaatgatgatactgctctcaaagaatataaaattgatgagaaaaactttgtggtggttatggtgaccaaacccaaagcagtgtccacaccagcaccagctacaactcagcagtcagctcctgccagcactacagcagttacttcc

SEQ ID NO: 3473 - DNA, 811 bp, Homo sapiens
  source 1..811: mol_type = genomic DNA
cgacagcatcttctgaacctgcacctgctagtgcagctaaacaagagaagcctgcagaaaagccagcagagacaccagtggctactagcccaacagcaactgacagtacatcgggtgattcttctcggtcaaacctttttgaagatgcaacgagtgcacttgtgacgggtcagtcttacgagaatatggtaactgagatcatgtcaatgggctatgaacgagagcaagtaattgcagccctgagagccagtttcaacaaccctgacagagcagtggagtatcttttaatgatcatagtgaaaactggaaacaaaaaaaaaaaacagcctcttcttggaaagtgacagcagaaggtggcatggagcttgtgtccttggacaacaaatctggatatactaggattaattatcagaagacagctcaggccaagttttgatcgttccatacagtaccttgtttatctgcttcttaaagaatcagccgagacaccataaaagaaataggctttttgtgccttttgctgttaatgtttaatttacaaactgttttggtaaatctcttaatgtaagtagctatttgactttggaattttgcattcgaggtatactgtcatttcttgaaatctttttctcgtttagttgctctgtgggaaatgtgaggaagcctaagtttgtatttgtaaatttcttatgccatcctctagtcaaattttttttcattgtttaaaaatacggaagtgttccaatataattttttcctgtactggatggctaggattctagagaattgattataaaatattttcaataca

SEQ ID NO: 3474 - DNA, 6022 bp, Homo sapiens
  source 1..6022: mol_type = genomic DNA
ccaggagagcggcgtggacgcgtgcgggcctagaggcccacgtgatccgcagggcggccgaggcaggaagctgtgagtgcgcggttgcggggtcgcattgtggctacggctttgcgtccccggcgggcagccccaggctggtccccgcctccgctctccccaccggcggggaaagcagctggtgtgggaggaaaggctccatcccccgccccctctctcccgctgttggctggcaggatcttttggcagtcctgtggcctcgctccccgcccggatcctcctgaccctgagattcgcgggtctcacgtcccgtgcacgccttgcttcggcctcagttaagcctttgtgggctccaggtccctggtgagattagaaacgtttgcaaacatgtcccggatcgaaaagatgagcattctgggcgtgcggagttttggaatagaggacaaagataagcaaattatcactttcttcagcccccttacaattttggttggacccaatggggcgggaaagacgaccatcattgaatgtctaaaatatatttgtactggagatttccctcctggaaccaaaggaaatacatttgtacacgatcccaaggttgctcaagaaacagatgtgagagcccagattcgtctgcaatttcgtgatgtcaatggagaacttatagctgtgcaaagatctatggtgtgtactcagaaaagcaaaaagacagaatttaaaactctggaaggagtcattactagaacaaagcatggtgaaaaggtcagtctgagctctaagtgtgcagaaattgaccgagaaatgatcagttctcttggggtttccaaggctgtgctaaataatgtcattttctgtcatcaagaagattctaattggcctttaagtgaaggaaaggctttgaagcaaaagtttgatgagattttttcagcaacaagatacattaaagccttagaaacacttcggcaggtacgtcagacacaaggtcagaaagtaaaagaatatcaaatggaactaaaatatctgaagcaatataaggaaaaagcttgtgagattcgtgatcagattacaagtaaggaagcccagttaacatcttcaaaggaaattgtcaaatcctatgagaatgaacttgatccattgaagaatcgtctaaaagaaattgaacataatctctctaaaataatgaaacttgacaatgaaattaaagccttggatagccgaaagaagcaaatggagaaagataatagtgaactggaagagaaaatggaaaaggtttttcaagggactgatgagcaactaaatgacttatatcacaatcaccagagaacagtaagggagaaagaaaggaaattggtagactgtcatcgtgaactggaaaaactaaataaagaatctaggcttctcaatcaggaaaaatcagaactgcttgttgaacagggtcgtctacagctgcaagcagatcgccatcaagaacatatccgagctagagattcattaattcagtctttggcaacacagctagaattggatggctttgagcgtggaccattcagtgaaagacagattaaaaattttcacaaacttgtgagagagagacaagaaggggaagcaaaaactgccaaccaactgatgaatgactttgcagaaaaagagactctgaaacaaaaacagatagatgagataagagataagaaaactggactgggaagaataattgagttaaaatcagaaatcctaagtaagaagcagaatgagctgaaaaatgtgaagtatgaattacagcagttggaaggatcttcagacaggattcttgaactggaccaggagctcataaaagctgaacgtgagttaagcaaggctgagaaaaacagcaatgtagaaaccttaaaaatggaagtaataagtctccaaaatgaaaaagcagacttagacaggaccctgcgtaaacttgaccaggagatggagcagttaaaccatcatacaacaacacgtacccaaatggagatgctgaccaaagacaaagctgacaaagatgaacaaatcagaaaaataaaatctaggcacagtgatgaattaacctcactgttgggatattttcccaacaaaaaacagcttgaagactggctacatagtaaatcaaaagaaattaatcagaccagggacagacttgccaaattgaacaaggaactagcttcatctgagcagaataaaaatcatataaataatgaactaaaaagaaaggaagagcagttgtccagttacgaagacaagctgtttgatgtttgtggtagccaggattttgaaagtgatttagacaggcttaaagaggaaattgaaaaatcatcaaaacagcgagccatgctggctggagccacagcagtttactcccagttcattactcagctaacagacgaaaaccagtcatgttgccccgtttgtcagagagtttttcagacagaggctgagttacaagaagtcatcagtgatttgcagtctaaactgcgacttgctccagataaactcaagtcaacagaatcagagctaaaaaaaaaggaaaagcggcgtgatgaaatgctgggacttgtgcccatgaggcaaagcataattgatttgaaggagaaggaaataccagaattaagaaacaaactgcagaatgtcaatagagacatacagcgcctaaagaacgacatagaagaacaagaaacactcttgggtacaataatgcctgaagaagaaagtgccaaagtatgcctgacagatgttacaattatggagaggttccagatggaacttaaagatgttgaaagaaaaattgcacaacaagcagctaagctacaaggaatagacttagatcgaactgtccaacaagtcaaccaggagaaacaagagaaacagcacaagttagacacagtttctagtaagattgaattgaatcgtaagcttatacaggaccagcaggaacagattcaacatctaaaaagtacaacaaatgagctaaaatctgagaaacttcagatatccactaatttgcaacgtcgtcagcaactggaggagcagactgtggaattatccactgaagttcagtctttgtacagagagataaaggatgctaaagagcaggtaagccctttggaaacaacattggaaaagttccagcaagaaaaagaagaattaatcaacaaaaaaaatacaagcaacaaaatagcacaggataaactgaatgatattaaagagaaggttaaaaatattcatggctatatgaaagacattgagaattatattcaagatgggaaagacgactataagaagcaaaaagaaactgaacttaataaagtaatagctcaactaagtgaatgcgagaaacacaaagaaaagataaatgaagatatgagactcatgagacaagatattgatacacagaagatacaagaaaggtggctacaagataaccttactttaagaaaaagaaatgaggaactaaaagaagttgaagaagaaagaaaacaacatttgaaggaaatgggtcaaatgcaggttttgcaaatgaaaagtgaacatcagaagttggaagagaacatagacaatataaaaagaaatcataatttggcattagggcgacagaaaggttatgaagaagaaattattcattttaagaaagaacttcgagaaccacaatttcgggatgctgaggaaaagtatagagaaatgatgattgttatgaggacaacagaacttgtgaacaaggatctggatatttattataagactcttgaccaagcaataatgaaatttcacagtatgaaaatggaagaaatcaataaaattatacgtgacctgtggcgaagtacctatcgtggacaagatattgaatacatagaaatacggtctgatgccgatgaaaatgtatcagcttctgataaaaggcggaattataactaccgagtggtgatgctgaagggagacacagccttggatatgcgaggacgatgcagtgctggacaaaaggtattagcctcactcatcattcgcctggccctggctgaaacgttctgcctcaactgtggcatcattgccttggatgagccaacaacaaatcttgaccgagaaaacattgaatctcttgcacatgctctggttgagataataaaaagtcgctcacagcagcgtaacttccagcttctggtaatcactcatgatgaagattttgtggagcttttaggacgttctgaatatgtggagaaattctacaggattaaaaagaacatcgatcagtgctcagagattgtgaaatgcagtgttagctccctgggattcaatgttcattaaaaatatccaagatttaaatgccatagaaatgtaggtcctcagaaagtgtataataagaaacttatttctcatatcaacttagtcaataagaaaatatattctttcaaaggaacattgtgtctaggattttggatgttgagaggttctaaaatcatgaaacttgtttcactgaaaattggacagattgcctgtttctgatttgctgctcttcatcccattccaggcagcctctgtcaggccttcagggttcagcagtacagccgagactcgactctgtgcctccctccccagtgcaaatgcatgcttcttctcaaagcactgttgagaaggagataattactgccttgaaaatttatggttttggtatttttttaaatcatagttaaatgttacctctgaatttacttccttgcatgtggtttgaaaaactgagtattaatatctgaggatgaccagaaatggtgagatgtatgtttggctctgcttttaactttataaatccagtgacctctctctctgggacttggtttccccaactaaaatttgaagtagttgaatggggtctcaaagtttgacaggaaccttaagtaatcatctaagtcagtacccaccaccttcttctcctacatatcccttccagatggtcatccagactcagagctctctctacagagaggaaattctccactgtgcacacccacctttggaaagctctgaccacttgaggcctgatctgcccatcgtgaagaagcctgtaacactcctctgcgtctatcctgtgtagcatactggcttcaccatcaatcctgattcctctctaagtgggcattgccatgtggaaggcaagccaggctcactcacagagtcaaggcctgctccctgtagggtccaaccagacctggaagaacaggcctctccatttgctcttcagatgccacttctaagaaaagcctaatcacagtttttcctggaattgccagctgacatcttgaatccttccattccacacagaatgcaaccaagtcacacgcttttgaattatgctttgtagagttttgtcattcagagtcagccaggaccataccgggtcttgattcagtcacatggcatggttttgtgccatctgtagctataatgagcatgtttgcctagacagcttttctcaactgggtccagaagagaattaagccctaaggtcctaaggcatctatctgtgctaggttaaatggttggcccccaaagatagacaggtcctgatttctagaacccgtgactgttactttatacagcaaaggaaactttgcagatgtgattaaagctaaggaccttaagacagagtatcctgggggtggtggtggggtgggggggggtcctaaatgtaatcacgagtaagattaagagcaaatcaattctagtcatatattaaacatccacaataaccaagatatttttatcccaagaatgcaagatttcagaaaatgaaaaatctgttgataaatccatcactataataaaaccgaaggtgaaaaaaattctgaaaaaattctagcagctatatttgataaaattcaacatctcctagctttagcaaactcacagttttgcaaataatattttcttaatgttatctgttgctaaatcaaaattaaacagtcatcttaactgcaaaataaaacatttctcagtaaatattaaa

SEQ ID NO: 3475 - DNA, 6597 bp, Homo sapiens
  source 1..6597: mol_type = genomic DNA
tttcccggcgtgccccaggagagcggcgtggacgcgtgcgggcctagaggcccacgtgatccgcagggcggccgaggcaggaagctgtgagtgcgcggttgcggggtcgcattgtggctacggctttgcgtccccggcgggcagccccaggctggtccccgcctccgctctccccaccggcggggaaagcagctggtgtgggaggaaaggctccatcccccgccccctctctcccgctgttggctggcaggatcttttggcagtcctgtggcctcgctccccgcccggatcctcctgaccctgagattcgcgggtctcacgtcccgtgcacgccttgcttcggcctcagttaagcctttgtgggctccaggtccctggtgagattagaaacgtttgcaaacatgtcccggatcgaaaagatgagcattctgggcgtgcggagttttggaatagaggacaaagataagcaaattatcactttcttcagcccccttacaattttggttggacccaatggggcgggaaagacgaccatcattgaatgtctaaaatatatttgtactggagatttccctcctggaaccaaaggaaatacatttgtacacgatcccaaggttgctcaagaaacagatgtgagagcccagattcgtctgcaatttcgtgatgtcaatggagaacttatagctgtgcaaagatctatggtgtgtactcagaaaagcaaaaagacagaatttaaaactctggaaggagtcattactagaacaaagcatggtgaaaaggtcagtctgagctctaagtgtgcagaaattgaccgagaaatgatcagttctcttggggtttccaaggctgtgctaaataatgtcattttctgtcatcaagaagattctaattggcctttaagtgaaggaaaggctttgaagcaaaagtttgatgagattttttcagcaacaagatacattaaagccttagaaacacttcggcaggtacgtcagacacaaggtcagaaagtaaaagaatatcaaatggaactaaaatatctgaagcaatataaggaaaaagcttgtgagattcgtgatcagattacaagtaaggaagcccagttaacatcttcaaaggaaattgtcaaatcctatgagaatgaacttgatccattgaagaatcgtctaaaagaaattgaacataatctctctaaaataatgaaacttgacaatgaaattaaagccttggatagccgaaagaagcaaatggagaaagataatagtgaactggaagagaaaatggaaaaggtttttcaagggactgatgagcaactaaatgacttatatcacaatcaccagagaacagtaagggagaaagaaaggaaattggtagactgtcatcgtgaactggaaaaactaaataaagaatctaggcttctcaatcaggaaaaatcagaactgcttgttgaacagggtcgtctacagctgcaagcagatcgccatcaagaacatatccgagctagagattcattaattcagtctttggcaacacagctagaattggatggctttgagcgtggaccattcagtgaaagacagattaaaaattttcacaaacttgtgagagagagacaagaaggggaagcaaaaactgccaaccaactgatgaatgactttgcagaaaaagagactctgaaacaaaaacagatagatgagataagagataagaaaactggactgggaagaataattgagttaaaatcagaaatcctaagtaagaagcagaatgagctgaaaaatgtgaagtatgaattacagcagttggaaggatcttcagacaggattcttgaactggaccaggagctcataaaagctgaacgtgagttaagcaaggctgagaaaaacagcaatgtagaaaccttaaaaatggaagtaataagtctccaaaatgaaaaagcagacttagacaggaccctgcgtaaacttgaccaggagatggagcagttaaaccatcatacaacaacacgtacccaaatggagatgctgaccaaagacaaagctgacaaagatgaacaaatcagaaaaataaaatctaggcacagtgatgaattaacctcactgttgggatattttcccaacaaaaaacagcttgaagactggctacatagtaaatcaaaagaaattaatcagaccagggacagacttgccaaattgaacaaggaactagcttcatctgagcagaataaaaatcatataaataatgaactaaaaagaaaggaagagcagttgtccagttacgaagacaagctgtttgatgtttgtggtagccaggattttgaaagtgatttagacaggcttaaagaggaaattgaaaaatcatcaaaacagcgagccatgctggctggagccacagcagtttactcccagttcattactcagctaacagacgaaaaccagtcatgttgccccgtttgtcagagagtttttcagacagaggctgagttacaagaagtcatcagtgatttgcagtctaaactgcgacttgctccagataaactcaagtcaacagaatcagagctaaaaaaaaaggaaaagcggcgtgatgaaatgctgggacttgtgcccatgaggcaaagcataattgatttgaaggagaaggaaataccagaattaagaaacaaactgcagaatgtcaatagagacatacagcgcctaaagaacgacatagaagaacaagaaacactcttgggtacaataatgcctgaagaagaaagtgccaaagtatgcctgacagatgttacaattatggagaggttccagatggaacttaaagatgttgaaagaaaaattgcacaacaagcagctaagctacaaggaatagacttagatcgaactgtccaacaagtcaaccaggagaaacaagagaaacagcacaagttagacacagtttctagtaagattgaattgaatcgtaagcttatacaggaccagcaggaacagattcaacatctaaaaagtacaacaaatgagctaaaatctgagaaacttcagatatccactaatttgcaacgtcgtcagcaactggaggagcagactgtggaattatccactgaagttcagtctttgtacagagagataaaggatgctaaagagcaggtaagccctttggaaacaacattggaaaagttccagcaagaaaaagaagaattaatcaacaaaaaaaatacaagcaacaaaatagcacaggataaactgaatgatattaaagagaaggttaaaaatattcatggctatatgaaagacattgagaattatattcaagatgggaaagacgactataagaagcaaaaagaaactgaacttaataaagtaatagctcaactaagtgaatgcgagaaacacaaagaaaagataaatgaagatatgagactcatgagacaagatattgatacacagaagatacaagaaaggtggctacaagataaccttactttaagaaaaagaaatgaggaactaaaagaagttgaagaagaaagaaaacaacatttgaaggaaatgggtcaaatgcaggttttgcaaatgaaaagtgaacatcagaagttggaagagaacatagacaatataaaaagaaatcataatttggcattagggcgacagaaaggttatgaagaagaaattattcattttaagaaagaacttcgagaaccacaatttcgggatgctgaggaaaagtatagagaaatgatgattgttatgaggacaacagaacttgtgaacaaggatctggatatttattataagactcttgaccaagcaataatgaaatttcacagtatgaaaatggaagaaatcaataaaattatacgtgacctgtggcgaagtacctatcgtggacaagatattgaatacatagaaatacggtctgatgccgatgaaaatgtatcagcttctgataaaaggcggaattataactaccgagtggtgatgctgaagggagacacagccttggatatgcgaggacgatgcagtgctggacaaaaggtattagcctcactcatcattcgcctggccctggctgaaacgttctgcctcaactgtggcatcattgccttggatgagccaacaacaaatcttgaccgagaaaacattgaatctcttgcacatgctctggttgagataataaaaagtcgctcacagcagcgtaacttccagcttctggtaatcactcatgatgaagattttgtggagcttttaggacgttctgaatatgtggagaaattctacaggattaaaaagaacatcgatcagtgctcagagattgtgaaatgcagtgttagctccctgggattcaatgttcattaaaaatatccaagatttaaatgccatagaaatgtaggtcctcagaaagtgtataataagaaacttatttctcatatcaacttagtcaataagaaaatatattctttcaaaggaacattgtgtctaggattttggatgttgagaggttctaaaatcatgaaacttgtttcactgaaaattggacagattgcctgtttctgatttgctgctcttcatcccattccaggcagcctctgtcaggccttcagggttcagcagtacagccgagactcgactctgtgcctccctccccagtgcaaatgcatgcttcttctcaaagcactgttgagaaggagataattactgccttgaaaatttatggttttggtatttttttaaatcatagttaaatgttacctctgaatttacttccttgcatgtggtttgaaaaactgagtattaatatctgaggatgaccagaaatggtgagatgtatgtttggctctgcttttaactttataaatccagtgacctctctctctgggacttggtttccccaactaaaatttgaagtagttgaatggggtctcaaagtttgacaggaaccttaagtaatcatctaagtcagtacccaccaccttcttctcctacatatcccttccagatggtcatccagactcagagctctctctacagagaggaaattctccactgtgcacacccacctttggaaagctctgaccacttgaggcctgatctgcccatcgtgaagaagcctgtaacactcctctgcgtctatcctgtgtagcatactggcttcaccatcaatcctgattcctctctaagtgggcattgccatgtggaaggcaagccaggctcactcacagagtcaaggcctgctccctgtagggtccaaccagacctggaagaacaggcctctccatttgctcttcagatgccacttctaagaaaagcctaatcacagtttttcctggaattgccagctgacatcttgaatccttccattccacacagaatgcaaccaagtcacacgcttttgaattatgctttgtagagttttgtcattcagagtcagccaggaccataccgggtcttgattcagtcacatggcatggttttgtgccatctgtagctataatgagcatgtttgcctagacagcttttctcaactgggtccagaagagaattaagccctaaggtcctaaggcatctatctgtgctaggttaaatggttggcccccaaagatagacaggtcctgatttctagaacccgtgactgttactttatacagcaaaggaaactttgcagatgtgattaaagctaaggaccttaagacagagtatcctgggggtggtggtggggtgggggggggtcctaaatgtaatcacgagtaagattaagagcaaatcaattctagtcatatattaaacatccacaataaccaagatatttttatcccaagaatgcaagatttcagaaaatgaaaaatctgttgataaatccatcactataataaaaccgaaggtgaaaaaaattctgaaaaaattctagcagctatatttgataaaattcaacatctcctagctttagcaaactcacagttttgcaaataatattttcttaatgttatctgttgctaaatcaaaattaaacagtcatcttaactgcaaaataaaacatttctcagtaaatattaaagccagttaccttctatcaacatgttaatgaaagtgctagttgttgcagcaaagaataacaaaggcaatacacgatcaatataggcagtgaaacaaaagtatcatttgcaagttaaaacagacttcccaattttaaatctggtttccccctgaatatgtggcatccttggcagcacttctgagagtggctgctttcattccaagaagcccatgggtttggaggtgggataggtgcctttctggcttctcattgctgcttctagatcagtctccaaatatcccccttccccacattggaatgaatagccatcacagcatggatggaggttagaatgagccagactgcctgggctcaaatcctagcacaccactcactagctggggaccttgagcaagttatttgtcctgttttctgtttccttatatgtaaaagtgggtaaaatggtacatattttgtagggttgttatgaagattgaatgacattatttacaaactgcttagaactgcttgccacctactaaatactgtgtaagtgttcaagaaaaagctgtcttcatttca

SEQ ID NO: 3476 - DNA, 2266 bp, Homo sapiens
  source 1..2266: mol_type = genomic DNA
gagggtttggcgggaattctgaaagccgctggcggaccgcgcgcagcggccagagaccgagccctaaggagagtgcggcgcttcccgaggcgtgcagctgggaactgcaactcatctgggttgtgcgcagaaggctggggcaagcgagtagagaagtggagcgtaagccaggggcgttgggggccgtgcgggtcgggcgcgtgccacgcccgcggggtgaagtcggagcgcggggcctgctggagagaggagcgctgcggaccgagtaatggcaatgcagatgcagcttgaagcaaatgcagatacttcagtggaagaagaaagctttggcccacaacccatttcacggttagagcagtgtggcataaatgccaacgatgtgaagaaattggaagaagctggattccatactgtggaggctgttgcctatgcgccaaagaaggagctaataaatattaagggaattagtgaagccaaagctgataaaattctggctgaggcagctaaattagttccaatgggtttcaccactgcaactgaattccaccaaaggcggtcagagatcatacagattactactggctccaaagagcttgacaaactacttcaaggtggaattgagactggatctatcacagaaatgtttggagaattccgaactgggaagacccagatctgtcatacgctagctgtcacctgccagcttcccattgaccggggtggaggtgaaggaaaggccatgtacattgacactgagggtacctttaggccagaacggctgctggcagtggctgagaggtatggtctctctggcagtgatgtcctggataatgtagcatatgctcgagcgttcaacacagaccaccagacccagctcctttatcaagcatcagccatgatggtagaatctaggtatgcactgcttattgtagacagtgccaccgccctttacagaacagactactcgggtcgaggtgagctttcagccaggcagatgcacttggccaggtttctgcggatgcttctgcgactcgctgatgagtttggtgtagcagtggtaatcactaatcaggtggtagctcaagtggatggagcagcgatgtttgctgctgatcccaaaaaacctattggaggaaatatcatcgcccatgcatcaacaaccagattgtatctgaggaaaggaagaggggaaaccagaatctgcaaaatctacgactctccctgtcttcctgaagctgaagctatgttcgccattaatgcagatggagtgggagatgccaaagactgaatcattgggtttttcctctgttaaaaaccttaagtgctgcagcctaatgagagtgcactgctccctggggttctctacaggcctcttcctgttgtgactgccaggataaagcttccgggaaaacagctattatatcagcttttctgatggtataaacaggagacaggtcagtagtcacaaactgatctaaaatgtttattccttctgtagtgtattaatctctgtgtgttttctttggttttggaggaggggtatgaagtatctttgacatggtgccttaggaatgacttgggtttaacaagctgtctactggacaatcttatgtttccaagagaactaaagctggagagacctgacccttctctcacttctaaattaatggtaaaataaaatgcctcagctatgtagcaaagggaatgggtctgcacagattctttttttctgtcagtaaaactctcaagcaggtttttaagttgtctgtctgaatgatcttgtgtaaggttttggttatggagtcttgtgccaaacctactaggccattagcccttcaccatctacctgcttggtctttcattgctaagactaactcaagataatcctagagtcttaaagcatttcaggccagtgtggtgtcttgcgcctgtactcccagcactttgggaggccgaggcaggtggatcgcttgagcccaggagttttaagtccagcttggccaaggtggtgaaatcccatctctacaaaaaatgcagaacttaatctggacacactgttacacgtgcctgtagtcccagctactcgatagcctgaggtgggagaatcacttaagcctggaaggtggaagttgcagtgagtcgagattgcactgctgcattccagccagggtgacagagtgagaccatgtttcaaacaagaaacatttcagagggtaagtaaacagatttgattgtgaggcttctaataaagtagttattagtagtg

SEQ ID NO: 3477 - DNA, 2008 bp, Homo sapiens
  source 1..2008: mol_type = genomic DNA
gttacgtcgacgcgggcgtgaccctgggcgagagggtttggcgggaattctgaaagccgctggcggaccgcgcgcagcggccagagaccgagccctaaggagagtgcggcgcttcccgaggcgtgcagctgggaactgcaactcatctgggttgtgcgcagaaggctggggcaagcgagtagagaagtggagcgtaagccaggggcgttgggggccgtgcgggtcgggcgcgtgccacgcccgcggggtgaagtcggagcgcggggcctgctggagagaggagcgctgcggaccgagtaatggcaatgcagatgcagcttgaagcaaatgcagatacttcagtggaagaagaaagctttggcccacaacccatttcacggttagagcagtgtggcataaatgccaacgatgtgaagaaattggaagaagctggattccatactgtggaggctgttgcctatgcgccaaagaaggagctaataaatattaagggaattagtgaagccaaagctgataaaattctgctcctctctcataggtatggtctctctggcagtgatgtcctggataatgtagcatatgctcgagcgttcaacacagaccaccagacccagctcctttatcaagcatcagccatgatggtagaatctaggtatgcactgcttattgtagacagtgccaccgccctttacagaacagactactcgggtcgaggtgagctttcagccaggcagatgcacttggccaggtttctgcggatgcttctgcgactcgctgatgagtttggtgtagcagtggtaatcactaatcaggtggtagctcaagtggatggagcagcgatgtttgctgctgatcccaaaaaacctattggaggaaatatcatcgcccatgcatcaacaaccagattgtatctgaggaaaggaagaggggaaaccagaatctgcaaaatctacgactctccctgtcttcctgaagctgaagctatgttcgccattaatgcagatggagtgggagatgccaaagactgaatcattgggtttttcctctgttaaaaaccttaagtgctgcagcctaatgagagtgcactgctccctggggttctctacaggcctcttcctgttgtgactgccaggataaagcttccgggaaaacagctattatatcagcttttctgatggtataaacaggagacaggtcagtagtcacaaactgatctaaaatgtttattccttctgtagtgtattaatctctgtgtgttttctttggttttggaggaggggtatgaagtatctttgacatggtgccttaggaatgacttgggtttaacaagctgtctactggacaatcttatgtttccaagagaactaaagctggagagacctgacccttctctcacttctaaattaatggtaaaataaaatgcctcagctatgtagcaaagggaatgggtctgcacagattctttttttctgtcagtaaaactctcaagcaggtttttaagttgtctgtctgaatgatcttgtgtaaggttttggttatggagtcttgtgccaaacctactaggccattagcccttcaccatctacctgcttggtctttcattgctaagactaactcaagataatcctagagtcttaaagcatttcaggccagtgtggtgtcttgcgcctgtactcccagcactttgggaggccgaggcaggtggatcgcttgagcccaggagttttaagtccagcttggccaaggtggtgaaatcccatctctacaaaaaatgcagaacttaatctggacacactgttacacgtgcctgtagtcccagctactcgatagcctgaggtgggagaatcacttaagcctggaaggtggaagttgcagtgagtcgagattgcactgctgcattccagccagggtgacagagtgagaccatgtttcaaacaagaaacatttcagagggtaagtaaacagatttgattgtgaggcttctaataaagtagttattagtagtgaa

SEQ ID NO: 3478 - DNA, 1588 bp, Homo sapiens
  source 1..1588: mol_type = genomic DNA
aattctgaaagccgctggcggaccgcgcgcagcggccagagaccgagccctaaggagagtgcggcgcttcccgaggcgtgcagctgggaactgcaactcatctgggttgtgcgcagaaggctggggcaagcgagtagagaagtggagctaatggcaatgcagatgcagcttgaagcaaatgcagatacttcagtggaagaagaaagctttggcccacaacccatttcacggttagagcagtgtggcataaatgccaacgatgtgaagaaattggaagaagctggattccatactgtggaggctgttgcctatgcgccaaagaaggagctaataaatattaagggaattagtgaagccaaagctgataaaattctgacggagtctcgctctgttgccaggctggagtgcaatagcgtgatcttggtctactgcaccctccgcctctcaggttcaagtgattctcctgcctcagcctcccgagtagttgggactacaggtggaattgagactggatctatcacagaaatgtttggagaattccgaactgggaagacccagatctgtcatacgctagctgtcacctgccagcttcccattgaccggggtggaggtgaaggaaaggccatgtacattgacactgagggtacctttaggccagaacggctgctggcagtggctgagaggtatggtctctctggcagtgatgtcctggataatgtagcatatgctcgagcgttcaacacagaccaccagacccagctcctttatcaagcatcagccatgatggtagaatctaggtatgcactgcttattgtagacagtgccaccgccctttacagaacagactactcgggtcgaggtgagctttcagccaggcagatgcacttggccaggtttctgcggatgcttctgcgactcgctgatgagtttggtgtagcagtggtaatcactaatcaggtggtagctcaagtggatggagcagcgatgtttgctgctgatcccaaaaaacctattggaggaaatatcatcgcccatgcatcaacaaccagattgtatctgaggaaaggaagaggggaaaccagaatctgcaaaatctacgactctccctgtcttcctgaagctgaagctatgttcgccattaatgcagatggagtgggagatgccaaagactgaatcattgggtttttcctctgttaaaaaccttaagtgctgcagcctaatgagagtgcactgctccctggggttctctacaggcctcttcctgttgtgactgccaggataaagcttccgggaaaacagctattatatcagcttttctgatggtataaacaggagacaggtcagtagtcacaaactgatctaaaatgtttattccttctgtagtgtattaatctctgtgtgttttctttggttttggaggaggggtatgaagtatctttgacatggtgccttaggaatgacttgggtttaacaagctgtctactggacaatcttatgtttccaagagaactaaagctggagagacctgacccttctctcacttctaaattaatggtaaaataaaatgcctcagctatgtagcaaaggg

SEQ ID NO: 3479 - DNA, 1611 bp, Homo sapiens
  source 1..1611: mol_type = genomic DNA
gttacgtcgacgcgggcgtgaccctgggcgagagggtttggcgggaattctgaaagccgctggcggaccgcgcgcagcggccagagaccgagccctaaggagagtgcggcgcttcccgaggcgtgcagctgggaactgcaactcatctgggttgtgcgcagaaggctggggcaagcgagtagagaagtggagcgtaagccaggggcgttgggggccgtgcgggtcgggcgcgtgccacgcccgcggggtgaagtcggagcgcggggcctgctggagagaggagcgctgcggaccgagtaatggcaatgcagatgcagcttgaagcaaatgcagatacttcagtggaagaagaaagctttggcccacaacccatttcacggttagagcagtgtggcataaatgccaacgatgtgaagaaattggaagaagctggattccatactgtggaggctgttgcctatgcgccaaagaaggagctaataaatattaagggaattagtgaagccaaagctgataaaattctggctgaggcagctaaattagttccaatgggtttcaccactgcaactgaattccaccaaaggcggtcagagatcatacagattactactggctccaaagagcttgacaaactacttcaaggtggaattgagactggatctatcacagaaatgtttggagaattccgaactgggaagacccagatctgtcatacgctagctgtcacctgccagcttcccattgaccggggtggaggtgaaggaaaggccatgtacattgacactgagggtacctttaggccagaacggctgctggcagtggctgagaggtatggtctctctggcagtgatgtcctggataatgtagcatatgctcgagcgttcaacacagaccaccagacccagctcctttatcaagcatcagccatgatggtagaatctaggtatgcactgcttattgtagacagtgccaccgccctttacagaacagactactcgggtcgaggtgagctttcagccaggcagatgcacttggccaggtttctgcggatgcttctgcgactcgctgatgagattgtatctgaggaaaggaagaggggaaaccagaatctgcaaaatctacgactctccctgtcttcctgaagctgaagctatgttcgccattaatgcagatggagtgggagatgccaaagactgaatcattgggtttttcctctgttaaaaaccttaagtgctgcagcctaatgagagtgcactgctccctggggttctctacaggcctcttcctgttgtgactgccaggataaagcttccgggaaaacagctattatatcagcttttctgatggtataaacaggagacaggtcagtagtcacaaactgatctaaaatgtttattccttctgtagtgtattaatctctgtgtgttttctttggttttggaggaggggtatgaagtatctttgacatggtgccttaggaatgacttgggtttaacaagctgtctactggacaatcttatgtttccaagagaactaaagctggagagacctgacccttctctcacttctaaattaatggtaaaataaaatgcctcagctatgtagcaaagg

SEQ ID NO: 3480 - DNA, 1545 bp, Homo sapiens
  source 1..1545: mol_type = genomic DNA
gctggcggaccgcgcgcagcggccagagaccgagccctaaggagagtgcggcgcttcccgaggcgtgcagctgggaactgcaactcatctgggttgtgcgcagaaggctggggcaagcgagtagagaagtggagcgtaagccaggggcgttgggggccgtgcgggtcgggcgcgtgccacgcccgcggggtgaagtcggagcgcggggcctgctggagagaggagcgctgcggaccgagtaatggcaatgcagatgcagcttgaagcaaatgcagatacttcagtggaagaagaaagctttggcccacaacccatttcacggttagagcagtgtggcataaatgccaacgatgtgaagaaattggaagaagctggattccatactgtggaggctgttgcctatgcgccaaagaaggagctaataaatattaagggaattagtgaagccaaagctgataaaattctggctgaggcagctaaattagttccaatgggtttcaccactgcaactgaattccaccaaaggcggtcagagatcatacagattactactggctccaaagagcttgacaaactacttcaaggtggaattgagactggatctatcacagaaatgtttggagaattccgaactgggaagacccagatctgtcatacgctagctgtcacctgccaggtatggtctctctggcagtgatgtcctggataatgtagcatatgctcgagcgttcaacacagaccaccagacccagctcctttatcaagcatcagccatgatggtagaatctaggtatgcactgcttattgtagacagtgccaccgccctttacagaacagactactcgggtcgaggtgagctttcagccaggcagatgcacttggccaggtttctgcggatgcttctgcgactcgctgatgagtttggtgtagcagtggtaatcactaatcaggtggtagctcaagtggatggagcagcgatgtttgctgctgatcccaaaaaacctattggaggaaatatcatcgcccatgcatcaacaaccagattgtatctgaggaaaggaagaggggaaaccagaatctgcaaaatctacgactctccctgtcttcctgaagctgaagctatgttcgccattaatgcagatggagtgggagatgccaaagactgaatcattgggtttttcctctgttaaaaaccttaagtgctgcagcctaatgagagtgcactgctccctggggttctctacaggcctcttcctgttgtgactgccaggataaagcttccgggaaaacagctattatatcagcttttctgatggtataaacaggagacaggtcagtagtcacaaactgatctaaaatgtttattccttctgtagtgtattaatctctgtgtgttttctttggttttggaggaggggtatgaagtatctttgacatggtgccttaggaatgacttgggtttaacaagctgtctactggacaatcttatgtttccaagagaactaaagctggagagacctgacccttctctcacttctaaattaa

SEQ ID NO: 3481 - DNA, 625 bp, Homo sapiens
  source 1..625: mol_type = genomic DNA
gcggctcgtcctcgcccacctgcgtcctggccggtccagtgctcagcggcagttggggcctccgcgcgcagtgtgaaacccggacgtggcagggcgtgtccgcgcccgaccgaccctcagctgctggggcgaaaacacaagtggacctcagtctttagaactaggggagaaacattagagcctttataggcaacacctattttatgggttcgagcgagaagtccgagatcagagcggtgtagccacagctgtttaatatcacagccagggcttccggattcctgatctgtctttccattacaccgtgcttagaaagtaccaatctccgattgccaaaacagtgttttcatcatctaatgcggaaaaccattcacatgatgcctagagaatgatctgaataatggcaatgcagatgcagcttgaagcaaatgcagatacttcagtggaagaagaaagctttggcccacaacccatttcacggttagagcagtgtggcataaatgccaacgatgtgaagaaattggaagaagctggattccatactgtggaggctgttgcctatgcgccaaagaaggagctaataaatattaagggaattagtgaagccaaagctgataaaattctg

SEQ ID NO: 3482 - DNA, 566 bp, Homo sapiens
  source 1..566: mol_type = genomic DNA
cttgggagtcgtggtcttcgatctggtaaacagaagacggcaactcgtaatggcaatgcagatgcagcttgaagcaaatgcagatacttcagtggaagaagaaagctttggcccacaacccatttcacggttagagcagtgtggcataaatgccaacgatgtgaagaaattggaagaagctggattccatactgtggaggctgttgcctatgcgccaaagaaggagctaataaatattaagggaattagtgaagccaaagctgataaaattctggctgaggcagctaaattagttccaatgggtttcaccactgcaactgaattccaccaaaggcggtcagagatcatacagattactactggctccaaagagcttgacaaactacttcaaggtggaattgagactggatctatcacagaaatgtttggagaattccgaactgggaagacccagatctgtcatacgctagctgtcacctgccagcttcccattgaccggggtggaggtgaaggaaaggccatgtacattgacactgagggtacctttaggccagaacggctgctgg

SEQ ID NO: 3483 - DNA, 658 bp, Homo sapiens
  source 1..658: mol_type = genomic DNA
taatggcaatgcagatgcagcttgaagcaaatgcagatacttcagtggaagaagaaagctttggcccacaacccatttcacggttagagcagtgtggcataaatgccaacgatgtgaagaaattggaagaagctggattccatactgtggaggctgttgcctatgcgccaaagaaggagctaataaatattaagggaattagtgaagccaaagctgataaaattctggtggaattgagactggatctatcacagaaatgtttggagaattccgaactgggaagacccagatctgtcatacgctagctgtcacctgccagcttcccattgaccggggtggaggtgaaggaaaggccatgtacattgacactgagggtacctttaggccagaacggctgctggcagtggctgagaggtatggtctctctggcagtgatgtcctggataatgtagcatatgctcgagcgttcaacacagaccaccagacccagctcctttatcaagcatcagccatgatggtagaatctaggtatgcactgcttattgtagacagtgccaccgccctttacagaacagactactcgggtcgaggtgagctttcagccaggcagatgcacttggccaggtttctgcggatgcttctgcgactcgctgatgag

SEQ ID NO: 3484 - DNA, 1515 bp, Homo sapiens
  source 1..1515: mol_type = genomic DNA
aattctgaaagccgctggcggaccgcgcgcagcggccagagaccgagccctaaggagagtgcggcgcttcccgaggcgtgcagctgggaactgcaactcatctgggttgtgcgcagaaggctggggcaagcgagtagagaagtggagcgtaagccaggggcgttgggggccgtgcgggtcgggcgcgtgccacgcccgcggggtgaagtcggagcgcggggcctgctggagagaggagcgctgcggaccgagtaatggcaatgcagatgcagcttgaagcaaatgcagatacttcagtggaagaagaaagctttggcccacaacccatttcacggttagagcagtgtggcataaatgccaacgatgtgaagaaattggaagaagctggattccatactgtggaggctgttgcctatgcgccaaagaaggagctaataaatattaagggaattagtgaagccaaagctgataaaattctgacggagtctcgctctgttgccaggctggagtgcaatagcgtgatcttggtctactgcaccctccgcctctcaggttcaagtgattctcctgcctcagcctcccgagtagttgggactacaggtggaattgagactggatctatcacagaaatgtttggagaattccgaactgggaagacccagatctgtcatacgctagctgtcacctgccagcttcccattgaccggggtggaggtgaaggaaaggccatgtacattgacactgagggtacctttaggccagaacggctgctggcagtggctgagaggtatggtctctctggcagtgatgtcctggataatgtagcatatgctcgagcgttcaacacagaccaccagacccagctcctttatcaagcatcagccatgatggtagaatctaggtatgcactgcttattgtagacagtgccaccgccctttacagaacagactactcgggtcgaggtgagctttcagccaggcagatgcacttggccaggtttctgcggatgcttctgcgactcgctgatgagtttggtgtagcagtggtaatcactaatcaggtggtagctcaagtggatggagcagcgatgtttgctgctgatcccaaaaaacctattggaggaaatatcatcgcccatgcatcaacaaccagattgtatctgaggaaaggaagaggggaaaccagaatctgcaaaatctacgactctccctgtcttcctgaagctgaagctatgttcgccattaatgcagatggagtgggagatgccaaagactgaatcattgggtttttcctctgttaaaaaccttaagtgctgcagcctaatgagagtgcactgctccctggggttctctacaggcctcttcctgttgtgactgccaggataaagcttccgggaaaacagctattatatcagcttttctgatggtataaacaggagacaggtcagtagtcacaaactgatctaaaatgtttattccttctgtagtgtattaatctctgtgtgttttctttgg

SEQ ID NO: 3485 - DNA, 1397 bp, Homo sapiens
  source 1..1397: mol_type = genomic DNA
ggaattctgaaagccgctggcggaccgcgcgcagcggccagagaccgagccctaaggagagtgcggcgcttcccgaggcgtgcagctgggaactgcaactcatctgggttgtgcgcagaaggctggggcaagcgagtagagaagtggagcgtaagccaggggcgttgggggccgtgcgggtcgggcgcgtgccacgcccgcggggtgaagtcggagcgcggggcctgctggagagaggagcgctgcggaccgagtaatggcaatgcagatgcagcttgaagcaaatgcagatacttcagtggaagaagaaagctttggcccacaacccatttcacggttagagcagtgtggcataaatgccaacgatgtgaagaaattggaagaagctggattccatactgtggaggctgttgcctatgcgccaaagaaggagctaataaatattaagggaattagtgaagccaaagctgataaaattctggcagtggctgagaggtatggtctctctggcagtgatgtcctggataatgtagcatatgctcgagcgttcaacacagaccaccagacccagctcctttatcaagcatcagccatgatggtagaatctaggtatgcactgcttattgtagacagtgccaccgccctttacagaacagactactcgggtcgaggtgagctttcagccaggcagatgcacttggccaggtttctgcggatgcttctgcgactcgctgatgagtttggtgtagcagtggtaatcactaatcaggtggtagctcaagtggatggagcagcgatgtttgctgctgatcccaaaaaacctattggaggaaatatcatcgcccatgcatcaacaaccagattgtatctgaggaaaggaagaggggaaaccagaatctgcaaaatctacgactctccctgtcttcctgaagctgaagctatgttcgccattaatgcagatggagtgggagatgccaaagactgaatcattgggtttttcctctgttaaaaaccttaagtgctgcagcctaatgagagtgcactgctccctggggttctctacaggcctcttcctgttgtgactgccaggataaagcttccgggaaaacagctattatatcagcttttctgatggtataaacaggagacaggtcagtagtcacaaactgatctaaaatgtttattccttctgtagtgtattaatctctgtgtgttttctttggttttggaggaggggtatgaagtatctttgacatggtgccttaggaatgacttgggtttaacaagctgtctactggacaatcttatgtttccaagagaactaaagctggagagacctgacccttctctcacttctaaattaatggtaaaataaaatgcctcagctatgtagcaaa

SEQ ID NO: 3486 - DNA, 1050 bp, Homo sapiens
  source 1..1050: mol_type = genomic DNA
atgggtagcaagaaactaaaacgagtgggtttatcacaagagctgtgtgaccgtctgagtagacatcagatccttacctgtcaggactttttatgtctttccccactggagcttatgaaggtgactggtctgagttatcgaggtgtccatgaacttctatgtatggtcagcagggcctgtgccccaaagatgcaaacggcttatgggataaaagcacaaaggtctgctgatttctcaccagcattcttatctactaccctttctgctttggacgaagccctgcatggtggtgtggcttgtggatccctcacagagattacaggtccaccaggttgtggaaaaactcagttttgtataatgatgagcattttggctacattacccaccaacatgggaggattagaaggagctgtggtgtacattgacacagagtctgcatttagtgctgaaagactggttgaaatagcagaatcccgttttcccagatattttaacactgaagaaaagttacttttgacaagtagtaaagttcatctttatcgggaactcacctgtgatgaagttctacaaaggattgaatctttggaagaagaaattatctcaaaaggaattaaacttgtgattcttgactctgttgcttctgtggtcagaaaggagtttgatgcacaacttcaaggcaatctcaaagaaagaaacaagttcttggcaagagaggcatcctccttgaagtatttggctgaggagttttcaatcccagttatcttgacgaatcagattacaacccatctgagtggagccctggcttctcaggcagacctggtgtctccagctgatgatttgtccctgtctgaaggcacttctggatccagctgtgtgatagccgcactaggaaatacctggagtcacagtgtgaatacccggctgatcctccagtaccttgattcagagagaagacagattcttattgccaagtcccctctggctcccttcacctcatttgtctacaccatcaaggaggaaggcctggttcttcaagcttatgctcagtgc

SEQ ID NO: 3487 - DNA, 1101 bp, Homo sapiens
  source 1..1101: mol_type = genomic DNA
atgggtagcaagaaactaaaacgagtgggtttatcacaagagctgtgtgaccgtctgagtagacatcagatccttacctgtcaggactttttatgtctttccccactggagcttatgaaggtgactggtctgagttatcgaggtgtccatgaacttctatgtatggtcagcagggcctgtgccccaaagatgcaaacggcttatgggataaaagcacaaaggtctgctgatttctcaccagcattcttatctactaccctttctgctttggacgaagccctgcatggtggtgtggcttgtggatccctcacagagattacaggtccaccaggttgtggaaaaactcagttttgtataatgatgagcattttggctacattacccaccaacatgggaggattagaaggagctgtggtgtacattgacacagagtctgcatttagtgctgaaagactggttgaaatagcagaatcccgttttcccagatattttaacactgaagaaaagttacttttgacaagtagtaaagttcatctttatcgggaactcacctgtgatgaagttctacaaaggattgaatctttggaagaagaaattatctcaaaaggaattaaacttgtgattcttgactctgttgcttctgtggtcagaaaggagtttgatgcacaacttcaaggcaatctcaaagaaagaaacaagttcttggcaagagaggcatcctccttgaagtatttggctgaggagttttcaatcccagttatcttgacgaatcagattacaacccatctgagtggagccctggcttctcaggcagacctggtgtctccagctgatgatttgtccctgtctgaaggcacttctggatccagctgtgtgatagccgcactaggaaatacctggagtcacagtgtgaatacccggctgatcctccagtaccttgattcagagagaagacagattcttattgccaagtcccctctggctcccttcacctcatttgtctacaccatcaaggaggaaggcctggttcttcaagaattttggcacatttgcatatctggtttctcaatccagaacagactaaaagaaaatgagtcctga

SEQ ID NO: 3488 - DNA, 1050 bp, Homo sapiens
  source 1..1050: mol_type = genomic DNA
atgggtagcaagaaactaaaacgagtgggtttatcacaagagctgtgtgaccgtctgagtagacatcagatccttacctgtcaggactttttatgtctttccccactggagcttatgaaggtgactggtctgagttatcgaggtgtccatgaacttctatgtatggtcagcagggcctgtgccccaaagatgcaaacggcttatgggataaaagcacaaaggtctgctgatttctcaccagcattcttatctactaccctttctgctttggacgaagccctgcatggtggtgtggcttgtggatccctcacagagattacaggtccaccaggttgtggaaaaactcagttttgtataatgatgagcattttggctacattacccaccaacatgggaggattagaaggagctgtggtgtacattgacacagagtctgcatttagtgctgaaagactggttgaaatagcagaatcccgttttcccagatattttaacactgaagaaaagttacttttgacaagtagtaaagttcatctttatcgggaactcacctgtgatgaagttctacaaaggattgaatctttggaagaagaaattatctcaaaaggaattaaacttgtgattcttgactctgttgcttctgtggtcagaaaggagtttgatgcacaacttcaaggcaatctcaaagaaagaaacaagttcttggcaagagaggcatcctccttgaagtatttggctgaggagttttcaatcccagttatcttgacgaatcagattacaacccatctgagtggagccctggcttctcaggcagacctggtgtctccagctgatgatttgtccctgtctgaaggcacttctggatccagctgtgtgatagccgcactaggaaatacctggagtcacagtgtgaatacccggctgatcctccagtaccttgattcagagagaagacagattcttattgccaagtcccctctggctcccttcacctcatttgtctacaccatcaaggaggaaggcctggttcttcaagggcaggagacccca

SEQ ID NO: 3489 - DNA, 1536 bp, Homo sapiens
  source 1..1536: mol_type = genomic DNA
ctgtgtaaagggtggggaaacttgaaagttggatgctgcagacccggcatgggtagcaagaaactaaaacgagtgggtttatcacaagagctgtgtgaccgtctgagtagacatcagatccttacctgtcaggactttttatgtctttccccactggagcttatgaaggtgactggtctgagttatcgaggtgtccatgaacttctatgtatggtcagcagggcctgtgccccaaagatgcaaacggcttatgggataaaagcacaaaggtctgctgatttctcaccagcattcttatctactaccctttctgctttggacgaagccctgcatggtggtgtggcttgtggatccctcacagagattacaggtccaccaggttgtggaaaaactcagttttgtataatgatgagcattttggctacattacccaccaacatgggaggattagaaggagctgtggtgtacattgacacagagtctgcatttagtgctgaaagactggttgaaatagcagaatcccgttttcccagatattttaacactgaagaaaagttacttttgacaagtagtaaagttcatctttatcgggaactcacctgtgatgaagttctacaaaggattgaatctttggaagaagaaattatctcaaaaggaattaaacttgtgattcttgactctgttgcttctgtggtcagaaaggagtttgatgcacaacttcaaggcaatctcaaagaaagaaacaagttcttggcaagagaggcatcctccttgaagtatttggctgaggagttttcaatcccagttatcttgacgaatcagattacaacccatctgagtggagccctggcttctcaggcagacctggtgtctccagctgatgatttgtccctgtctgaaggcacttctggatccagctgtgtgatagccgcactaggaaatacctggagtcacagtgtgaatacccggctgatcctccagtaccttgattcagagagaagacagattcttattgccaagtcccctctggctcccttcacctcatttgtctacaccatcaaggaggaaggcctggttcttcaaggccaagagaagccatagggatactgtgacctttgtctagagttgatgggggtgtgatttgtgaaataaaacaggaccgtactgcttggaagaaggaaacggaagctgacataatggggattaattagttgattgctgttgagatggtaacagatttgctcctaaaccattgagctagcgatttcagacctagcagggaaggtgaagatgaagaagcctttgttcaggtctctagatgtgtagggctgagggctttgccgccatgggatgtcaacagccataataataatttgcacttatatagcacctttcaaccaggcacctcaaagcggtttaaccacattaattaattaaagcccacaatcctcctggggagaggaggaggatgactaacaagatttgtaattacaggagggaacatttccgaataaagtattgtctaccagataaaaa

SEQ ID NO: 3490 - DNA, 568 bp, Homo sapiens
  source 1..568: mol_type = genomic DNA
cttggatccatgaagagttcctgtttcagttcgttccagaggatacttctttaccatctcaatgagatatacagcttctcctttgtatgcattaagagactcacagtaattcttttttagctctgtgaagataaatctttcatgagcctcatttacccctagcaaggcatgggtagcaagaaactaaaacgagtgggtttatcacaagagctgtgtgaccgtctgagtagacatcagatccttacctgtcaggactttttatgtctttccccactggagcttatgaaggtgactggtctgagttatcgaggtgtccatgaacttctatgtatggtcagcagggcctgtgccccaaagatgcaaacggcttatgggataaaagcacaaaggtctgctgatttctcaccagcattcttatctactaccctttctgctttggacgaagccctgcatggtggtgtggcttgtggatccctcacagagattacaggtccaccaggttgtggaaaaactcagttttgtataatgatgagcattttggctacattacccaccaacatgggaggat

SEQ ID NO: 3491 - DNA, 2596 bp, Homo sapiens
  source 1..2596: mol_type = genomic DNA
ctgtgtaaagggtggggaaacttgaaagttggatgctgcagacccggcatgggtagcaagaaactaaaacgagtgggtttatcacaagagctgtgtgaccgtctgagtagacatcagatccttacctgtcaggactttttatgtctttccccactggagcttatgaaggtgactggtctgagttatcgaggtgtccatgaacttctatgtatggtcagcagggcctgtgccccaaagatgcaaacggcttatgggataaaagcacaaaggtctgctgatttctcaccagcattcttatctactaccctttctgctttggacgaagccctgcatggtggtgtggcttgtggatccctcacagagattacaggtccaccaggttgtggaaaaactcagttttgtataatgatgagcattttggctacattacccaccaacatgggaggattagaaggagctgtggtgtacattgacacagagtctgcatttagtgctgaaagactggttgaaatagcagaatcccgttttcccagatattttaacactgaagaaaagttacttttgacaagtagtaaagttcatctttatcgggaactcacctgtgatgaagttctacaaaggattgaatctttggaagaagaaattatctcaaaaggaattaaacttgtgattcttgactctgttgcttctgtggtcagaaaggagtttgatgcacaacttcaaggcaatctcaaagaaagaaacaagttcttggcaagagaggcatcctccttgaagtatttggctgaggagttttcaatcccagttatcttgacgaatcagattacaacccatctgagtggagccctggcttctcaggcagacctggtgtctccagctgatgatttgtccctgtctgaaggcacttctggatccagctgtgtgatagccgcactaggaaatacctggagtcacagtgtgaatacccggctgatcctccagtaccttgattcagagagaagacagattcttattgccaagtcccctctggctcccttcacctcatttgtctacaccatcaaggaggaaggcctggttcttcaagagacaacattttgctctgtcacccaagctgaactgaactgggctccagaaatcctcccacctcagcctcctgagcagctaggactacagatgtgccaccatacccagctaattttttaattttttgtagaggtggggtctcattatgttgcccaagctgatctcaaactcctggcttcaagagatccacccacctcagcctcccaaagcgctaggattacaagtatgagactttgccattccaatgagaattttgtccttagcaatctcatccaatggccactggagatgtgtgtagggccacaagaatgagaaagggggcaatggagtgacaggtgacctgctcaggtgcccctccccagaccaaatgtcccaggcacacagcccatgccctccaccatggagtacattttctccctggcttgctgctgagctaaaggaccagggacgtggaaacaggaggtgaactaaggcaccccgccacccactgtggcagcttgaatttcttgaggctgagacaaactaggatccagtagcctagattttgccccagtttctccactgagtatttactcagtgctcctgagccgatgccttcccctctgcctagatgaaccacagcattttggtaaatgcctcagcatgttaggagcgctggaacgtttattctcttccctcccaattatccactctaatggagcagaacacttacatggaaaatcctaaacatggaagatgatttaaaaatgattcaccctggaatacatgcttccagttgcttctacaggtttaccttgctaaaggcatttcgcttcctttgctgttacaataagcttgcctgccttgaagaaaagaagaccagggccaaagggaaatcagtcaagggagcctgttttgtctgaaataatgcatccatgaacaaatgaattgagtataactgtctttttacatcagtgtttctgtggaattaagagaacatccaaggccactcctagcttgagtagattaaatttgtccttgtgtttggagcaagggttgtgaagtctgtctggcccatcaaatgaccaatggcttttaaggaaggactaagtgacttatgaccagaacaagggagcagcctgagtcagtctccccaatgtctacattgtgttatttatactagcaaaaaaatagacacaactaaatgttcgaccatatggtattggttaaattaacatctatacgatggaatactagatggtcattaaaattatgtgtcagaagaaggcttaatctcatgggaaagtgttcacaccatattattaaagagaaaaaacagattataaagcaatatgcatacaatgtagtagttctgtaagaaaaaagtattatgtgcattttaactggaaaaatatgtataaaaatgttaacagtgcaatctctgggcaataagattatacttgacttttatttcttttttggaattgtcttttttttttttttttcaagtttcctcccattaacatgcatgttc

SEQ ID NO: 3492 - DNA, 1550 bp, Homo sapiens
  source 1..1550: mol_type = genomic DNA
ttgaaagttggatgctgcagacccggcatgggtagcaagaaactaaaacgagtgggtttatcacaagagctgtgtgaccgtctgagtagacatcagatccttacctgtcaggactttttatgtctttccccactggagcttatgaaggtgactggtctgagttatcgaggtgtccatgaacttctatgtatggtcagcagggcctgtgccccaaagatgcaaacggcttatgggataaaagcacaaaggtctgctgatttctcaccagcattcttatctactaccctttctgctttggacgaagccctgcatggtggtgtggcttgtggatccctcacagagattacaggtccaccaggttgtggaaaaactcagttttgtataatgatgagcattttggctacattacccaccaacatgggaggattagaaggagctgtggtgtacattgacacagagtctgcatttagtgctgaaagactggttgaaatagcagaatcccgttttcccagatattttaacactgaagaaaagttacttttgacaagtagtaaagttcatctttatcgggaactcacctgtgatgaagttctacaaaggattgaatctttggaagaagaaattatctcaaaaggaattaaacttgtgattcttgactctgttgcttctgtggtcagaaaggagtttgatgcacaacttcaaggcaatctcaaagaaagaaacaagttcttggcaagagaggcatcctccttgaagtatttggctgaggagttttcaatcccagttatcttgacgaatcagattacaacccatctgagtggagccctggcttctcaggcagacctggtgtctccagctgatgatttgtccctgtctgaaggcacttctggatccagctgtgtgatagccgcactaggaaatacctggagtcacagtgtgaatacccggctgatcctccagtaccttgattcagagagaagacagattcttattgccaagtcccctctggctcccttcacctcatttgtctacaccatcaaggaggaaggcctggttcttcaagaattttggcacatttgcatatctggtttctcaatccagaacagactaaaagaaaatgagtcctgagattgctacagatgagacccacccatcggagccaggctttgaaggaactgaccgcagtgtgcatgaggaagtacttcacggtgatgaccctcgccaccctctcaggaaaacacagtgacctctcccccaacatccccttcccactcccaggtcccccggcaaaggcagaagaaccaagcaagcctttccaccaaagcagccatgaaccccattctcatcctttccaagaactctctgctataccagataggggtttggggttctgttttccattttttaaaaaaatcatttcaagactcttgaacagtgtgtcggtttacactattctatcttcttaagccaccatatcaacatattcactctgcttcctttcttttcatttggcagatgccacacttttaatggcagcaataaaaggtgtt

SEQ ID NO: 3493 - DNA, 249 bp, Homo sapiens
  source 1..249: mol_type = genomic DNA
cttttctttgctggatctggaggcatgggtagcaagaaactaaaacgagtgggtttatcacaagagctgtgtgaccgtctgagtagacatcagatccttacctgtcaggactttttatgtctttccccactggagcttatgaaggtgactggtctgagttatcgaggtgtccatgaacttctatgtatggtcagcagggcctgtgccccaaagatgcaaacggcttatgggataaaagcacaaaggtct

SEQ ID NO: 3494 - DNA, 1322 bp, Homo sapiens
  source 1..1322: mol_type = genomic DNA
gacgtcacgccgcacgccccagcgagggcgtgcggagtttggctgctccggggttagcaggtgagcctgcgatgcgcgggaagacgttccgctttgaaatgcagcgggatttggtgagtttcccgctgtctccagcggtgcgggtgaagctggtgtctgcggggttccagactgctgaggaactcctagaggtgaaaccctccgagcttagcaaagaagttgggatatctaaagcagaagccttagaaactctgcaaattatcagaagagaatgtctcacaaataaaccaagatatgctggtacatctgagtcacacaagaagtgtacagcactggaacttcttgagcaggagcatacccagggcttcataatcaccttctgttcagcactagatgatattcttgggggtggagtgcccttaatgaaaacaacagaaatttgtggtgcaccaggtgttggaaaaacacaattatgtatgcagttggcagtagatgtgcagataccagaatgttttggaggagtggcaggtgaagcagtttttattgatacagagggaagttttatggttgatagagtggtagaccttgctactgcctgcattcagcaccttcagcttatagcagaaaaacacaagggagaggaacaccgaaaagctttggaggatttcactcttgataatattctttctcatatttattattttcgctgtcgtgactacacagagttactggcacaagtttatcttcttccagatttcctttcagaacactcaaaggttcgactagtgatagtggatggtattgcttttccatttcgtcatgacctagatgacctgtctcttcgtactcggttattaaatggcctagcccagcaaatgatcagccttgcaaataatcacagattagctgtaattttaaccaatcagatgacaacaaagattgatagaaatcaggccttgcttgttcctgcattaggggaaagttggggacatgctgctacaatacggctaatctttcattgggaccgaaagcaaaggttggcaacattgtacaagtcacccagccagaaggaatgcacagtactgtttcaaatcaaacctcagggatttagagatactgttgttacttctgcatgttcattgcaaacagaaggttccttgagcacccggaaacggtcacgagacccagaggaagaattataacccagaaacaaatctcaaagtgtacaaatttattgatgttgtgaaatcaatgtgtacaagtggacttgttaccttaaagtataaataaacacactatggcatgaatgaatccagatcata

SEQ ID NO: 3495 - DNA, 2399 bp, Homo sapiens
  source 1..2399: mol_type = genomic DNA
ctggaacccggaagcggcagcgcggcgcgacccggcgggcgggctctgggcgcgggaatcccggcggatcccgggcgggcggatgacccccagccctacccttggtgccgcctcctcctctctcctttctcctccggcagccagcgcgcctgtgtcctctctaggaaggggtaggggaggggcgtctggagaggaccccccgcgaatgcccacgtgacgtgcagtccccctggggctgttccggcctgcggggaacatgggcgtgctcagggtcggactgtgccctggccttaccgaggagatgatccagcttctcaggagccacaggatcaagacagtggtggacctggtttctgcagacctggaagaggtagctcagaaatgtggcttgtcttacaaggccctggttgccctgaggcgggtgctgctggctcagttctcggctttccccgtgaatggcgctgatctctacgaggaactgaagacctccactgccatcctgtccactggcattggcagaataagactgtcaggaaatgcacggtggctcatgcctaaagtgactgaaattgtaggaggcccaggtagcggcaaaactcaggtatgtctctgtatggcagcaaatgtggcccatggcctgcagcaaaacgtcctatatgtagattccaatggagggctgacagcttcccgcctcctccagctgcttcaggctaaaacccaggatgaggaggaacaggcagaagctctccggaggatccaggtggtgcatgcatttgacatcttccagatgctggatgtgctgcaggagctccgaggcactgtggcccagcaggtgactggttcttcaggaactgtgaaggtggtggttgtggactcggtcactgcggtggtttccccacttctgggaggtcagcagagggaaggcttggccttgatgatgcagctggcccgagagctgaagaccctggcccgggaccttggcatggcagtggtggtgaccaaccacataactcgagacagggacagcgggaggctcaaacctgccctcggacgctcctggagctttgtgcccagcactcggattctcctggacaccatcgagggagcaggagcatcaggcggccggcgcatggcgtgtctggccaaatcttcccgacagccaacaggtttccaggagatggtagacattgggacctgggggacctcagagcagagtgccacattacagggtgatcagacatgacctgtgctgttgtttgggaaacagggaagcattggggacccctcccaacttttcttcccagtaacgcctgctgtttactgccacctggcactggtgactacagacgttctcaggctggccagaagagacatcttgggttccttggcctcactctctgtaagcatataaaccacaggcgaaagaggatgctgcattgcgaggacccagaaattcatactggtgccacgtttccttcccttatttctaacgtgtatgtttctggtggaaaccaagttcaccctggctgggagcatctctgatgaggcatgctggcgactggatggataatcctgtgcatcaccattgtgtcctgtgctccctcctagcgcagtggccaagccgggaaagcctctaacttgcctttgctgctgctgccttttttttcttttgtctctgcctttccatttgttagatgggggcccactcttccttagctctgtctctgagttactgggtggaaataagcttataaatgaaatactcttcttcatctctgttttgctcttaaaaatataaaaaggcaattccccgagccctagagccacctgatttccccttagaaggctgtttttcagtttcccccagtgaggcccaaagaacagtttattcctcctttcctcttgctgatttggtttcagacctgcctgcatcaccatgactaggtgagaacgtgtgggctcgctgcagttccagggatataatttaacagaaagggagggtatgacctgctcctggtgaatccagccactcatttaatatgcatggtgccctgtggggcccctccacagtacagcataaccagaggtgctgaaccatggccttgcccataaacagacagaggagaatttgcacagtaaatagagccagctgggaaaattgatgctgacgtaaataatacatggcaaatctagtcctttatgcagaaattcattgctggtggctccaagatgcaatataattacacctctcttcctgccagctgtaccacagctagtgccctagtgtatgaaataatccctctgtctttcaccagcactgtggccatccgtctgagagccatgaccctggctgggaggggacgaagacaccagggaatggaaaataaaaggaaaagtac

SEQ ID NO: 3496 - DNA, 2404 bp, Homo sapiens
  source 1..2404: mol_type = genomic DNA
ctggaacccggaagcggcagcgcggcgcgacccggcgggcgggctctgggcgcgggaatcccggcggatcccgggcgggcggatgacccccagccctacccttggtgccgcctcctcctctctcctttctcctccggcagccagcgcgcctgtgtcctctctaggaaggggtaggggaggggcgtctggagaggaccccccgcgaatgcccacgtgacgtgcagtccccctggggctgttccggcctgcggggaacatgggcgtgctcagggtcggactgtgccctggccttaccgaggagatgatccagcttctcaggagccacaggatcaagacagtggtggacctggtttctgcagacctggaagaggtagctcagaaatgtggcttgtcttacaaggccctggttgccctgaggcgggtgctgctggctcagttctcggctttccccgtgaatggcgctgatctctacgaggaactgaagacctccactgccatcctgtccactggcattggcagtcttgataaactgcttgatgctggtctctatactggagaagtgactgaaattgtaggaggcccaggtagcggcaaaactcaggtatgtctctgtatggcagcaaatgtggcccatggcctgcagcaaaacgtcctatatgtagattccaatggagggctgacagcttcccgcctcctccagctgcttcaggctaaaacccaggatgaggaggaacaggcagaagctctccggaggatccaggtggtgcatgcatttgacatcttccagatgctggatgtgctgcaggagctccgaggcactgtggcccagcaggtgactggttcttcaggaactgtgaaggtggtggttgtggactcggtcactgcggtggtttccccacttctgggaggtcagcagagggaaggcttggccttgatgatgcagctggcccgagagctgaagaccctggcccgggaccttggcatggcagtggtggtgaccaaccacataactcgagacagggacagcgggaggctcaaacctgccctcggacgctcctggagctttgtgcccagcactcggattctcctggacaccatcgagggagcaggagcatcaggcggccggcgcatggcgtgtctggccaaatcttcccgacagccaacaggtttccaggagatggtagacattgggacctgggggacctcagagcagagtgccacattacagggtgatcagacatgacctgtgctgttgtttgggaaacagggaagcattggggacccctcccaacttttcttcccagtaacgcctgctgtttactgccacctggcactggtgactacagacgttctcaggctggccagaagagacatcttgggttccttggcctcactctctgtaagcatataaaccacaggcgaaagaggatgctgcattgcgaggacccagaaattcatactggtgccacgtttccttcccttatttctaacgtgtatgtttctggtggaaaccaagttcaccctggctgggagcatctctgatgaggcatgctggcgactggatggataatcctgtgcatcaccattgtgtcctgtgctccctcctagcgcagtggccaagccgggaaagcctctaacttgcctttgctgctgctgccttttttttcttttgtctctgcctttccatttgttagatgggggcccactcttccttagctctgtctctgagttactgggtggaaataagcttataaatgaaatactcttcttcatctctgttttgctcttaaaaatataaaaaggcaattccccgagccctagagccacctgatttccccttagaaggctgtttttcagtttcccccagtgaggcccaaagaacagtttattcctcctttcctcttgctgatttggtttcagacctgcctgcatcaccatgactaggtgagaacgtgtgggctcgctgcagttccagggatataatttaacagaaagggagggtatgacctgctcctggtgaatccagccactcatttaatatgcatggtgccctgtggggcccctccacagtacagcataaccagaggtgctgaaccatggccttgcccataaacagacagaggagaatttgcacagtaaatagagccagctgggaaaattgatgctgacgtaaataatacatggcaaatctagtcctttatgcagaaattcattgctggtggctccaagatgcaatataattacacctctcttcctgccagctgtaccacagctagtgccctagtgtatgaaataatccctctgtctttcaccagcactgtggccatccgtctgagagccatgaccctggctgggaggggacgaagacaccagggaatggaaaataaaaggaaaagtacagaaa

SEQ ID NO: 3497 - DNA, 1327 bp, Homo sapiens
  source 1..1327: mol_type = genomic DNA
tgtgtcctctctaggaaggggtaggggaggggcgtctggagaggaccccccgcgaatgcccacgtgacgtgcagtccccctggggctgttccggcctgcggggaacatgggcgtgctcagggtcggactgtgccctggccttaccgaggagatgatccagcttctcaggagccacaggatcaagacagtggtggacctggtttctgcagacctggaagaggtagctcagaaatgtggcttgtcttacaaggcagaagctctccggaggatccaggtggtgcatgcatttgacatcttccagatgctggatgtgctgcaggagctccgaggcactgtggcccagcaggtgactggttcttcaggaactgtgaaggtggtggttgtggactcggtcactgcggtggtttccccacttctgggaggtcagcagagggaaggcttggccttgatgatgcagctggcccgagagctgaagaccctggcccgggaccttggcatggcagtggtggtgaccaaccacataactcgagacagggacagcgggaggctcaaacctgccctcggacgctcctggagctttgtgcccagcactcggattctcctggacaccatcgagggagcaggagcatcaggcggccggcgcatggcgtgtctggccaaatcttcccgacagccaacaggtttccaggagatggtagacattgggacctgggggacctcagagcagagtgccacattacagggtgatcagacatgacctgtgctgttgtttgggaaacagggaagcattggggacccctcccaacttttcttcccagtaacgcctgctgtttactgccacctggcactggtgactacagacgttctcaggctggccagaagagacatcttgggttccttggcctcactctctgtaagcatataaaccacaggcgaaagaggatgctgcattgcgaggacccagaaattcatactggtgccacgtttccttcccttatttctaacgtgtatgtttctggtggaaaccaagttcaccctggctgggagcatctctgatgaggcatgctggcgactggatggataatcctgtgcatcaccattgtgtcctgtgctccctcctagcgcagtggccaagccgggaaagcctctaacttgcctttgctgctgctgccttttttttcttttgtctctgcctttccatttgttagatgggggcccactcttccttagctctgtctctgagttactgggtggaaataagcttataaatgaaatactcttcttcatctctgttttgctcttaaaaatataaaaaggcaattccccg

SEQ ID NO: 3498 - DNA, 613 bp, Homo sapiens
  source 1..613: mol_type = genomic DNA
ctggaacccggaagcggcagcgcggcgcgacccggcgggcgggctctgggcgcgggaatcccggcggatcccgggcgggcggatgacccccagccctacccttggtgccgcctcctcctctctcctttctcctccggcagccagcgcgcctgtgtcctctctaggaaggggtaggggaggggcgtctggagaggaccccccgcgaatgcccacgtgacgtgcagtccccctggggctgttccggcctgcggggaacatgggcgtgctcagggtcggactgtgccctggccttaccgaggagatgatccagcttctcaggagccacaggatcaagacagtggtggacctggtttctgcagacctggaagaggtagctcagaaatgtggcttgtcttacaaggccctggttgccctgaggcgggtgctgctggctcagttctcggctttccccgtgaatggcgctgatctctacgaggaactgaagacctccactgccatcctgtccactggcattggcagacatggagggcgcactcaagtgggaacctgggaggactgcagctgcctcaggtccccgcagggagatcgtggagtggggtcaggaatgctctga

SEQ ID NO: 3499 - DNA, 2264 bp, Homo sapiens
  source 1..2264: mol_type = genomic DNA
ctggaacccggaagcggcagcgcggcgcgacccggcgggcgggctctgggcgcgggaatcccggcggatcccgggcgggcggatgacccccagccctacccttggtgccgcctcctcctctctcctttctcctccggcagccagcgcgcctgtgtcctctctaggaaggggtaggggaggggcgtctggagaggaccccccgcgaatgcccacgtgacgtgcagtccccctggggctgttccggcctgcggggaacatgggcgtgctcagggtcggactgtgccctggccttaccgaggagatgatccagcttctcaggagccacaggatcaagacagtggtggacctggtttctgcagacctggaagaggtagctcagaaatgtggcttgtcttacaaggccctggttgccctgaggcgggtgctgctggctcagttctcggctttccccgtgaatggcgctgatctctacgaggaactgaagacctccactgccatcctgtccactggcattggcagtcttgataaactgcttgatgctggtctctatactggagaagtgactgaaattgtaggaggcccaggtagcggcaaaactcaggcagaagctctccggaggatccaggtggtgcatgcatttgacatcttccagatgctggatgtgctgcaggagctccgaggcactgtggcccagcaggtgactggttcttcaggaactgtgaaggtggtggttgtggactcggtcactgcggtggtttccccacttctgggaggtcagcagagggaaggcttggccttgatgatgcagctggcccgagagctgaagaccctggcccgggaccttggcatggcagtggtggtgaccaaccacataactcgagacagggacagcgggaggctcaaacctgccctcggacgctcctggagctttgtgcccagcactcggattctcctggacaccatcgagggagcaggagcatcaggcggccggcgcatggcgtgtctggccaaatcttcccgacagccaacaggtttccaggagatggtagacattgggacctgggggacctcagagcagagtgccacattacagggtgatcagacatgacctgtgctgttgtttgggaaacagggaagcattggggacccctcccaacttttcttcccagtaacgcctgctgtttactgccacctggcactggtgactacagacgttctcaggctggccagaagagacatcttgggttccttggcctcactctctgtaagcatataaaccacaggcgaaagaggatgctgcattgcgaggacccagaaattcatactggtgccacgtttccttcccttatttctaacgtgtatgtttctggtggaaaccaagttcaccctggctgggagcatctctgatgaggcatgctggcgactggatggataatcctgtgcatcaccattgtgtcctgtgctccctcctagcgcagtggccaagccgggaaagcctctaacttgcctttgctgctgctgccttttttttcttttgtctctgcctttccatttgttagatgggggcccactcttccttagctctgtctctgagttactgggtggaaataagcttataaatgaaatactcttcttcatctctgttttgctcttaaaaatataaaaaggcaattccccgagccctagagccacctgatttccccttagaaggctgtttttcagtttcccccagtgaggcccaaagaacagtttattcctcctttcctcttgctgatttggtttcagacctgcctgcatcaccatgactaggtgagaacgtgtgggctcgctgcagttccagggatataatttaacagaaagggagggtatgacctgctcctggtgaatccagccactcatttaatatgcatggtgccctgtggggcccctccacagtacagcataaccagaggtgctgaaccatggccttgcccataaacagacagaggagaatttgcacagtaaatagagccagctgggaaaattgatgctgacgtaaataatacatggcaaatctagtcctttatgcagaaattcattgctggtggctccaagatgcaatataattacacctctcttcctgccagctgtaccacagctagtgccctagtgtatgaaataatccctctgtctttcaccagcactgtggccatccgtctgagagccatgaccctggctgggaggggacgaagacaccagggaatggaaaataaaaggaaaagtac

SEQ ID NO: 3500 - DNA, 2459 bp, Homo sapiens
  source 1..2459: mol_type = genomic DNA
ctggaacccggaagcggcagcgcggcgcgacccggcgggcgggctctgggcgcgggaatcccggcggatcccgggcgggcggatgacccccagccctacccttggtgccgcctcctcctctctcctttctcctccggcagccagcgcgcctgtgtcctctctaggaaggggtaggggaggggcgtctggagaggaccccccgcgaatgcccacgtgacgtgcagtccccctggggctgttccggcctgcggggaacatgggcgtgctcagggtcggactgtgccctggccttaccgaggagatgatccagcttctcaggagccacaggatcaagacagtggtggacctggtttctgcagacctggaagaggtagctcagaaatgtggcttgtcttacaagacatggagggcgcactcaagtgggaacctgggaggactgcagctgcctcaggtccccgcagggagatcgtggagtggggtcaggaatgctctgaagaaggcaggacttgggcatggaggaacagatggactttcgctgaatgctttcgatgaacgaggcactgcggtcagcacttcacgtcttgataaactgcttgatgctggtctctatactggagaagtgactgaaattgtaggaggcccaggtagcggcaaaactcaggtatgtctctgtatggcagcaaatgtggcccatggcctgcagcaaaacgtcctatatgtagattccaatggagggctgacagcttcccgcctcctccagctgcttcaggctaaaacccaggatgaggaggaacaggcagaagctctccggaggatccaggtggtgcatgcatttgacatcttccagatgctggatgtgctgcaggagctccgaggcactgtggcccagcaggtgactggttcttcaggaactgtgaaggtggtggttgtggactcggtcactgcggtggtttccccacttctgggaggtcagcagagggaaggcttggccttgatgatgcagctggcccgagagctgaagaccctggcccgggaccttggcatggcagtggtggtgaccaaccacataactcgagacagggacagcgggaggctcaaacctgccctcggacgctcctggagctttgtgcccagcactcggattctcctggacaccatcgagggagcaggagcatcaggcggccggcgcatggcgtgtctggccaaatcttcccgacagccaacaggtttccaggagatggtagacattgggacctgggggacctcagagcagagtgccacattacagggtgatcagacatgacctgtgctgttgtttgggaaacagggaagcattggggacccctcccaacttttcttcccagtaacgcctgctgtttactgccacctggcactggtgactacagacgttctcaggctggccagaagagacatcttgggttccttggcctcactctctgtaagcatataaaccacaggcgaaagaggatgctgcattgcgaggacccagaaattcatactggtgccacgtttccttcccttatttctaacgtgtatgtttctggtggaaaccaagttcaccctggctgggagcatctctgatgaggcatgctggcgactggatggataatcctgtgcatcaccattgtgtcctgtgctccctcctagcgcagtggccaagccgggaaagcctctaacttgcctttgctgctgctgccttttttttcttttgtctctgcctttccatttgttagatgggggcccactcttccttagctctgtctctgagttactgggtggaaataagcttataaatgaaatactcttcttcatctctgttttgctcttaaaaatataaaaaggcaattccccgagccctagagccacctgatttccccttagaaggctgtttttcagtttcccccagtgaggcccaaagaacagtttattcctcctttcctcttgctgatttggtttcagacctgcctgcatcaccatgactaggtgagaacgtgtgggctcgctgcagttccagggatataatttaacagaaagggagggtatgacctgctcctggtgaatccagccactcatttaatatgcatggtgccctgtggggcccctccacagtacagcataaccagaggtgctgaaccatggccttgcccataaacagacagaggagaatttgcacagtaaatagagccagctgggaaaattgatgctgacgtaaataatacatggcaaatctagtcctttatgcagaaattcattgctggtggctccaagatgcaatataattacacctctcttcctgccagctgtaccacagctagtgccctagtgtatgaaataatccctctgtctttcaccagcactgtggccatccgtctgagagccatgaccctggctgggaggggacgaagacaccagggaatggaaaataaaaggaaaagtac

SEQ ID NO: 3501 - DNA, 986 bp, Homo sapiens
  source 1..986: mol_type = genomic DNA
gatttgaggctactgctgccaggctagctatgtggctggccagaccaagggccagtgtgactgtgaagcagcatcatgagaggggtaaaaccaaggaacagactgcatgagcccttgggccccttccagctctaatactccatggtgatggcagccctgcccttctctgaagatctcaaaatgcctgacacctgtgtccttccgcactgccctgggaaggagaataaggatgtggtggacctggtttctgcagacctggaagaggtagctcagaaatgtggcttgtcttacaaggccctggttgccctgaggcgggtgctgctggctcagttctcggctttccccgtgaatggcgctgatctctacgaggaactgaagacctccactgccatcctgtccactggcattggcagtcttgataaactgcttgatgctggtctctatactggagaagtgactgaaattgtaggaggcccaggtagcggcaaaactcaggtatgtctctgtatggcagcaaatgtggcccatggcctgcagcaaaacgtcctatatgtagattccaatggagggctgacagcttcccgcctcctccagctgcttcaggctaaaacccaggatgaggaggaacaggcagaagctctccggaggatccaggtggtgcatgcatttgacatcttccagatgctggatgtgctgcaggagctccgaggcactgtggcccagcaggatggaattcccgagcacctaaatcacatacctcattgtttacatgttcatcttccctgctgaacagtaaagccccctgagtggaaggatcatgtcatatttatgtctgcattccccactagtttctaggggttaagaatctgagactaggagcggtggctcacgcctaaaatcccaatgctttggaaggccaaggcaggaggatcacttgagcccaggagttcaggaccagcctgggcagcatagcaagaccctgtctt

SEQ ID NO: 3502 - DNA, 847 bp, Homo sapiens
  source 1..847: mol_type = genomic DNA
cggtgtgtgtgttgcggcagaagccagcgcgcctgtgtcctctctaggaaggggtaggggaggggcgtctggagaggaccccccgcgaatgcccacgtgacgtgcagtccccctggggctgttccggcctgcggggaacatgggcgtgctcagggtcggactgtgccctggccttaccgaggagatgatccagcttctcaggagccacaggatcaagacagtggtggacctggtttctgcagacctggaagaggtagctcagaaatgtggcttgtcttacaaggccctggttgccctgaggcgggtgctgctggctcagttctcggctttccccgtgaatggcgctgatctctacgaggaactgaagacctccactgccatcctgtccactggcattggcagtcttgataaactgcttgatgctggtctctatactggagaagtgactgaaattgtaggaggcccaggtagcggcaaaactcaggtatgtctctgtatggcagcaaatgtggcccatggcctgcagcaaaacgtcctatatgtagattccaatggagggctgacagcttcccgcctcctccagctgcttcaggctaaaacccaggatgaggaggaacaggcagaagctctccggaggatccaggtggtgcatgcatttgacatcttccagatgctggatgtgctgcaggagctccgaggcactgtggcccagcaggtgactggttcttcaggaactgtgaaggtggtggttgtggactcggtcactgcggtggtttccccacttctgggaggtcagcagagggaaggcttggccttgatgatgcagctggcccgagagctgaagacc

SEQ ID NO: 3503 - DNA, 1528 bp, Homo sapiens
  source 1..1528: mol_type = genomic DNA
aatcccggcggatcccgggcgggcggatgacccccagccctacccttggtgccgcctcctcctctctcctttctcctccggcagccagcgcgcctgtgtcctctctaggaaggggtaggggaggggcgtctggagaggaccccccgcgaatgcccacgtgacgtgcagtccccctggggctgttccggcctgcggggaacatgggcgtgctcagggtcggactgtgccctggccttaccgaggagatgatccagcttctcaggagccacaggatcaagacagtggtggacctggtttctgcagacctggaagaggtagctcagaaatgtggcttgtcttacaagacatggagggcgcactcaagtgggaacctgggaggactgcagctgcctcaggtccccgcagggagatcgtggagtggggtcaggaatgctctgaagaaggcaggacttgggcatggaggaacagatggactttcgctgaatgctttcgatgaacgaggcactgcggtcagcacttcacgtcttgataaactgcttgatgctggtctctatactggagaagtgactgaaattgtaggaggcccaggtagcggcaaaactcaggtatgtctctgtatggcagcaaatgtggcccatggcctgcagcaaaacgtcctatatgtagattccaatggagggctgacagcttcccgcctcctccagctgcttcaggctaaaacccaggatgaggaggaacaggcagaagctctccggaggatccaggtggtgcatgcatttgacatcttccagatgctggatgtgctgcaggagctccgaggcactgtggcccagcaggtgactggttcttcaggaactgtgaaggtggtggttgtggactcggtcactgcggtggtttccccacttctgggaggtcagcagagggaaggcttggccttgatgatgcagctggcccgagagctgaagaccctggcccgggaccttggcatggcagtggtggtgaccaaccacataactcgagacagggacagcgggaggctcaaacctgccctcggacgctcctggagctttgtgcccagcactcggattctcctggacaccatcgagggagcaggagcatcaggcggccggcgcatggcgtgtctggccaaatcttcccgacagccaacaggtttccaggagatggtagacattgggacctgggggacctcagagcagagtgccacattacagggtgatcagacatgacctgtgctgttgtttgggaaacagggaagcattggggacccctcccaacttttcttcccagtaacgcctgctgtttactgccacctggcactggtgactacagacgttctcaggctggccagaagagacatcttgggttccttggcctcactctctgtaagcatataaaccacaggcgaaagaggatgctgcattgcgaggacccagaaattcatactggtgccacgtttccttcccttatttctaacgtgtatgtttctggtggaaaccaagttcaccct

SEQ ID NO: 3504 - DNA, 2710 bp, Homo sapiens
  source 1..2710: mol_type = genomic DNA
ttcccagagacgctcgcgcacccttcccattctcctctgcgcggcctccatctaagatctcttccccttgtccatagcctagatcgagctccctgtgtgcaccgcgcgctgcccgaggcgcaggtcaaccagaatcaagatgtctgggactgaggaagcaattcttggaggacgtgacagccatcctgctgctggcggcggctcagtgttatgctttggacagtgccagtacacagcagaagagtaccaggccatccagaaggccctgaggcagaggctgggcccagaatacataagtagccgcatggctggcggaggccagaaggtgtgctacattgagggtcatcgggtaattaatctggccaatgagatgtttggttacaatggctgggcacactccatcacgcagcagaatgtggattttgttgacctcaacaatggcaagttctacgtgggagtctgtgcatttgtgagggtccagctgaaggatggttcatatcatgaagatgttggttatggtgttagtgagggcctcaagtccaaggctttatctttggagaaggcaaggaaggaggcggtgacagacgggctgaagcgagccctcaggagttttgggaatgcacttggaaactgtattctggacaaagactacctgagatcactaaataagcttccacgccagttgcctcttgaagtggatttaactaaagcgaagagacaagatcttgaaccgtctgtggaggaggcaagatacaacagctgccgaccgaacatggccctgggacacccacagctgcagcaggtgacctccccttccagacccagccatgctgtgataccggcggaccaggactgcagctcccgaagcctgagctcatccgccgtggagagcgaggccacgcaccagcggaagctccggcagaagcagctgcagcagcagttccgggagcggatggagaagcagcaggttcgagtctccacgccgtcagctgagaagagtgaggcagcgcctccggcccctcctgtgacgcacagcactcctgtaactgtctcagaaccactcctggagaaagacttccttgcaggagtgactcaagaattaatcaagactcttgaagacaactctgaaaagtgggctgtgactcccgatgcaggggatggtgtggtcaagccctcgtctagagcagacccagcccagacctctgacacattagccttgaacaaccagatggtgacccagaacaggactccacacagcgtttgccaccagaaaccacaagcaaaatctggatcttgggacctccaaacttatagcgctgaccaacgcacaacaggaaactgggaatctcataggaagagccaggacatgaagaaaaggaaatatgatccatcttaactgaggctcaggccacataattggactctgtcacaaagggactttggaaaactactttttggtcatgaaattgttcatcgctgctggagaatgaacgtcattgcgatttatcttgcttcattctgaaccttatcaagaggatctgactgagagcccactgcagttagagctgagcacttttgaaaagcttgtccatcactctagtagggagaggctctggacagatgaataccttttcttcggcttgtgaggcttcccactatttattactgaactattatgttaatgaagatggacattttaggaatcaccaatggctccttgccctcaagcaatataggccagacttggtcctaagcacctgcctcagcaattgtctacattcagttgttttgcataacgtctgccttctttcctttacggtccatgcctttaatgttgcccacattaagcactgtggatcacgacaggaaaaaggttggagcagtgcttttcactactttgtatcaatccaggctacaatcttcatttaatataaataatttatggatttatgacattacaatcctgcattgtttcaagactgacattttttcctaaggaaggaaataatcatctaagaccacgaaaaaaggctgttttttgtttttttttttttttttttttttgagacggggtctggctgtgttgccctgactggagttcagtggtgcaaacacagctctctccacaacctcttgggcccaagtgatactcccacctctgccttacaaaatacagggattactggtgtgagccactgtgtctggccagaaaaggcatttttgagaaagcaaatcgtataccttattaacaaaatagaatatatatatattgcttatctgaaatgcttgaaaccagaattgttttgcattttttgaatatttgtatacacataatgagaccttggggatgggacccaagtctgaacgtggaattcacctgtgtttcgtgtatatgcctcatacacataattttgtgcatgaaacagagtttttgtataagaagatacactgcagctgaagagggctgggtttttttttctcttagggtcgctgcataaactgttgtatgcctggtgctttgcgacttgtcacacgaggtcacgtgtggaattttccacttctggcatcacgtcagtgctcagaaattttctgatctcagagcatttcaattagggatgctcaaacgcaactgtttctacttccccatttcaggtgtgagatgtaacccaccttgaccataaattggcttttcatagtgctcagatgtttc

SEQ ID NO: 3505 - DNA, 2366 bp, Homo sapiens
  source 1..2366: mol_type = genomic DNA
gttccctcccaggatcgacatgcacttggatcattgcagtttctgggcctgctgtcatctcccccttcagtacttcccacatatgactaccaactgttagacgatgtgctgctgccagaccagcctttcatttcttggacatccggctatttacccaggaaaagtcatcctttgactatttttcatgacctttctcatctgactcgtgatctgcccatcttgttactccctagcagtgtggtaagaggtcaaccagaatcaagatgtctgggactgaggaagcaattcttggaggacgtgacagccatcctgctgctggcggcggctcagtgttatgctttggacagtgccagtacacagcagaagagtaccaggccatccagaaggccctgaggcagaggctgggcccagaatacataagtagccgcatggctggcggaggccagaaggtgtgctacattgagggtcatcgggtaattaatctggccaatgagatgtttggttacaatggctgggcacactccatcacgcagcagaatgtggattttgttgacctcaacaatggcaagttctacgtgggagtctgtgcatttgtgagggtccagctgaaggatggttcatatcatgaagatgttggttatggtgttagtgagggcctcaagtccaaggctttatctttggagaaggcaaggaaggaggcggtgacagacgggctgaagcgagccctcaggagttttgggaatgcacttggaaactgtattctggacaaagactacctgagatcactaaataagcttccacgccagttgcctcttgaagtggatttaactaaagcgaagagacaagatcttgaaccgtctgtggaggaggcaagatacaacagctgccgaccgaacatggccctgggacacccacagctgcagcaggtgacctccccttccagacccagccatgctgtgataccggcggaccaggactgcagctcccgaagcctgagctcatccgccgtggagagcgaggccacgcaccagcggaagctccggcagaagcagctgcagcagcagttccgggagcggatggagaagcagcaggttcgagtctccacgccgtcagctgagaagagtgaggcagcgcctccggcccctcctgtgacgcacagcactcctgtaactgtctcagaaccactcctggagaaagacttccttgcaggagtgactcaagaattaatcaagactcttgaagacaactctgaaaagtgggctgtgactcccgatgcaggggatggtgtggtcaagccctcgtctagagcagacccagcccagacctctgacacattagccttgaacaaccagatggtgacccagaacaggactccacacagcgtttgccaccagaaaccacaagcaaaatctggatcttgggacctccaaacttatagcgctgaccaacgcacaacaggaaactgggaatctcataggaagagccaggacatgaagaaaaggaaatatgatccatcttaactgaggctcaggccacataattggactctgtcacaaagggactttggaaaactactttttggtcatgaaattgttcatcgctgctggagaatgaacgtcattgcgatttatcttgcttcattctgaaccttatcaagaggatctgactgagagcccactgcagttagagctgagcacttttgaaaagcttgtccatcactctagtagggagaggctctggacagatgaataccttttcttcggcttgtgaggcttcccactatttattactgaactattatgttaatgaagatggacattttaggaatcaccaatggctccttgccctcaagcaatataggccagacttggtcctaagcacctgcctcagcaattgtctacattcagttgttttgcataacgtctgccttctttcctttacggtccatgcctttaatgttgcccacattaagcactgtggatcacgacaggaaaaaggttggagcagtgcttttcactactttgtatcaatccaggctacaatcttcatttaatataaataatttatggatttatgacattacaatcctgcattgtttcaagactgacattttttcctaaggaaggaaataatcatctaagaccacgaaaaaaggctgttttttgtttttttttttttttttttttttgagacggggtctggctgtgttgccctgactggagttcagtggtgcaaacacagctctctccacaacctcttgggcccaagtgatactcccacctctgccttacaaaatacagggattactggtgtgagccactgtgtctggccagaaaaggcatttttgagaaagcaaatcgtatacc

SEQ ID NO: 3506 - DNA, 1380 bp, Homo sapiens
  source 1..1380: mol_type = genomic DNA
aagatctcttccccttgtccatagcctagatcgagctccctgtgtgcaccgcgcgctgcccgaggcgcgtgtgctacattgagggtcatcgggtaattaatctggccaatgagatgtttggttacaatggctgggcacactccatcacgcagcagaatgtggattttgttgacctcaacaatggcaagttctacgtgggagtctgtgcatttgtgagggtccagctgaaggatggttcatatcatgaagatgttggttatggtgttagtgagggcctcaagtccaaggctttatctttggagaaggcaaggaaggaggcggtgacagacgggctgaagcgagccctcaggagttttgggaatgcacttggaaactgtattctggacaaagactacctgagatcactaaataagcttccacgccagttgcctcttgaagtggatttaactaaagcgaagagacaagatcttgaaccgtctgtggaggaggcaagatacaacagctgccgaccgaacatggccctgggacacccacagctgcagcaggtgacctccccttccagacccagccatgctgtgataccggcggaccaggactgcagctcccgaagcctgagctcatccgccgtggagagcgaggccacgcaccagcggaagctccggcagaagcagctgcagcagcagttccgggagcggatggagaagcagcaggttcgagtctccacgccgtcagctgagaagagtgaggcagcgcctccggcccctcctgtgacgcacagcactcctgtaactgtctcagaaccactcctggagaaagacttccttgcaggagtgactcaagaattaatcaagactcttgaagacaactctgaaaagtgggctgtgactcccgatgcaggggatggtgtggtcaagccctcgtctagagcagacccagcccagacctctgacacattagccttgaacaaccagatggtgacccagaacaggactccacacagcgtttgccaccagaaaccacaagcaaaatctggatcttgggacctccaaacttatagcgctgaccaacgcacaacaggaaactgggaatctcataggaagagccaggacatgaagaaaaggaaatatgatccatcttaactgaggctcaggccacataattggactctgtcacaaagggactttggaaaactactttttggtcatgaaattgttcatcgctgctggagaatgaacgtcattgcgatttatcttgcttcattctgaaccttatcaagaggatctgactgagagcccactgcagttagagctgagcacttttgaaaagcttgtccatcactctagtagggagaggctctggacagatgaataccttttcttc

SEQ ID NO: 3507 - DNA, 681 bp, Homo sapiens
  source 1..681: mol_type = genomic DNA
atgtctgggactgaggaagcaattcttggaggacgtgacagccatcctgctgctggcggcggctcagtgttatgctttggacagtgccagtacacagcagaagagtaccaggccatccagaaggccctgaggcagaggctgggcccagaatacataagtagccgcatggctggcggaggccagaaggtgtgctacattgagggtcatcgggtaattaatctggccaatgagatgtttggttacaatggctgggcacactccatcacgcagcagaatgtggattttgttgacctcaacaatggcaagttctacgtgggagtctgtgcatttgtgagggtccagctgaaggatggttcatatcatgaagatgttggttatggtgttagtgagggcctcaagtccaaggctttatctttggagaaggcaaggaaggaggcggtgacagacgggctgaagcgagccctcaggcttcccttgctgggagtaagtggtagaatcctgtactctctcttctccgtgcactcagtcatgtgtgccggaggccttcccactcctactgcgagtgcacagacagcaccctcctctccgtgctcctcagcagtcctccgctacgcacaggagttttgggaatgcacttggaaactgtattctggacaaagactacctgagatcactaaataa

SEQ ID NO: 3508 - DNA, 3108 bp, Homo sapiens
  source 1..3108: mol_type = genomic DNA
ggtcttggcgggtcggtgagtcttggcggctgttaacgcgcgctttgggaacaggaaggttgagagagaggtgctggggtctgcgtctatctctgtcgctcttttcagcccctcctggtattcccctcctaacctgggttttttacacgcccgcgtggcttcctgctcgacctccctgagtctgatcctggtttccacctccagccctgggaaatttcctttctccagactcgccctccccacccgggcctcggactttcaccccagcttctctctcctggccagtgattacccacccccaatcccaccccgccccgccgcgcaactacctcctcccttcacccggactgggaccatcatccccactccactccgcccagtctgggactccacctgcctcctccccaatcccacactaatctctgcttggtctcttcctctttggcctaatctctcgtctcggcttattggggacggccactctcacagtttggttccaaacaccagttcctggatggattcccgccatccatgccccctctttaattagccggtcctctcaataatgtagcagccccctctacagattagaccctggtcctacactcttagccgctgcctgcttttgacctttggctcatgggtacttgacgttttaaactcctaggcccaggatgaggaggagcttggctcccagccagctggccaagagaaaacctgaaggcaggtcctgtgatgatgaagactggcaacctggcctagtgactcctaggaaacggaaatccagcagtgagacccagatccaggagtgtttcctgtctccttttcggaaacctttgagtcagctaaccaatcaaccaccttgtctggacagcagtcagcatgaagcatttattcgaagcattttgtcaaagcctttcaaagtccccattccaaattatcaaggtcctctgggctctcgagcattgggcctgaaaagggctggggtccgccgggccctccatgaccccctggaaaaagatgccttggttctgtatgagcctcccccgctgagcgctcatgaccagctgaagcttgacaaggagaaactccctgtccatgtggttgttgaccctattctcagtaaggttttgcggcctcatcagagagagggagtgaaattcctgtgggagtgtgtcaccagtcggcgcatccctggcagccatggctgcatcatggctgatgagatgggcctaggaaagacgctgcagtgcatcacattgatgtggacacttttacgccagagtccagagtgcaagccagaaattgacaaggcagtggtggtgtcgccttccagcctggtgaagaactggtacaatgaggttgggaaatggctcggagggaggatccaacctctggccatcgatggaggatctaaggatgaaatagaccaaaagctggaaggattcatgaaccagcgtggagccagggtgtcttctcccatcctcatcatttcctatgagaccttccgccttcatgttggagtcctccagaaaggaagtgttggtctggtcatatgtgacgagggacacaggctcaagaactctgagaatcagacttaccaagccctggacagcttgaacaccagccggcgggtgctcatctccggaactcccatccagaatgatctgcttgagtatttcagcttggtacattttgttaattccggcatcctagggactgcccatgaattcaagaagcattttgaattgccaattttgaagggtcgagacgctgctgctagtgaggcagacaggcagctaggagaggagcggctgcgggagctcaccagcattgtgaatagatgcctgatacggaggacttctgatatcctttctaaatatctgcctgtgaagattgagcaggtcgtttgttgtaggctgacaccccttcagactgagttatacaagaggtttctgagacaagccaaaccggcagaagaattgcttgagggcaagatgagtgtgtcttccctttcttccatcacctcgctaaagaagctttgtaatcatccagctctaatctatgataagtgtgtggaagaggaggatggctttgtgggtgccttggacctcttccctcctggttacagctctaaggccctggagccccagctgtcaggtaagatgctggtcctggattatattctggcggtgacccgaagccgtagcagtgacaaagtagtgctggtgtcgaattacacccagactttggatctctttgagaagctgtgccgtgcccgaaggtacttatacgtccgcctggatggcacgatgtccattaagaagcgagccaaggttgtagaacgcttcaatagtccatcgagccctgactttgtcttcatgctgagcagcaaagctgggggctgtggcctcaatctcattggggctaaccggctggtcatgtttgaccctgactggaacccagccaatgatgaacaagccatggcccgggtctggcgagatggtcaaaagaagacttgctatatctaccgcctgctgtctgcagggaccattgaggagaagatcttccagcgtcagagccacaagaaggcactgagcagctgtgtggtggatgaggagcaggatgtagagcgccacttctctctgggcgagttgaaggagctgtttatcctggatgaagctagcctcagtgacacacatgacaggttgcactgccgacgttgtgtcaacagccgtcagatccggccaccccctgatggttctgactgcacttcagacctggcagggtggaaccactgcactgataagtgggggctccgggatgaggtactccaggctgcctgggatgctgcctccactgccatcaccttcgtcttccaccagcgttctcatgaggagcagcggggcctccgctgataaccagctggtctgggtgtagctcttagaggaaggagatagggaaaaggggctccttgctccacagggccctgttgaattttgttctctgggagaaaatcatcaagaagggctgcatgatgtttgcccaaaatttattttataagaaaaacttttttggttaaaaaaaagaataaaggtatgaaagggt

SEQ ID NO: 3509 - DNA, 2549 bp, Homo sapiens
  source 1..2549: mol_type = genomic DNA
gatacgacggcagcgcggcgggaggttcgattgacccggtcttggcgggtcgccgctgcctgcttttgacctttggctcatgggtacttgacgttttaaactcctaggcccaggatgaggaggagcttggctcccagccagctggccaagagaaaacctgaaggcaggtcctgtgatgatgaagactggcaacctggcctagtgactcctaggaaacggaaatccagcagtgagacccagatccaggagtgtttcctgtctccttttcggaaacctttgagtcagctaaccaatcaaccaccttgtctggacagcagtcagcatgaagcatttattcgaagcattttgtcaaagcctttcaaagtccccattccaaattatcaaggtcctctgggctctcgagcattgggcctgaaaagggctggggtccgccgggccctccatgaccccctggaaaaagatgccttggttctgtatgagcctcccccgctgagcgctcatgaccagctgaagcttgacaaggagaaactccctgtccatgtggttgttgaccctattctcagtaaggttttgcggcctcatcagagagagggagtgaaattcctgtgggagtgtgtcaccagtcggcgcatccctggcagccatggctgcatcatggctgatgagatgggcctaggaaagacgctgcagtgcatcacattgatgtggacacttttacgccagagtccagagtgcaagccagaaattgacaaggcagtggtggtgtcgccttccagcctggtgaagaactggtacaatgaggttgggaaatggctcggagggaggatccaacctctggccatcgatggaggatctaaggatgaaatagaccaaaagctggaaggattcatgaaccagcgtggagccagggtgtcttctcccatcctcatcatttcctatgagaccttccgccttcatgttggagtcctccagaaaggaagtgttggtctggtcatatgtgacgagggacacaggctcaagaactctgagaatcagacttaccaagccctggacagcttgaacaccagccggcgggtgctcatctccggaactcccatccagaatgatctgcttgagtatttcagcttggtacattttgttaattccggcatcctagggactgcccatgaattcaagaagcattttgaattgccaattttgaagggtcgagacgctgctgctagtgaggcagacaggcagctaggagaggagcggctgcgggagctcaccagcattgtgaatagatgcctgatacggaggacttctgatatcctttctaaatatctgcctgtgaagattgagcaggtcgtttgttgtaggctgacaccccttcagactgagttatacaagaggtttctgagacaagccaaaccggcagaagaattgcttgagggcaagatgagtgtgtcttccctttcttccatcacctcgctaaagaagctttgtaatcatccagctctaatctatgataagtgtgtggaagaggaggatggctttgtgggtgccttggacctcttccctcctggttacagctctaaggccctggagccccagctgtcaggtaagatgctggtcctggattatattctggcggtgacccgaagccgtagcagtgacaaagtagtgctggtgtcgaattacacccagactttggatctctttgagaagctgtgccgtgcccgaaggtacttatacgtccgcctggatggcacgatgtccattaagaagcgagccaaggttgtagaacgcttcaatagtccatcgagccctgactttgtcttcatgctgagcagcaaagctgggggctgtggcctcaatctcattggggctaaccggctggtcatgtttgaccctgactggaacccagccaatgatgaacaagccatggcccgggtctggcgagatggtcaaaagaagacttgctatatctaccgcctgctgtctgcagggaccattgaggagaagatcttccagcgtcagagccacaagaaggcactgagcagctgtgtggtggatgaggagcaggatgtagagcgccacttctctctgggcgagttgaaggagctgtttatcctggatgaagctagcctcagtgacacacatgacaggttgcactgccgacgttgtgtcaacagccgtcagatccggccaccccctgatggttctgactgcacttcagacctggcagggtggaaccactgcactgataagtgggggctccgggatgaggtactccaggctgcctgggatgctgcctccactgccatcaccttcgtcttccaccagcgttctcatgaggagcagcggggcctccgctgataaccagctggtctgggtgtagctcttagaggaaggagatagggaaaaggggctccttgctccacagggccctgttgaattttgttctctgggagaaaatcatcaagaagggctgcatgatgtttgcccaaaatttattttataagaaaaacttttttggttaaaaaaaagaataaaggtatgaaagggtt

SEQ ID NO: 3510 - DNA, 2486 bp, Homo sapiens
  source 1..2486: mol_type = genomic DNA
gttaacgcgcgctttgggaacaggaaggttgagagagaggtgctggggtctgcgtctatctctgtcgctcttttcagcccctcctggtattcccctcctaacctgggttttttacacgcccgcgtggcttcctgctcgacctccctgagtctgatcctggtttccacctccagccctgggaaatttcctttctccagactcgccctccccacccgggcctcggactttcaccccagcttctctctcctggccagtgattacccacccccaatcccaccccgccccgccgcgcaactacctcctcccttcacccggactgggaccatcatccccactccactccgcccagtctgggactccacctgcctcctaaccaatcaaccaccttgtctggacagcagtcagcatgaagcatttattcgaagcattttgtcaaagcctttcaaagtccccattccaaattatcaaggtcctctgggctctcgagcattgggcctgaaaagggctggggtccgccgggccctccatgaccccctggaaaaagatgccttggttctgtatgagcctcccccgctgagcgctcatgaccagctgaagcttgacaaggagaaactccctgtccatgtggttgttgaccctattctcagtaaggttttgcggcctcatcagagagagggagtgaaattcctgtgggagtgtgtcaccagtcggcgcatccctggcagccatggctgcatcatggctgatgagatgggcctaggaaagacgctgcagtgcatcacattgatgtggacacttttacgccagagtccagagtgcaagccagaaattgacaaggcagtggtggtgtcgccttccagcctggtgaagaactggtacaatgaggttgggaaatggctcggagggaggatccaacctctggccatcgatggaggatctaaggatgaaatagaccaaaagctggaaggattcatgaaccagcgtggagccagggtgtcttctcccatcctcatcatttcctatgagaccttccgccttcatgttggagtcctccagaaaggaagtgttggtctggtcatatgtgacgagggacacaggctcaagaactctgagaatcagacttaccaagccctggacagcttgaacaccagccggcgggtgctcatctccggaactcccatccagaatgatctgcttgagtatttcagcttggtacattttgttaattccggcatcctagggactgcccatgaattcaagaagcattttgaattgccaattttgaagggtcgagacgctgctgctagtgaggcagacaggcagctaggagaggagcggctgcgggagctcaccagcattgtgaatagatgcctgatacggaggacttctgatatcctttctaaatatctgcctgtgaagattgagcaggtcgtttgttgtaggctgacaccccttcagactgagttatacaagaggtttctgagacaagccaaaccggcagaagaattgcttgagggcaagatgagtgtgtcttccctttcttccatcacctcgctaaagaagctttgtaatcatccagctctaatctatgataagtgtgtggaagaggaggatggctttgtgggtgccttggacctcttccctcctggttacagctctaaggccctggagccccagctgtcaggtaagatgctggtcctggattatattctggcggtgacccgaagccgtagcagtgacaaagtagtgctggtgtcgaattacacccagactttggatctctttgagaagctgtgccgtgcccgaaggtacttatacgtccgcctggatggcacgatgtccattaagaagcgagccaaggttgtagaacgcttcaatagtccatcgagccctgactttgtcttcatgctgagcagcaaagctgggggctgtggcctcaatctcattggggctaaccggctggtcatgtttgaccctgactggaacccagccaatgatgaacaagccatggcccgggtctggcgagatggtcaaaagaagacttgctatatctaccgcctgctgtctgcagggaccattgaggagaagatcttccagcgtcagagccacaagaaggcactgagcagctgtgtggtggatgaggagcaggatgtagagcgccacttctctctgggcgagttgaaggagctgtttatcctggatgaagctagcctcagtgacacacatgacaggttgcactgccgacgttgtgtcaacagccgtcagatccggccaccccctgatggttctgactgcacttcagacctggcagggtggaaccactgcactgataagtgggggctccgggatgaggtactccaggctgcctgggatgctgcctccactgccatcaccttcgtcttccaccagcgttctcatgaggagcagcggggcctccgctgataaccagctggtctgggtgtagctcttagaggaaggagataggg

SEQ ID NO: 3511 - DNA, 2119 bp, Homo sapiens
  source 1..2119: mol_type = genomic DNA
gggccggcaggggcggtgcgcgggaagggaccccggacccggaggtcgcggagagctgggcagtgttggccgctggcggagcgctggggcagcatgaagtgcctggtcacgggcggcaacgtgaaggtgctcggcaaggccgtccactccctgtcccgcatcggggacgagctctacctggaacccttggaggacgggctctccctccggacggtgaactcctcccgctctgcctatgcctgctttctctttgccccgctcttcttccagcaataccaggcagccacccctggtcaggacctgctgcgctgtaagatcctgatgaagtctttcctgtctgtcttccgctcactggcgatgctggagaagacggtggaaaaatgctgcatctccctgaatggccggagcagccgcctggtggtccagctgcattgcaagttcggggtgcggaagactcacaacctgtccttccaggactgtgagtccctgcaggccgtcttcgacccagcctcgtgcccccacatgctccgcgccccagcacgggttctgggggaggctgttctgcccttctctcctgcactggctgaagtgacgctgggcattggccgtggccgcagggtcatcctgcgcagctaccacgaggaggaggcagacagcactgccaaagccatggtgactgagatgtgccttggagaggaggatttccagcagctgcaggcccaggaaggggtggccatcactttctgcctcaaggaattccgggggctcctgagctttgcagagtcagcaaacttgaatcttagcattcattttgatgctccaggcaggcccgccatcttcaccatcaaggactctttgctggacggccactttgtcttggccacactctcagacaccgactcgcactcccaggacctgggctccccagagcgtcaccagccagtgcctcagctccaggctcacagcacaccccacccggacgactttgccaatgacgacattgactcttacatgatcgccatggaaaccactataggcaatgagggctcgcgggtgctgccctccatttccctttcacctggcccccagccccccaagagccccggtccccactccgaggaggaagatgaggctgagcccagtacagtgcctgggactcccccacccaagaagttccgctcactgttcttcggctccatcctggcccctgtacgctccccccagggccccagccctgtgctggcggaagacagtgagggtgaaggctgaaccaagaacctgaagcctgtacccagaggccttggactagacgaagccccagccagtggcagaactgggtctctcagccctggggatcagaaaggtgggcttgctggagctgagctgtttcactgcctctcgcaggccccagctggctgtcactgtaaagctgtcccacagcggtcgggcctgggccgttatctccccacaacccccagccaatcaggactttccagacttggccctgaactactgacgttcctacctcttatttctcattgagcctcaggctatactccagctggccaaggctggaaacctgtctccctcaggctcaccttcctaaggaaaatgtcatagtaggtgctgctggcccctggtgatccagcttctctgccaatcatgacctgttccttcctgaagtcctgggcatgcatctgggacccccgtggagctgacaagttttccttgctttcctgatactctttggcgctgacttggaattctaagagccttggacccgagtgtgtggctagggttgccctggctggggcccggtgccgagactcccaagcggctctgtgcagaagagctgccaggcagtgtcttagatgtgagacggaggccatggcgagaatccagctttgacctttattcaagagaccagatgggttgccccaggatccggctgccagccctgaggccaagcacggctggagacccacgacctggcctgccgttgccctgagctgcagcctcggccccaggatcctgctcacagtcaccgcaggtgcaggcaggaagcagccctgggggactggacgctgctattgattcattaaaaaaagaaaagaaaaat

SEQ ID NO: 3512 - DNA, 4491 bp, Homo sapiens
  source 1..4491: mol_type = genomic DNA
agcggcggcgttggcgctcagtccgcggcgcgaggacggccggccggcagggggaggcgggggggcgccgggcagccccgccttttcccgcggaggcgccgagcggccatattgcggagctgtctgcggtggcggcggcgcctctcgtctcccgcgggccagcgctcgcaccaccgcttctccctccctgtcgcagccgcgccgccgcgcagcgccccagccacacgccggcgggcagaagccgcccgctctccggaaagtgataacagaattcattgaagtggagaatttttaaagaaggtaacaaaaagagaaagaaaatgccgaaaccaatcaacgtaagagtaactacaatggatgctgagctggaatttgccattcagcccaatacaactggcaaacaactttttgaccaggtggtgaaaacagttggtttgcgtgaggtctggttttttgggctgcagtatgtagacagcaaaggttattctacatggcttaaactaaataaaaaggtaacacagcaggatgttaaaaaagagaatcctttacagttcaagtttagagctaaattctttcctgaagatgtttctgaggaattaattcaagaaataacccagagactcttcttcttgcaagttaaagaagccatcttaaatgatgagatatattgcccgccagaaactgcagttcttttggcttcctatgctgtccaagccaagtatggagattacaataaagagattcataagccaggctacctggctaatgatagactcctaccccagcgtgtattggaacaacacaaactaacaaaagaacagtgggaagaaagaatacagaactggcatgaagaacatagaggaatgttaagggaggattctatgatggaatacctgaagattgcacaagatctagaaatgtatggagtcaactattttgaaataaaaaataaaaaaggaactgaattgtggctaggtgttgatgctttgggtctgaatatttatgagcatgacgacaagttaacacctaaaattggttttccctggagtgaaatcagaaatatttcatttaatgacaaaaaatttgttataaagccaatcgacaaaaaggcacctgattttgtgttttatgcacctcgtctgagaatcaataagcggattttggccttatgtatgggaaaccatgaactatacatgcgaagaaggaagcctgatactattgaagtacaacagatgaaggctcaggctagggaggagaaacatcagaagcagttggaaagggcacaattagagaatgaaaagaagaaaagagaaatagcagaaaaggaaaaggaaagaatagaacgtgaaaaggaagagctaatggaacgtctaaaacaaattgaagagcagacaattaaagctcagaaagaactagaagaacagactcgaaaagctctagaactggatcaagaacgaaaacgagcaaaagaagaagcagaacgacttgaaaaggagcgtcgagctgctgaagaggcaaagtctgccatagcaaaacaagctgccgaccagatgaagaatcaggagcagctagcagcagaacttgctgaattcactgccaagattgcacttctagaggaagccaagaagaaaaaggaagaggaagctactgagtggcaacacaaagcttttgcagcccaggaagacttggaaaagaccaaagaagagttaaaaactgtgatgtctgccccccctccacctccaccaccaccagtcattcctccaacagaaaacgaacatgatgaacacgatgagaataatgctgaagctagtgctgaattatcaaatgaaggggtaatgaaccatagaagcgaggaagaacgtgtaaccgaaacacagaaaaatgagcgtgttaagaagcaacttcaggcattaagttcagaattagcccaagccagagatgaaaccaagaaaacacaaaatgatgttcttcatgctgagaatgttaaagcaggccgtgataagtacaagactctgcgacagattcgacaaggcaatacaaagcagcgtatcgatgagtttgaagcaatgtgagagctgttattttgcatatatgttcttcataagctgaaccaccaacagagaaaagcaggcctttgcagatatgatggaatgcatcccaccttgccaaagcacttacaccagtttgactgtgctagctaaaagacaaatttaaggggagctcttcaacattaaggcagtatgatatcatgcttggttttcttttttcttttggtccagggaatggagaatggtgttccattgcctcttttcacattttttttctttttcttttttttttctgttgaagattaacactaattatcacgtctgacaaatgtgtatgtgtggtttcagttctgtgtacattttaaaggataatggtgaacattttaatgggtttcccttgccctttccatatttaacctatttccacattctctctcactcacattttctcagtgtgcccttctcttatctgccatgtccatagccataattccaccatcatacagatcaggcagtgtttaaaatgatggtaggtagcacagtggacagtctttgatcatcatgtagaatatggctatgaatcaggaaagagattagaacatttaataatgtatgtacagctggtgcttagtttttttttaatctaaatttaattaccttattggatatttgatatttggttatttaatcacagtcatctttaacagcttacactgattggtgttttatctcctgtgatcctttgatggctttttttgcctaccatttcacagaggtttagacagcagtagtagctccctaggagagtttactgatgaaacagcctctgcaagattttaaaagttttgttcttttatagactgatttagaaaaacaaatgattagttaaaaaaagaaaatatacatttgttggtaactaatgttattttttaaaacctggaccttttctggaagggcagcatataaaaacatcagtcccgaggaggggacaacaatactacctcactactacatctgtgatgactggttgttcaaacacaatggagtgtgtaaggtatatgttttataattcataaccatagcctcgatcatcaagaaatactttcgaaatttcattttccttcagaatatcttaagagtgctaaatttttaactgcctttttgtcgagtcaaactgtgggattctgatttgtattaaaattgtaagctcctcactggtatactatcatcctggaggggtgttgtatggctgagcaagagagagagagaatgagagagagactgtgtgtgtgtgtgtgtgtgtgtgtgtgtgtactctgtgtgtgtatgagagagagaaatgctaaccttgtagcatgtgaagaatgtctgtaccttgatacgatagttacataatcagtatatttggtttctagatcactgtgcttattttgtttcaatctctgactaaaaatacttaaatttggtttgttaattcttattttagaaattataattttagtttatattaatttcggttatagcttactgaagaaatctttccagttagaaggaggttctaatattcacatgttctaatactttgtttattgtaaaacagctaaatttggagatacgtaaagccttgttttctctgtgtggttcagctactttccatttggtattacacagtcaaatttacatttatctattaaaattgccattttattaaacattttcatgcacagtagattcaagttgtgtctgaaaatatctcttgtgcttttttgattttgctgactttaaaaggattaatctgggcagacattatgtaaaagaaaggttgcgtttaatatattttttgaactttgtaggacaaaacatagctggttaaccttgaagtgactgttgtaccatggttgtgcacatgcttcagaatcctatggaagagaatattcctacttgcagtacatcaaaggaatggatggtggaccctactattcatgttttgagacataaatgttcactttaaagcaattgcataatagataaaaacctgaactttcattggatttttgttaattttcctcattttgaattatgtgcactaccatagctacatcagtttgatacagtattgaaaaattatcagttatattttgctgtttatgatctatttgtagattaggattaaaatggatttaatccatttttaaggctgtgtgaatttttctaaacaagaaccatttgcaatatggatttcttagagattaaaccaattataacttattagcagtcgcgagcacatgttcatatagtcaatgtaaaaatacactaatgagtatttggtaaatcccagtaggcttttaccattagcataattttgtgttgtacaattaagttacaattacatctctaattttggataatattcattggttaacaataaagtgacaaaagctca

SEQ ID NO: 3513 - DNA, 2761 bp, Homo sapiens
  source 1..2761: mol_type = genomic DNA
ttggcgctcagtccgcggcgcgaggacggccggccggcagggggaggcgggggggcgccgggcagccccgccttttcccgcggaggcgccgagcggccatattgcggagctgtctgcggtggcggcggcgcctctcgtctcccgcgggccagcgctcgcaccaccgcttctccctccctgtcgcagccgcgccgccgcgcagcgccccagccacacgccggcgggcagaagccgcccgctctccggaaagtgataacagaattcattgaagtggagaatttttaaagaaggtaacaaaaagagaaagaaaatgccgaaaccaatcaacgtaagagtaactacaatggatgctgagctggaatttgccattcagcccaatacaactggcaaacaactttttgaccaggtggtgaaaacagttggtttgcgtgaggtctggttttttgggctgcagtatgtagacagcaaaggttattctacatggcttaaactaaataaaaaggtaacacagcaggatgttaaaaaagagaatcctttacagttcaagtttagagctaaattctttcctgaagatgtttctgaggaattaattcaagaaataacccagagactcttcttcttgcaagttaaagaagccatcttaaatgatgagatatattgcccgccagaaactgcagttcttttggcttcctatgctgtccaagccaagtatggagattacaataaagagattcataagccaggctacctggctaatgatagactcctaccccagcgtgtattggaacaacacaaactaacaaaagaacagtgggaagaaagaatacagaactggcatgaagaacatagaggaatgttaagggaggattctatgatggaatacctgaagattgcacaagatctagaaatgtatggagtcaactattttgaaataaaaaataaaaaaggaactgaattgtggctaggtgttgatgctttgggtctgaatatttatgagcatgacgacaagttaacacctaaaattggttttccctggagtgaaatcagaaatatttcatttaatgacaaaaaatttgttataaagccaatcgacaaaaaggcacctgattttgtgttttatgcacctcgtctgagaatcaataagcggattttggccttatgtatgggaaaccatgaactatacatgcgaagaaggaagcctgatactattgaagtacaacagatgaaggctcaggctagggaggagaaacatcagaagcagttggaaagggcacaattagagaatgaaaagaagaaaagagaaatagcagaaaaggaaaaggaaagaatagaacgtgaaaaggaagagctaatggaacgtctaaaacaaattgaagagcagacaattaaagctcagaaagaactagaagaacagactcgaaaagctctagaactggatcaagaacgaaaacgagcaaaagaagaagcagaacgacttgaaaaggagcgtcgagctgctgaagaggcaaagtctgccatagcaaaacaagctgccgaccagatgaagaatcaggagcagctagcagcagaacttgctgaattcactgccaagattgcacttctagaggaagccaagaagaaaaaggaagaggaagctactgagtggcaacacaaagcttttgcagcccaggaagacttggaaaagaccaaagaagagttaaaaactgtgatgtctgccccccctccacctccaccaccaccagtcattcctccaacagaaaacgaacatgatgaacacgatgagaataatgctgaagctagtgctgaattatcaaatgaaggggtaatgaaccatagaagcgaggaagaacgtgtaaccgaaacacagaaaaatgagcgtgttaagaagcaacttcaggcattaagttcagaattagcccaagccagagatgaaaccaagaaaacacaaaatgatgttcttcatgctgagaatgttaaagcaggccgtgataagtacaagactctgcgacagattcgacaaggcaatacaaagcagcgtatcgatgagtttgaagcaatgtggggacccaaactgtatgcattgttccagatgcgctcttgccaaagcagcataaagcaaatgtaacccttaggaagaaggctccctccctcactaggcccctggctactgacttatgggaagctttaggataaggacatacctggtgttctgaatgtgtatatcccccaaagtctgcaatctcagctggaactggatggaccagtattccattacccagggccctggctcatggttctctcctcttctcagtttactgttggatttccctttcttgctattctctttctctccagacccctctcaattgcctttcctaaagacagaccttagcaagatgggccaggacttgggacttcgcacagcaccctgcagtcccaagccagcatctactgcaccccatcttcaggactctatcccccaaacatgctggaaggcatcagcttatgagaacccacttttttctgcatgactagcttgtaaggaagaatctatggacaggatttccaagaatttcccactttttcaaaaaatgtatgtgacttatatttggcttcaatccaagagcaaactcagtggtgaacagctccatttctgtgcacatgttggtggaatctgcagaaatcgatgcaacatttctttcctgtctgggctgtttgtataattgtatataaatgtagcaataaatatattctaacatca

SEQ ID NO: 3514 - DNA, 1017 bp, Homo sapiens
  source 1..1017: mol_type = genomic DNA
ccacacccaaagatcaacgtaagagtaactacaatggatgctgagctggaatttgccattcagcccaatacaactggcaaacaactttttgaccaggtggtgaaaacagttggtttgcgtgaggtctggttttttgggctgcagtatgtagacagcaaaggttattctacatggcttaaactaaataaaaaggtaacacagcaggatgttaaaaaagagaatcctttacagttcaagtttagagctaaattctttcctgaagatgtttctgaggaattaattcaagaaataacccagagactcttcttcttgcaagttaaagaagccatcttaaatgatgagatatattgcccgccagaaactgcagttcttttggcttcctatgctgtccaagccaagtatggagattacaataaagagattcataagccaggctacctggctaatgatagactcctaccccagcgtgtattggaacaacacaaactaacaaaagaacagtgggaagaaagaatacagaactggcatgaagaacatagaggaatgttaagggaggattctatgatggaatacctgaagattgcacaagatctagaaatgtatggagtcaactattttgaaataaaaaataaaaaaggaactgaattgtggctaggtgttgatgctttgggtctgaatatttatgagcatgacgacaagttaacacctaaaattggttttccctggagtgaaatcagaaatatttcatttaatgacaaaaaatttgttataaagccaatcgacaaaaaggcacctgattttgtgttttatgcacctcgtctgagaatcaataagcggattttggccttatgtatgggaaaccatgaactatacatgcgaagaaggaagcctgatactattgaagtacaacagatgaaggctcaggctagggaggagaaacatcagaagcagttggaaaggagtaggctatctaaaataaaaaaaaaaaaaagaaaaaagaaaaagaaaaagaaaaag

SEQ ID NO: 3515 - DNA, 2511 bp, Homo sapiens
  source 1..2511: mol_type = genomic DNA
ttggcgctcagtccgcggcgcgaggacggccggccggcagggggaggcgggggggcgccgggcagccccgccttttcccgcggaggcgccgagcggccatattgcggagctgtctgcggtggcggcggcgcctctcgtctcccgcgggccagcgctcgcaccaccgcttctccctccctgtcgcagccgcgccgccgcgcagcgccccagccacacgccggcgggcagaagccgcccgctctccggaaagtgataacagaattcattgaagtggagaatttttaaagaaggtaacaaaaagagaaagaaaatgccgaaaccaatcaacgtaagagtaactacaatggatgctgagctggaatttgccattcagcccaatacaactggcaaacaactttttgaccaggtggtgaaaacagttggtttgcgtgaggtctggttttttgggctgcagtatgtagacagcaaaggttattctacatggcttaaactaaataaaaaggtaacacagcaggatgttaaaaaagagaatcctttacagttcaagtttagagctaaattctttcctgaagatgtttctgaggaattaattcaagaaataacccagagactcttcttcttgcaagttaaagaagccatcttaaatgatgagatatattgcccgccagaaactgcagttcttttggcttcctatgctgtccaagccaagtatggagattacaataaagagattcataagccaggctacctggctaatgatagactcctaccccagcgtgtattggaacaacacaaactaacaaaagaacagtgggaagaaagaatacagaactggcatgaagaacatagaggaatgttaagggaggattctatgatggaatacctgaagattgcacaagatctagaaatgtatggagtcaactattttgaaataaaaaataaaaaaggaactgaattgtggctaggtgttgatgctttgggtctgaatatttatgagcatgacgacaagttaacacctaaaattggttttccctggagtgaaatcagaaatatttcatttaatgacaaaaaatttgttataaagccaatcgacaaaaaggcacctgattttgtgttttatgcacctcgtctgagaatcaataagcggattttggccttatgtatgggaaaccatgaactatacatgcgaagaaggaagcctgatactattgaagtacaacagatgaaggctcaggctagggaggagaaacatcagaagcagttggaaagggcacaattagagaatgaaaagaagaaaagagaaatagcagaaaaggaaaaggaaagaatagaacgtgaaaaggaagagctaatggaacgtctaaaacaaattgaagagcagacaattaaagctcagaaagaactagaagaacagactcgaaaagctctagaactggatcaagaacgaaaacgagcaaaagaagaagcagaacgacttgaaaaggagcgtcgagctgctgaagaggcaaagtctgccatagcaaaacaagctgccgaccagatgaagaatcaggagcagctagcagcagaacttgctgaattcactgccaagattgcacttctagaggaagccaagaagaaaaaggaagaggaagctactgagtggcaacacaaagcttttgcagcccaggaagacttggaaaagaccaaagaagagttaaaaactgtgatgtctgccccccctccacctccaccaccaccagtcattcctccaacagaaaacgaacatgatgaacacgatgagaataatgctgaagctagtgctgaattatcaaatgaaggggtaatgaaccatagaagcgaggaagaacgtgtaaccgaaacacagaaaaatgagcgtgttaagaagcaacttcaggcattaagttcagaattagcccaagccagagatgaaaccaagaaaacacaaaatgatgttcttcatgctgagaatgttaaagcaggccgtgataagtacaagactctgcgacagattcgacaaggcaatacaaagcagcgtatcgatgagtttgaagcaatgtggggacccaaactgtatgcattgttccagatgcgctcttgccaaagcagcataaagcaaatgtaacccttaggaagaaggctccctccctcactagggctacaaagaatgctagagtggagacaagagtccagactctgaaataacctcctttggacacagaagctaccactgttgcttatcagacgcagcgggccctgggtttttctggggccttaagcagtgaaccctggtcagctggcctgagtcccaacccaagcccatcaccacaagcctcaagacaggaagatctcagtgaaacctttcctctaatccaagtgacatcattgtcgcaggtgtttgtacatgaaagcagagtgatgaaggtgtgtgggtccacggaagaagtaaaaatacagcactagttcatatttttcctagtctctccctgttcccaggtaaagttatagcat

SEQ ID NO: 3516 - DNA, 1814 bp, Homo sapiens
  source 1..1814: mol_type = genomic DNA
ttggcgctcagtccgcggcgcgaggacggccggccggcagggggaggcgggggggcgccgggcagccccgccttttcccgcggaggcgccgagcggccatattgcggagctgtctgcggtggcggcggcgcctctcgtctcccgcgggccagcgctcgcaccaccgcttctccctccctgtcgcagccgcgccgccgcgcagcgccccagccacacgccggcgggcagaagccgcccgctctccggaaagtgataacagaattcattgaagtggagaatttttaaagaaggtaacaaaaagagaaagaaaatgccgaaaccaggcacaattagagaatgaaaagaagaaaagagaaatagcagaaaaggaaaaggaaagaatagaacgtgaaaaggaagagctaatggaacgtctaaaacaaattgaagagcagacaattaaagctcagaaagaactagaagaacagactcgaaaagctctagaactggatcaagaacgaaaacgagcaaaagaagaagcagaacgacttgaaaaggagcgtcgagctgctgaagaggcaaagtctgccatagcaaaacaagctgccgaccagatgaagaatcaggagcagctagcagcagaacttgctgaattcactgccaagattgcacttctagaggaagccaagaagaaaaaggaagaggaagctactgagtggcaacacaaagcttttgcagcccaggaagacttggaaaagaccaaagaagagttaaaaactgtgatgtctgccccccctccacctccaccaccaccagtcattcctccaacagaaaacgaacatgatgaacacgatgagaataatgctgaagctagtgctgaattatcaaatgaaggggtaatgaaccatagaagcgaggaagaacgtgtaaccgaaacacagaaaaatgagcgtgttaagaagcaacttcaggcattaagttcagaattagcccaagccagagatgaaaccaagaaaacacaaaatgatgttcttcatgctgagaatgttaaagcaggccgtgataagtacaagactctgcgacagattcgacaaggcaatacaaagcagcgtatcgatgagtttgaagcaatgtggggacccaaactgtatgcattgttccagatgcgctcttgccaaagcagcataaagcaaatgtaacccttaggaagaaggctccctccctcactaggcccctggctactgacttatgggaagctttaggataaggacatacctggtgttctgaatgtgtatatcccccaaagtctgcaatctcagctggaactggatggaccagtattccattacccagggccctggctcatggttctctcctcttctcagtttactgttggatttccctttcttgctattctctttctctccagacccctctcaattgcctttcctaaagacagaccttagcaagatgggccaggacttgggacttcgcacagcaccctgcagtcccaagccagcatctactgcaccccatcttcaggactctatcccccaaacatgctggaaggcatcagcttatgagaacccacttttttctgcatgactagcttgtaaggaagaatctatggacaggatttccaagaatttcccactttttcaaaaaatgtatgtgacttatatttggcttcaatccaagagcaaactcagtggtgaacagctccatttctgtgcacatgttggtggaatctgcagaaatcgatgcaacatttctttcctgtctgggctgtttgtataattgtatataaatgtagcaataaatatattctaacatca

SEQ ID NO: 3517 - DNA, 793 bp, Homo sapiens
  source 1..793: mol_type = genomic DNA
ggcgggaggattgctcgagcccatgagttcgaggctgcagtgagcttctgcacttcagcctgggcaacagagcgagaccctgtctcaagaaaacaaagagaactagaagaacagactcgaaaagctctagaactggatcaagaacgaaaacgagcaaaagaagaagcagaacgacttgaaaaggagcgtcgagctgctgaagaggcaaagtctgccatagcaaaacaagctgccgaccagatgaagaatcaggagcagctagcagcagaacttgctgaattcactgccaagattgcacttctagaggaagccaagaagaaaaaggaagaggaagctactgagtggcaacacaaagcttttgcagcccaggaagacttggaaaagaccaaagaagagttaaaaactgtgatgtctgccccccctccacctccaccaccaccagtcattcctccaacagaaaacgaacatgatgaacacgatgagaataatgctgaagctagtgctgaattatcaaatgaaggggtaatgaaccatagaagcgaggaagaacgtgtaaccgaaacacagaaaaatgagcgtgttaagaagcaacttcaggcattaagttcagaattagcccaagccagagatgaaaccaagaaaacacaaaatgatgttcttcatgctgagaatgttaaagcaggccgtgataagtacaagactctgcgacagattcgacaaggcaatacaaagcagcgtatcgatgagtttgaagcaatgtgagagctgttattttgcatatatgttcttcata

SEQ ID NO: 3518 - DNA, 1549 bp, Homo sapiens
  source 1..1549: mol_type = genomic DNA
ttggcgctcagtccgcggcgcgaggacggccggccggcagggggaggcgggggggcgccgggcagccccgccttttcccgcggaggcgccgagcggccatattgcggagctgtctgcggtggcggcggcgcctctcgtctcccgcgggccagcgctcgcaccaccgcttctccctccctgtcgcagccgcgccgccgcgcagcgccccagccacacgccggcgggcagaagccgcccgctctccggaaagtgataacagaattcattgaagtggagaatttttaaagaaggtaacaaaaagagaaagaaaatgccgaaaccaatcaacgtaagagtaactacaatggatgctgagctggaatttgccattcagcccaatacaactggcaaacaactttttgaccaggtaacacagcaggatgttaaaaaagagaatcctttacagttcaagtttagagctaaattctttcctgaagatgtttctgaggaattaattcaagaaataacccagagactcttcttcttgcaagttaaagaagccatcttaaatgatgagatatattgcccgccagaaactgcagttcttttggcttcctatgctgtccaagccaagtatggagattacaataaagagattcataagccaggctacctggctaatgatagactcctaccccagcgtgtattggaacaacacaaactaacaaaagaacaagatgaaaccaagaaaacacaaaatgatgttcttcatgctgagaatgttaaagcaggccgtgataagtacaagactctgcgacagattcgacaaggcaatacaaagcagcgtatcgatgagtttgaagcaatgtggggacccaaactgtatgcattgttccagatgcgctcttgccaaagcagcataaagcaaatgtaacccttaggaagaaggctccctccctcactaggcccctggctactgacttatgggaagctttaggataaggacatacctggtgttctgaatgtgtatatcccccaaagtctgcaatctcagctggaactggatggaccagtattccattacccagggccctggctcatggttctctcctcttctcagtttactgttggatttccctttcttgctattctctttctctccagacccctctcaattgcctttcctaaagacagaccttagcaagatgggccaggacttgggacttcgcacagcaccctgcagtcccaagccagcatctactgcaccccatcttcaggactctatcccccaaacatgctggaaggcatcagcttatgagaacccacttttttctgcatgactagcttgtaaggaagaatctatggacaggatttccaagaatttcccactttttcaaaaaatgtatgtgacttatatttggcttcaatccaagagcaaactcagtggtgaacagctccatttctgtgcacatgttggtggaatctgcagaaatcgatgcaacatttctttcctgtctgggctgtttgtataattgtatataaatgtagcaataaatatattctaacatca

SEQ ID NO: 3519 - DNA, 2558 bp, Homo sapiens
  source 1..2558: mol_type = genomic DNA
ttggcgctcagtccgcggcgcgaggacggccggccggcagggggaggcgggggggcgccgggcagccccgccttttcccgcggaggcgccgagcggccatattgcggagctgtctgcggtggcggcggcgcctctcgtctcccgcgggccagcgctcgcaccaccgcttctccctccctgtcgcagccgcgccgccgcgcagcgccccagccacacgccggcgggcagaagccgcccgctctccggaaagtgataacagaattcattgaagtggagaatttttaaagaaggtaacaaaaagagaaagaaaatgccgaaaccaatcaacgtaagagtaactacaatggatgctgagctggaatttgccattcagcccaatacaactggcaaacaactttttgaccaggtggtgaaaacagttggtttgcgtgaggtctggttttttgggctgcagtatgtagacagcaaaggttattctacatggcttaaactaaataaaaaggtaacacagcaggatgttaaaaaagagaatcctttacagttcaagtttagagctaaattctttcctgaagatgtttctgaggaattaattcaagaaataacccagagactcttcttcttgcaagttaaagaagccatcttaaatgatgagatatattgcccgccagaaactgcagttcttttggcttcctatgctgtccaagccaagtatggagattacaataaagagattcataagccaggctacctggctaatgatagactcctaccccagcgtgtattggaacaacacaaactaacaaaagaacagtgggaagaaagaatacagaactggcatgaagaacatagaggaatgttaagggaggattctatgatggaatacctgaagattgcacaagatctagaaatgtatggagtcaactattttgaaataaaaaataaaaaaggaactgaattgtggctaggtgttgatgctttgggtctgaatatttatgagcatgacgacaagttaacacctaaaattggttttccctggagtgaaatcagaaatatttcatttaatgacaaaaaatttgttataaagccaatcgacaaaaaggcacctgattttgtgttttatgcacctcgtctgagaatcaataagcggattttggccttatgtatgggaaaccatgaactatacatgcgaagaaggaagcctgatactattgaagtacaacagatgaaggctcaggctagggaggagaaacatcagaagcagttggaaagggcacaattagagaatgaaaagaagaaaagagaaatagcagaaaaggaaaaggaaagaatagaacgtgaaaaggaagagctaatggaacgtctaaaacaaattgaagagcagacaattaaagctcagaaagaactagaagaacagactcgaaaagctctagaactggatcaagaacgaaaacgagcaaaagaagaagcagaacgacttgaaaaggagcgtcgagctgctgaagaggcaaagtctgccatagcaaaacaagctgccgaccagatgaagaatcaggagcagctagcagcagaacttgctgaattcactgccaagattgcacttctagaggaagccaagaagaaaaaggaagaggaagctactgagtggcaacacaaagcttttgcagcccaggaagacttggaaaagaccaaagaagagttaaaaactgtgatgtctgccccccctccacctccaccaccaccagtcattcctccaacagaaaacgaacatgatgaacacgatgagaataatgctgaagctagtgctgaattatcaaatgaaggggtaatgaaccatagaagcgaggaagaacgtgtaaccgaaacacagaaaaatgagcgtgttaagaagcaacttcaggcattaagttcagaattagcccaagccagagatgaaaccaagaaaacacaaaatgatgttcttcatgctgagaatgttaaagcaggccgtgataagtacaagactctgcgacagattcgacaaggcaatacaaagcagcgtatcgatgagtttgaagcaatgtggggacccaaactgtatgcattgttccagatgcgctcttgccaaagcagcataaagcaaatgtaacccttaggaagaaggctccctccctcactaggccactgctgcaggacagtgaagctgacttaaaatgcccctgccctgggctacaaagaatgctagagtggagacaagagtccagactctgaaataacctcctttggacacagaagctaccactgttgcttatcagacgcagcgggccctgggtttttctggggccttaagcagtgaaccctggtcagctggcctgagtcccaacccaagcccatcaccacaagcctcaagacaggaagatctcagtgaaacctttcctctaatccaagtgacatcattgtcgcaggtgtttgtacatgaaagcagagtgatgaaggtgtgtgggtccacggaagaagtaaaaatacagcactagttcatatttttcctagtctctccctgttcccaggtaaagttatagcat

SEQ ID NO: 3520 - DNA, 1725 bp, Homo sapiens
  source 1..1725: mol_type = genomic DNA
aagaaggtaacaaaaagagaaagaaaatgccgaaaccaatcaacgtaagagtaactacaatggatgctgagctggaatttgccattcagcccaatacaactggcaaacaactttttgaccagtgtattggaacaacacaaactaacaaaagaacagtgggaagaaagaatacagaactggcatgaagaacatagaggaatgttaagggaggattctatgatggaatacctgaagattgcacaagatctagaaatgtatggagtcaactattttgaaataaaaaataaaaaaggaactgaattgtggctaggtgttgatgctttgggtctgaatatttatgagcatgacgacaagttaacacctaaaattggttttccctggagtgaaatcagaaatatttcatttaatgacaaaaaatttgttataaagccaatcgacaaaaaggcacctgattttgtgttttatgcacctcgtctgagaatcaataagcggattttggccttatgtatgggaaaccatgaactatacatgcgaagaaggaagcctgatactattgaagtacaacagatgaaggctcaggctagggaggagaaacatcagaagcagttggaaagggcacaattagagaatgaaaagaagaaaagagaaatagcagaaaaggaaaaggaaagaatagaacgtgaaaaggaagagctaatggaacgtctaaaacaaattgaagagcagacaattaaagctcagaaagaactagaagaacagactcgaaaagctctagaactggatcaagaacgaaaacgagcaaaagaagaagcagaacgacttgaaaaggagcgtcgagctgctgaagaggcaaagtctgccatagcaaaacaagctgccgaccagatgaagaatcaggagcagctagcagcagaacttgctgaattcactgccaagattgcacttctagaggaagccaagaagaaaaaggaagaggaagctactgagtggcaacacaaagcttttgcagcccaggaagacttggaaaagaccaaagaagagttaaaaactgtgatgtctgccccccctccacctccaccaccaccagtcattcctccaacagaaaacgaacatgatgaacacgatgagaataatgctgaagctagtgctgaattatcaaatgaaggggtaatgaaccatagaagcgaggaagaacgtgtaaccgaaacacagaaaaatgagcgtgttaagaagcaacttcaggcattaagttcagaattagcccaagccagagatgaaaccaagaaaacacaaaatgatgttcttcatgctgagaatgttaaagcaggccgtgataagtacaagactctgcgacagattcgacaaggcaatacaaagcagcgtatcgatgagtttgaagcaatgtgagagctgttattttgcatatatgttcttcataagctgaaccaccaacagagaaaagcaggcctttgcagatatgatggaatgcatcccaccttgccaaagcacttacaccagtttgactgtgctagctaaaagacaaatttaaggggagctcttcaacattaaggcagtatgatatcatgcttggttttcttttttcttttggtccagggaatggagaatggtgttccattgcctcttttcacattttttttctttttcttttttttttctgttgaagattaacactaattatcacgtctgacaaatgtgtatgtgtgg

SEQ ID NO: 3521 - DNA, 6085 bp, Homo sapiens
  source 1..6085: mol_type = genomic DNA
ccttttctgggcaccgccttctgctagggggttgtagatgaaagtgcctgctcccagagaagcttgtctaacctagcacagtttctaagctacccaggctgccagaccgagcgaccgtgctgccatggacacagactctcagcgttctcatctctcttccttcaccatgaagctgatggacaaattccactcacccaaaatcaagagaacgccatcaaagaagggaaaaccagctgaggtgtccgtaaagattccagagaagcctgtgaacaaagaggcaacagacagatttctaccagagggctaccctctccccttggatctggagcagcaggcagtagaatttatgtccaccagtgctgtggcttccaggtctcaaaggcagaagaacctgagctggctggaggagaaagagaaggaagttgtcagtgccctgcgctactttaagaccattgtggacaaaatggcaattgataagaaggtactggagatgcttccagggtcagccagcaaggtgctggaggccatcttacccctggtgcagaacgatcctcgaattcagcacagctcagccctctcttcctgctatagccgagtgtaccaaagcctcgccaacctcattcgctggtctgaccaagtgatgctggaaggcgtgaactcagaagacaaggagatggtgacgactgtgaagggggtcatcaaggctgtgctggatggagtgaaggagctggtcaggctcaccatcgagaagcagggacgtccgtctccgacgagccccgtgaagcccagttcccctgccagcaagcctgatggcccagcagagctccccctgacagaccgcgaggtagagatcctaaacaagacgactgggatgtcacagtcaactgagctcctcccagatgccacggatgaagaggtcgcgccccccaagcctcctctgcctggcattcgggtggttgataatagtcctccaccagcattgccacccaagaaaagacagtcggcgccgtcccctacccgagtggctgtggtggcccccatgagccgagccaccagtggctccagtttgcctgttggaatcaataggcaggattttgatgttgactgttacgcacagaggcgactgtcaggaggcagccactcatatggtggagagtcgccccgcctctccccctgcagcagcataggcaagctcagcaagtcagacgagcagctgtcctctctggacagggacagtgggcagtgctcccggaacacaagctgtgaaacactagaccactatgatcccgactatgaattcctccagcaagacctctctaacgcagaccagatacctcagcagacggcctggaaccttagcccgttgccagagtctttgggggagtctgggtctccatttcttggccctcctttccagctgcctcttggcggccatccccagccagacggacctctggccccagggcagcagacagatacgccacctgctctccccgagaagaagcgcaggagcgcagcctcccagacggcggacggctctggctgcagggtgtcctacgagcggcatccctcgcagtatgacaacatctctggggaggacctgcagagcacagccccgatcccatccgtcccctacgcgccctttgctgctattctgccctttcagcatggaggttcctcagcccctgtcgaatttgtgggtgattttactgctcctgagtcaaccggtgacccagaaaaaccacctcctctaccagagaagaaaaacaaacacatgctggcctacatgcagttgctggaggactactcggagccgcagccctctatgttctaccagacgccacagaacgagcacatctaccagcagaagaacaagctcctcatggaggtatacggcttcagcgactccttcagtggggtggactccgtgcaggagctggccccgccgcccgccctaccccccaagcagcggcagctggagccaccggctgggaaagacggacatcccagagatccctcagcggtcagcggcgtccctgggaaggacagcagagacggcagtgagagggccccaaagtcaccagatgctctggagtcggctcagtcggaggaggaagtggacgagctgtccctcattgaccacaacgaaattatgtccaggctgacgctcaagcaggagggtgatgacgggccggacgtccgcggaggatctggggacatcttactggtccatgctactgagactgacaggaaagatttggtgttgtactgcgaggcattcctgaccacctacaggaccttcatctccccagaggagctcatcaagaagctgcagtacagatatgagaaattctctccctttgccgacacattcaagaagcgcgtcagcaagaacacgttcttcgtgctggtacgggtggtggatgagctctgcctggtggagttgacagaagagatcctgaagctgctgatggaactggtcttccgcctggtgtgcaatggggagctgagcctggcccgtgtgctccggaagaacatcctggacaaggtggaccagaagaagctactcaggtgtgccacctccagccagcccctggcagcccggggggtagcagccaggccggggaccttgcacgactttcacagccatgagatagcggagcagctaacgctgctggatgctgagctcttctataaaatagagattcctgaggttttgctttgggcaaaagagcagaatgaggagaagagccccaacttgacccagttcacggagcacttcaacaacatgtcctactgggtccggtccataatcatgttacaggaaaaggcccaggacagggaacggctgctcttgaagttcatcaagatcatgaagcacttgcggaagctgaataacttcaactcctacttggccatcctctctgccctggactcggcgcccatccgcaggctggagtggcagaagcagacttcagagggcctggccgagtactgcacactgatcgacagctcgtcctccttccgagcctaccgggccgccctctcggaggtggaaccgccgtgcatcccgtacctggggctgatcctgcaggacctgaccttcgttcacctgggaaacccagactacatcgacgggaaagtgaacttctccaagcggtggcagcagttcaacatcctcgacagcatgcgctgcttccagcaggcgcactatgacatgcggaggaacgacgacattataaacttcttcaatgacttcagtgaccacctggctgaggaggccctatgggaactgtctctgaaaattaaacccaggaacataacaaggagaaaaacagaccgggaagagaagacctaggagcagacgccgggatccaggagaatgctcgaggggcgcagagggcagctcccagaccggagaggaccttggacctgttaggcgcatggcaggagtcccggcctcggagccatgaggctggccagccctcagcggggccgggcgggagctggagcctgccagccgcttcctgcctccttcctctgtgggagcagacccgtgggcctcagggcagccagcaggcaggtcttgttgccaatttacaaaccggtggttttctggtttggttttgttttctgcttttacttccatctctcccctcttgaccttccacccactcccctccagggagagagcagcagagacctcatcagcagaccaaggaagtggtgggtgctccccctccctaagctccagggtccctgaatcttctgaaatctcaaatgagtggaggcctcctggggtggcctgtcctgcaggggccctggaatgggggcaagcagctgggtgggcagaatgcagagtagactcgggggaggatcctttcactttccgcttccccttctgatgcatggaggatggtgtgagcttttcagcaggcccggaaaggtacgcaggtgacgccttagcagccccgcagctggtgctctgccccgcggtactggcgccatcagggcctcccttgcccgcctgagagcagcagcagtctctgtcatcccgtcgccccttaccccccaccccaggccactgggcccctcccacaccacctggggagctgagaagaggaggctggagtaagggaggacttgatcatccaagaaatactttttattgctgggagtcttctgaacctcaccaaactgaggccagagctgagctcctgggggagttaattcagaggggagaggccagcacctccctcctccatcgctcgctgtgtgccttaaactccatctcatgtccctccccatcccctggctttccctccctccttgccccatcctgggccagccagcagggctcctcctctggctcttcagacctttcagccagtgctgtcagtgcccctgggagggaagggcatccctgaggcacccgaatggtccctcagggtgcagggaggcagaagcctggccacagaggagcctcctaaggcagcagctgcagcaagcgcaccctctccccactctccccacgccagagcggcttccagagcagatgctgtttccatcctcctcgtcaaaaccattctcgctgctgagcttgacaatctgggcaaggcttgtggggcgcttgacaaacagaatctgccctgtgccgcctggttccgtggcctccagcatgagcctgcaggcagggcgctgcgggaacccagttgtgctgccccagcccatgcctccgggtctgctgtgcatgaatgagtgctcacttgtcccgggtttaggacgtggtcaagtgaacagcagggtctaactgtgcttacttagcccagttcaaacagaacaaaggaaaaatatagaaagcaacatctgttgatcatttaggtttttttttaaaccaccatgtcactttgagtccttcatgggtttttgaacagcatttatcaagaagaaaatgtgggctttttcccctctcccgtgttttgtttgtcctgtagatagagggaggaaagccgtgcagtggcaggcgggaccccctctggtggcgggaccccctcttgcggtggtcttgcggggccagccgggacctgtcactttattatttaaggagtgtgtgtgtagagtcgctggcttattaacagtattgtgtgtgggttgggtttttagtttgttccttctttttgaagtcccttcatttcaatccttgactctctctccccttcccttgcccagctctgttgaatgctgctgtgcgcgtgtgagggccgctctgcacacagggcccttgggttgtgtgaactgaaattctccctgtatttgtgagactcgcaggagtccccatctgtagcacaggcaatgccagtgccatgctgcagcctcagaaaccaggcctctcactccagcagcaggcagaaccgtgtctgtggtcgggtgctgtccacagctctgtctgccttgttcttgggcttgagctggatagaggtggggtctcttcaccttccctgaattcagaacagaccctgtgcctggccccagtgtgcccaggcaattccccaggccctcactgggagcccttggtgttctgagcagcagggcccaggcagcacatgagcagtgcccaggggctccctgcgtgaggacggcaaggtgcgatgtatgtctaacttattgatggcaggcagccccctgtgccccctaagcctggccctggttattgctgagctctgtgctcagtgctgcggcctggccgtggctcgtctgttcctttggggggcccgggcgggttgtgggaatcagtcttcacagacagacgtgagccaggcggaggactcgttccttgcagaggtcagtcctcacctgcaggtgtcggggtgtgggggggcaaggaggggcaggcacacaccatgtctgacctgaacccgattctggggagcatcttcccgctccggccccacgacctccacagggttacattgtaatatatatgccccagctaacctgtctgatggtggcatcttcctgcagacatttcaaacatgtaacttttatatgaaaaaaaataaacacagatgaaagctgcccaatgcca

SEQ ID NO: 3522 - DNA, 6329 bp, Homo sapiens
  source 1..6329: mol_type = genomic DNA
gagattcctcaggcttcccttgtgaggctgcctgggttctgccgctgggtggtttgggatgtccaagagatatcccctttcagccagtgactcggtcctcagttgctgctccggaaagacgctggggctgggaagggccctgtgtcctctggctttaaaatgggcaatgctattgaaaaacagaagcccttgaaacgaagtcatctgtacccctggaaacaagactctcagcgttctcatctctcttccttcaccatgaagctgatggacaaattccactcacccaaaatcaagagaacgccatcaaagaagggaaaaccagctgaggtgtccgtaaagattccagagaagcctgtgaacaaagaggcaacagacagatttctaccagagggctaccctctccccttggatctggagcagcaggcagtagaatttatgtccaccagtgctgtggcttccaggtctcaaaggcagaagaacctgagctggctggaggagaaagagaaggaagttgtcagtgccctgcgctactttaagaccattgtggacaaaatggcaattgataagaaggtactggagatgcttccagggtcagccagcaaggtgctggaggccatcttacccctggtgcagaacgatcctcgaattcagcacagctcagccctctcttcctgctatagccgagtgtaccaaagcctcgccaacctcattcgctggtctgaccaagtgatgctggaaggcgtgaactcagaagacaaggagatggtgacgactgtgaagggggtcatcaaggctgtgctggatggagtgaaggagctggtcaggctcaccatcgagaagcagggacgtccgtctccgacgagccccgtgaagcccagttcccctgccagcaagcctgatggcccagcagagctccccctgacagaccgcgaggtagagatcctaaacaagacgactgggatgtcacagtcaactgagctcctcccagatgccacggatgaagaggtcgcgccccccaagcctcctctgcctggcattcgggtggttgataatagtcctccaccagcattgccacccaagaaaagacagtcggcgccgtcccctacccgagtggctgtggtggcccccatgagccgagccaccagtggctccagtttgcctgttggaatcaataggcaggattttgatgttgactgttacgcacagaggcgactgtcaggaggcagccactcatatggtggagagtcgccccgcctctccccctgcagcagcataggcaagctcagcaagtcagacgagcagctgtcctctctggacagggacagtgggcagtgctcccggaacacaagctgtgaaacactagaccactatgatcccgactatgaattcctccagcaagacctctctaacgcagaccagatacctcagcagacggcctggaaccttagcccgttgccagagtctttgggggagtctgggtctccatttcttggccctcctttccagctgcctcttggcggccatccccagccagacggacctctggccccagggcagcagacagatacgccacctgctctccccgagaagaagcgcaggagcgcagcctcccagacggcggacggctctggctgcagggtgtcctacgagcggcatccctcgcagtatgacaacatctctggggaggacctgcagagcacagccccgatcccatccgtcccctacgcgccctttgctgctattctgccctttcagcatggaggttcctcagcccctgtcgaatttgtgggtgattttactgctcctgagtcaaccggtgacccagaaaaaccacctcctctaccagagaagaaaaacaaacacatgctggcctacatgcagttgctggaggactactcggagccgcagccctctatgttctaccagacgccacagaacgagcacatctaccagcagaagaacaagctcctcatggaggtatacggcttcagcgactccttcagtggggtggactccgtgcaggagctggccccgccgcccgccctaccccccaagcagcggcagctggcctcctgtgctgcttcttccttctcctctgtctcccactgtgtccagcaaactaaagtggccttcacccccgaggacggcagtgccgctcagggcctcagtgtgtccgtctctaactcctttctcagccggcacggcagcttgcccgtgccctcggagccaccggctgggaaagacggacatcccagagatccctcagcggtcagcggcgtccctgggaaggacagcagagacggcagtgagagggccccaaagtcaccagatgctctggagtcggctcagtcggaggaggaagtggacgagctgtccctcattgaccacaacgaaattatgtccaggctgacgctcaagcaggagggtgatgacgggccggacgtccgcggaggatctggggacatcttactggtccatgctactgagactgacaggaaagatttggtgttgtactgcgaggcattcctgaccacctacaggaccttcatctccccagaggagctcatcaagaagctgcagtacagatatgagaaattctctccctttgccgacacattcaagaagcgcgtcagcaagaacacgttcttcgtgctggtacgggtggtggatgagctctgcctggtggagttgacagaagagatcctgaagctgctgatggaactggtcttccgcctggtgtgcaatggggagctgagcctggcccgtgtgctccggaagaacatcctggacaaggtggaccagaagaagctactcaggtgtgccacctccagccagcccctggcagcccggggggtagcagccaggccggggaccttgcacgactttcacagccatgagatagcggagcagctaacgctgctggatgctgagctcttctataaaatagagattcctgaggttttgctttgggcaaaagagcagaatgaggagaagagccccaacttgacccagttcacggagcacttcaacaacatgtcctactgggtccggtccataatcatgttacaggaaaaggcccaggacagggaacggctgctcttgaagttcatcaagatcatgaagcacttgcggaagctgaataacttcaactcctacttggccatcctctctgccctggactcggcgcccatccgcaggctggagtggcagaagcagacttcagagggcctggccgagtactgcacactgatcgacagctcgtcctccttccgagcctaccgggccgccctctcggaggtggaaccgccgtgcatcccgtacctggggctgatcctgcaggacctgaccttcgttcacctgggaaacccagactacatcgacgggaaagtgaacttctccaagcggtggcagcagttcaacatcctcgacagcatgcgctgcttccagcaggcgcactatgacatgcggaggaacgacgacattataaacttcttcaatgacttcagtgaccacctggctgaggaggccctatgggaactgtctctgaaaattaaacccaggaacataacaaggagaaaaacagaccgggaagagaagacctaggagcagacgccgggatccaggagaatgctcgaggggcgcagagggcagctcccagaccggagaggaccttggacctgttaggcgcatggcaggagtcccggcctcggagccatgaggctggccagccctcagcggggccgggcgggagctggagcctgccagccgcttcctgcctccttcctctgtgggagcagacccgtgggcctcagggcagccagcaggcaggtcttgttgccaatttacaaaccggtggttttctggtttggttttgttttctgcttttacttccatctctcccctcttgaccttccacccactcccctccagggagagagcagcagagacctcatcagcagaccaaggaagtggtgggtgctccccctccctaagctccagggtccctgaatcttctgaaatctcaaatgagtggaggcctcctggggtggcctgtcctgcaggggccctggaatgggggcaagcagctgggtgggcagaatgcagagtagactcgggggaggatcctttcactttccgcttccccttctgatgcatggaggatggtgtgagcttttcagcaggcccggaaaggtacgcaggtgacgccttagcagccccgcagctggtgctctgccccgcggtactggcgccatcagggcctcccttgcccgcctgagagcagcagcagtctctgtcatcccgtcgccccttaccccccaccccaggccactgggcccctcccacaccacctggggagctgagaagaggaggctggagtaagggaggacttgatcatccaagaaatactttttattgctgggagtcttctgaacctcaccaaactgaggccagagctgagctcctgggggagttaattcagaggggagaggccagcacctccctcctccatcgctcgctgtgtgccttaaactccatctcatgtccctccccatcccctggctttccctccctccttgccccatcctgggccagccagcagggctcctcctctggctcttcagacctttcagccagtgctgtcagtgcccctgggagggaagggcatccctgaggcacccgaatggtccctcagggtgcagggaggcagaagcctggccacagaggagcctcctaaggcagcagctgcagcaagcgcaccctctccccactctccccacgccagagcggcttccagagcagatgctgtttccatcctcctcgtcaaaaccattctcgctgctgagcttgacaatctgggcaaggcttgtggggcgcttgacaaacagaatctgccctgtgccgcctggttccgtggcctccagcatgagcctgcaggcagggcgctgcgggaacccagttgtgctgccccagcccatgcctccgggtctgctgtgcatgaatgagtgctcacttgtcccgggtttaggacgtggtcaagtgaacagcagggtctaactgtgcttacttagcccagttcaaacagaacaaaggaaaaatatagaaagcaacatctgttgatcatttaggtttttttttaaaccaccatgtcactttgagtccttcatgggtttttgaacagcatttatcaagaagaaaatgtgggctttttcccctctcccgtgttttgtttgtcctgtagatagagggaggaaagccgtgcagtggcaggcgggaccccctctggtggcgggaccccctcttgcggtggtcttgcggggccagccgggacctgtcactttattatttaaggagtgtgtgtgtagagtcgctggcttattaacagtattgtgtgtgggttgggtttttagtttgttccttctttttgaagtcccttcatttcaatccttgactctctctccccttcccttgcccagctctgttgaatgctgctgtgcgcgtgtgagggccgctctgcacacagggcccttgggttgtgtgaactgaaattctccctgtatttgtgagactcgcaggagtccccatctgtagcacaggcaatgccagtgccatgctgcagcctcagaaaccaggcctctcactccagcagcaggcagaaccgtgtctgtggtcgggtgctgtccacagctctgtctgccttgttcttgggcttgagctggatagaggtggggtctcttcaccttccctgaattcagaacagaccctgtgcctggccccagtgtgcccaggcaattccccaggccctcactgggagcccttggtgttctgagcagcagggcccaggcagcacatgagcagtgcccaggggctccctgcgtgaggacggcaaggtgcgatgtatgtctaacttattgatggcaggcagccccctgtgccccctaagcctggccctggttattgctgagctctgtgctcagtgctgcggcctggccgtggctcgtctgttcctttggggggcccgggcgggttgtgggaatcagtcttcacagacagacgtgagccaggcggaggactcgttccttgcagaggtcagtcctcacctgcaggtgtcggggtgtgggggggcaaggaggggcaggcacacaccatgtctgacctgaacccgattctggggagcatcttcccgctccggccccacgacctccacagggttacattgtaatatatatgccccagctaacctgtctgatggtggcatcttcctgcagacatttcaaacatgtaacttttatatgaaaaaaaataaacacagatgaaagctgcccaatgcc

SEQ ID NO: 3523 - DNA, 6019 bp, Homo sapiens
  source 1..6019: mol_type = genomic DNA
cccggcccgggcccgatgagcggcggcctcggcctccggcgcagcccggaaatgtccggcaagatcgagaaagcagactctcagcgttctcatctctcttccttcaccatgaagctgatggacaaattccactcacccaaaatcaagagaacgccatcaaagaagggaaaaccagctgaggtgtccgtaaagattccagagaagcctgtgaacaaagaggcaacagacagatttctaccagagggctaccctctccccttggatctggagcagcaggcagtagaatttatgtccaccagtgctgtggcttccaggtctcaaaggcagaagaacctgagctggctggaggagaaagagaaggaagttgtcagtgccctgcgctactttaagaccattgtggacaaaatggcaattgataagaaggtactggagatgcttccagggtcagccagcaaggtgctggaggccatcttacccctggtgcagaacgatcctcgaattcagcacagctcagccctctcttcctgctatagccgagtgtaccaaagcctcgccaacctcattcgctggtctgaccaagtgatgctggaaggcgtgaactcagaagacaaggagatggtgacgactgtgaagggggtcatcaaggctgtgctggatggagtgaaggagctggtcaggctcaccatcgagaagcagggacgtccgtctccgacgagccccgtgaagcccagttcccctgccagcaagcctgatggcccagcagagctccccctgacagaccgcgaggtagagatcctaaacaagacgactgggatgtcacagtcaactgagctcctcccagatgccacggatgaagaggtcgcgccccccaagcctcctctgcctggcattcgggtggttgataatagtcctccaccagcattgccacccaagaaaagacagtcggcgccgtcccctacccgagtggctgtggtggcccccatgagccgagccaccagtggctccagtttgcctgttggaatcaataggcaggattttgatgttgactgttacgcacagaggcgactgtcaggaggcagccactcatatggtggagagtcgccccgcctctccccctgcagcagcataggcaagctcagcaagtcagacgagcagctgtcctctctggacagggacagtgggcagtgctcccggaacacaagctgtgaaacactagaccactatgatcccgactatgaattcctccagcaagacctctctaacgcagaccagatacctcagcagacggcctggaaccttagcccgttgccagagtctttgggggagtctgggtctccatttcttggccctcctttccagctgcctcttggcggccatccccagccagacggacctctggccccagggcagcagacagatacgccacctgctctccccgagaagaagcgcaggagcgcagcctcccagacggcggacggctctggctgcagggtgtcctacgagcggcatccctcgcagtatgacaacatctctggggaggacctgcagagcacagccccgatcccatccgtcccctacgcgccctttgctgctattctgccctttcagcatggaggttcctcagcccctgtcgaatttgtgggtgattttactgctcctgagtcaaccggtgacccagaaaaaccacctcctctaccagagaagaaaaacaaacacatgctggcctacatgcagttgctggaggactactcggagccgcagccctctatgttctaccagacgccacagaacgagcacatctaccagcagaagaacaagctcctcatggaggtatacggcttcagcgactccttcagtggggtggactccgtgcaggagctggccccgccgcccgccctaccccccaagcagcggcagctggagccaccggctgggaaagacggacatcccagagatccctcagcggtcagcggcgtccctgggaaggacagcagagacggcagtgagagggccccaaagtcaccagatgctctggagtcggctcagtcggaggaggaagtggacgagctgtccctcattgaccacaacgaaattatgtccaggctgacgctcaagcaggagggtgatgacgggccggacgtccgcggaggatctggggacatcttactggtccatgctactgagactgacaggaaagatttggtgttgtactgcgaggcattcctgaccacctacaggaccttcatctccccagaggagctcatcaagaagctgcagtacagatatgagaaattctctccctttgccgacacattcaagaagcgcgtcagcaagaacacgttcttcgtgctggtacgggtggtggatgagctctgcctggtggagttgacagaagagatcctgaagctgctgatggaactggtcttccgcctggtgtgcaatggggagctgagcctggcccgtgtgctccggaagaacatcctggacaaggtggaccagaagaagctactcaggtgtgccacctccagccagcccctggcagcccggggggtagcagccaggccggggaccttgcacgactttcacagccatgagatagcggagcagctaacgctgctggatgctgagctcttctataaaatagagattcctgaggttttgctttgggcaaaagagcagaatgaggagaagagccccaacttgacccagttcacggagcacttcaacaacatgtcctactgggtccggtccataatcatgttacaggaaaaggcccaggacagggaacggctgctcttgaagttcatcaagatcatgaagcacttgcggaagctgaataacttcaactcctacttggccatcctctctgccctggactcggcgcccatccgcaggctggagtggcagaagcagacttcagagggcctggccgagtactgcacactgatcgacagctcgtcctccttccgagcctaccgggccgccctctcggaggtggaaccgccgtgcatcccgtacctggggctgatcctgcaggacctgaccttcgttcacctgggaaacccagactacatcgacgggaaagtgaacttctccaagcggtggcagcagttcaacatcctcgacagcatgcgctgcttccagcaggcgcactatgacatgcggaggaacgacgacattataaacttcttcaatgacttcagtgaccacctggctgaggaggccctatgggaactgtctctgaaaattaaacccaggaacataacaaggagaaaaacagaccgggaagagaagacctaggagcagacgccgggatccaggagaatgctcgaggggcgcagagggcagctcccagaccggagaggaccttggacctgttaggcgcatggcaggagtcccggcctcggagccatgaggctggccagccctcagcggggccgggcgggagctggagcctgccagccgcttcctgcctccttcctctgtgggagcagacccgtgggcctcagggcagccagcaggcaggtcttgttgccaatttacaaaccggtggttttctggtttggttttgttttctgcttttacttccatctctcccctcttgaccttccacccactcccctccagggagagagcagcagagacctcatcagcagaccaaggaagtggtgggtgctccccctccctaagctccagggtccctgaatcttctgaaatctcaaatgagtggaggcctcctggggtggcctgtcctgcaggggccctggaatgggggcaagcagctgggtgggcagaatgcagagtagactcgggggaggatcctttcactttccgcttccccttctgatgcatggaggatggtgtgagcttttcagcaggcccggaaaggtacgcaggtgacgccttagcagccccgcagctggtgctctgccccgcggtactggcgccatcagggcctcccttgcccgcctgagagcagcagcagtctctgtcatcccgtcgccccttaccccccaccccaggccactgggcccctcccacaccacctggggagctgagaagaggaggctggagtaagggaggacttgatcatccaagaaatactttttattgctgggagtcttctgaacctcaccaaactgaggccagagctgagctcctgggggagttaattcagaggggagaggccagcacctccctcctccatcgctcgctgtgtgccttaaactccatctcatgtccctccccatcccctggctttccctccctccttgccccatcctgggccagccagcagggctcctcctctggctcttcagacctttcagccagtgctgtcagtgcccctgggagggaagggcatccctgaggcacccgaatggtccctcagggtgcagggaggcagaagcctggccacagaggagcctcctaaggcagcagctgcagcaagcgcaccctctccccactctccccacgccagagcggcttccagagcagatgctgtttccatcctcctcgtcaaaaccattctcgctgctgagcttgacaatctgggcaaggcttgtggggcgcttgacaaacagaatctgccctgtgccgcctggttccgtggcctccagcatgagcctgcaggcagggcgctgcgggaacccagttgtgctgccccagcccatgcctccgggtctgctgtgcatgaatgagtgctcacttgtcccgggtttaggacgtggtcaagtgaacagcagggtctaactgtgcttacttagcccagttcaaacagaacaaaggaaaaatatagaaagcaacatctgttgatcatttaggtttttttttaaaccaccatgtcactttgagtccttcatgggtttttgaacagcatttatcaagaagaaaatgtgggctttttcccctctcccgtgttttgtttgtcctgtagatagagggaggaaagccgtgcagtggcaggcgggaccccctctggtggcgggaccccctcttgcggtggtcttgcggggccagccgggacctgtcactttattatttaaggagtgtgtgtgtagagtcgctggcttattaacagtattgtgtgtgggttgggtttttagtttgttccttctttttgaagtcccttcatttcaatccttgactctctctccccttcccttgcccagctctgttgaatgctgctgtgcgcgtgtgagggccgctctgcacacagggcccttgggttgtgtgaactgaaattctccctgtatttgtgagactcgcaggagtccccatctgtagcacaggcaatgccagtgccatgctgcagcctcagaaaccaggcctctcactccagcagcaggcagaaccgtgtctgtggtcgggtgctgtccacagctctgtctgccttgttcttgggcttgagctggatagaggtggggtctcttcaccttccctgaattcagaacagaccctgtgcctggccccagtgtgcccaggcaattccccaggccctcactgggagcccttggtgttctgagcagcagggcccaggcagcacatgagcagtgcccaggggctccctgcgtgaggacggcaaggtgcgatgtatgtctaacttattgatggcaggcagccccctgtgccccctaagcctggccctggttattgctgagctctgtgctcagtgctgcggcctggccgtggctcgtctgttcctttggggggcccgggcgggttgtgggaatcagtcttcacagacagacgtgagccaggcggaggactcgttccttgcagaggtcagtcctcacctgcaggtgtcggggtgtgggggggcaaggaggggcaggcacacaccatgtctgacctgaacccgattctggggagcatcttcccgctccggccccacgacctccacagggttacattgtaatatatatgccccagctaacctgtctgatggtggcatcttcctgcagacatttcaaacatgtaacttttatatgaaaaaaaataaacacagatgaaagctgcc

SEQ ID NO: 3524 - DNA, 6084 bp, Homo sapiens
  source 1..6084: mol_type = genomic DNA
ccttttctgggcaccgccttctgctagggggttgtagatgaaagtgcctgctcccagagaagcttgtctaacctagcacagtttctaagctacccaggctgccagaccgagcgaccgtgctgccatggacacagactctcagcgttctcatctctcttccttcaccatgaagctgatggacaaattccactcacccaaaatcaagagaacgccatcaaagaagggaaaaccagctgaggtgtccgtaaagattccagagaagcctgtgaacaaagaggcaacagacagatttctaccagagggctaccctctccccttggatctggagcagcaggcagtagaatttatgtccaccagtgctgtggcttccaggtctcaaaggcagaagaacctgagctggctggaggagaaagagaaggaagttgtcagtgccctgcgctactttaagaccattgtggacaaaatggcaattgataagaaggtactggagatgcttccagggtcagccagcaaggtgctggaggccatcttacccctggtgcagaacgatcctcgaattcagcacagctcagccctctcttcctgctatagccgagtgtaccaaagcctcgccaacctcattcgctggtctgaccaagtgatgctggaaggcgtgaactcagaagacaaggagatggtgacgactgtgaagggggtcatcaaggctgtgctggatggagtgaaggagctggtcaggctcaccatcgagaagcagggacgtccgtctccgacgagccccgtgaagcccagttcccctgccagcaagcctgatggcccagcagagctccccctgacagaccgcgaggtagagatcctaaacaagacgactgggatgtcacagtcaactgagctcctcccagatgccacggatgaagaggtcgcgccccccaagcctcctctgcctggcattcgggtggttgataatagtcctccaccagcattgccacccaagaaaagacagtcggcgccgtcccctacccgagtggctgtggtggcccccatgagccgagccaccagtggctccagtttgcctgttggaatcaataggcaggattttgatgttgactgttacgcacagaggcgactgtcaggaggcagccactcatatggtggagagtcgccccgcctctccccctgcagcagcataggcaagctcagcaagtcagacgagcagctgtcctctctggacagggacagtgggcagtgctcccggaacacaagctgtgaaacactagaccactatgatcccgactatgaattcctccagcaagacctctctaacgcagaccagatacctcagcagacggcctggaaccttagcccgttgccagagtctttgggggagtctgggtctccatttcttggccctcctttccagctgcctcttggcggccatccccagccagacggacctctggccccagggcagcagacagatacgccacctgctctccccgagaagaagcgcaggagcgcagcctcccagacggcggacggctctggctgcagggtgtcctacgagcggcatccctcgcagtatgacaacatctctggggaggacctgcagagcacagccccgatcccatccgtcccctacgcgccctttgctgctattctgccctttcagcatggaggttcctcagcccctgtcgaatttgtgggtgattttactgctcctgagtcaaccggtgacccagaaaaaccacctcctctaccagagaagaaaaacaaacacatgctggcctacatgcagttgctggaggactactcggagccgcagccctctatgttctaccagacgccacagaacgagcacatctaccagcagaagaacaagctcctcatggaggtatacggcttcagcgactccttcagtggggtggactccgtgcaggagctggccccgccgcccgccctaccccccaagcagcggcagctggagccaccggctgggaaagacggacatcccagagatccctcagcggtcagcggcgtccctgggaaggacagcagagacggcagtgagagggccccaaagtcaccagatgctctggagtcggctcagtcggaggaggaagtggacgagctgtccctcattgaccacaacgaaattatgtccaggctgacgctcaagcaggagggtgatgacgggccggacgtccgcggaggatctggggacatcttactggtccatgctactgagactgacaggaaagatttggtgttgtactgcgaggcattcctgaccacctacaggaccttcatctccccagaggagctcatcaagaagctgcagtacagatatgagaaattctctccctttgccgacacattcaagaagcgcgtcagcaagaacacgttcttcgtgctggtacgggtggtggatgagctctgcctggtggagttgacagaagagatcctgaagctgctgatggaactggtcttccgcctggtgtgcaatggggagctgagcctggcccgtgtgctccggaagaacatcctggacaaggtggaccagaagaagctactcaggtgtgccacctccagccagcccctggcagcccggggggtagcagccaggccggggaccttgcacgactttcacagccatgagatagcggagcagctaacgctgctggatgctgagctcttctataaaatagagattcctgaggttttgctttgggcaaaagagcagaatgaggagaagagccccaacttgacccagttcacggagcacttcaacaacatgtcctactgggtccggtccataatcatgttacaggaaaaggcccaggacagggaacggctgctcttgaagttcatcaagatcatgaagcacttgcggaagctgaataacttcaactcctacttggccatcctctctgccctggactcggcgcccatccgcaggctggagtggcagaagcagacttcagagggcctggccgagtactgcacactgatcgacagctcgtcctccttccgagcctaccgggccgccctctcggaggtggaaccgccgtgcatcccgtacctggggctgatcctgcaggacctgaccttcgttcacctgggaaacccagactacatcgacgggaaagtgaacttctccaagcggtggcagcagttcaacatcctcgacagcatgcgctgcttccagcaggcgcactatgacatgcggaggaacgacgacattataaacttcttcaatgacttcagtgaccacctggctgaggaggccctatgggaactgtctctgaaaattaaacccaggaacataacaaggagaaaaacagaccgggaagagaagacctaggagcagacgccgggatccaggagaatgctcgaggggcgcagagggcagctcccagaccggagaggaccttggacctgttaggcgcatggcaggagtcccggcctcggagccatgaggctggccagccctcagcggggccgggcgggagctggagcctgccagccgcttcctgcctccttcctctgtgggagcagacccgtgggcctcagggcagccagcaggcaggtcttgttgccaatttacaaaccggtggttttctggtttggttttgttttctgcttttacttccatctctcccctcttgaccttccacccactcccctccagggagagagcagcagagacctcatcagcagaccaaggaagtggtgggtgctccccctccctaagctccagggtccctgaatcttctgaaatctcaaatgagtggaggcctcctggggtggcctgtcctgcaggggccctggaatgggggcaagcagctgggtgggcagaatgcagagtagactcgggggaggatcctttcactttccgcttccccttctgatgcatggaggatggtgtgagcttttcagcaggcccggaaaggtacgcaggtgacgccttagcagccccgcagctggtgctctgccccgcggtactggcgccatcagggcctcccttgcccgcctgagagcagcagcagtctctgtcatcccgtcgccccttaccccccaccccaggccactgggcccctcccacaccacctggggagctgagaagaggaggctggagtaagggaggacttgatcatccaagaaatactttttattgctgggagtcttctgaacctcaccaaactgaggccagagctgagctcctgggggagttaattcagaggggagaggccagcacctccctcctccatcgctcgctgtgtgccttaaactccatctcatgtccctccccatcccctggctttccctccctccttgccccatcctgggccagccagcagggctcctcctctggctcttcagacctttcagccagtgctgtcagtgcccctgggagggaagggcatccctgaggcacccgaatggtccctcagggtgcagggaggcagaagcctggccacagaggagcctcctaaggcagcagctgcagcaagcgcaccctctccccactctccccacgccagagcggcttccagagcagatgctgtttccatcctcctcgtcaaaaccattctcgctgctgagcttgacaatctgggcaaggcttgtggggcgcttgacaaacagaatctgccctgtgccgcctggttccgtggcctccagcatgagcctgcaggcagggcgctgcgggaacccagttgtgctgccccagcccatgcctccgggtctgctgtgcatgaatgagtgctcacttgtcccgggtttaggacgtggtcaagtgaacagcagggtctaactgtgcttacttagcccagttcaaacagaacaaaggaaaaatatagaaagcaacatctgttgatcatttaggtttttttttaaaccaccatgtcactttgagtccttcatgggtttttgaacagcatttatcaagaagaaaatgtgggctttttcccctctcccgtgttttgtttgtcctgtagatagagggaggaaagccgtgcagtggcaggcgggaccccctctggtggcgggaccccctcttgcggtggtcttgcggggccagccgggacctgtcactttattatttaaggagtgtgtgtgtagagtcgctggcttattaacagtattgtgtgtgggttgggtttttagtttgttccttctttttgaagtcccttcatttcaatccttgactctctctccccttcccttgcccagctctgttgaatgctgctgtgcgcgtgtgagggccgctctgcacacagggcccttgggttgtgtgaactgaaattctccctgtatttgtgagactcgcaggagtccccatctgtagcacaggcaatgccagtgccatgctgcagcctcagaaaccaggcctctcactccagcagcaggcagaaccgtgtctgtggtcgggtgctgtccacagctctgtctgccttgttcttgggcttgagctggatagaggtggggtctcttcaccttccctgaattcagaacagaccctgtgcctggccccagtgtgcccaggcaattccccaggccctcactgggagcccttggtgttctgagcagcagggcccaggcagcacatgagcagtgcccaggggctccctgcgtgaggacggcaaggtgcgatgtatgtctaacttattgatggcaggcagccccctgtgccccctaagcctggccctggttattgctgagctctgtgctcagtgctgcggcctggccgtggctcgtctgttcctttggggggcccgggcgggttgtgggaatcagtcttcacagacagacgtgagccaggcggaggactcgttccttgcagaggtcagtcctcacctgcaggtgtcggggtgtgggggggcaaggaggggcaggcacacaccatgtctgacctgaacccgattctggggagcatcttcccgctccggccccacgacctccacagggttacattgtaatatatatgccccagctaacctgtctgatggtggcatcttcctgcagacatttcaaacatgtaacttttatatgaaaaaaaataaacacagatgaaagctgcccaatgcc

SEQ ID NO: 3525 - DNA, 6173 bp, Homo sapiens
  source 1..6173: mol_type = genomic DNA
gagattcctcaggcttcccttgtgaggctgcctgggttctgccgctgggtggtttgggatgtccaagagatatcccctttcagccagtgactcggtcctcagttgctgctccggaaagacgctggggctgggaagggccctgtgtcctctggctttaaaatgggcaatgctattgaaaaacagaagcccttgaaacgaagtcatctgtacccctggaaacaagactctcagcgttctcatctctcttccttcaccatgaagctgatggacaaattccactcacccaaaatcaagagaacgccatcaaagaagggaaaaccagctgaggtgtccgtaaagattccagagaagcctgtgaacaaagaggcaacagacagatttctaccagagggctaccctctccccttggatctggagcagcaggcagtagaatttatgtccaccagtgctgtggcttccaggtctcaaaggcagaagaacctgagctggctggaggagaaagagaaggaagttgtcagtgccctgcgctactttaagaccattgtggacaaaatggcaattgataagaaggtactggagatgcttccagggtcagccagcaaggtgctggaggccatcttacccctggtgcagaacgatcctcgaattcagcacagctcagccctctcttcctgctatagccgagtgtaccaaagcctcgccaacctcattcgctggtctgaccaagtgatgctggaaggcgtgaactcagaagacaaggagatggtgacgactgtgaagggggtcatcaaggctgtgctggatggagtgaaggagctggtcaggctcaccatcgagaagcagggacgtccgtctccgacgagccccgtgaagcccagttcccctgccagcaagcctgatggcccagcagagctccccctgacagaccgcgaggtagagatcctaaacaagacgactgggatgtcacagtcaactgagctcctcccagatgccacggatgaagaggtcgcgccccccaagcctcctctgcctggcattcgggtggttgataatagtcctccaccagcattgccacccaagaaaagacagtcggcgccgtcccctacccgagtggctgtggtggcccccatgagccgagccaccagtggctccagtttgcctgttggaatcaataggcaggattttgatgttgactgttacgcacagaggcgactgtcaggaggcagccactcatatggtggagagtcgccccgcctctccccctgcagcagcataggcaagctcagcaagtcagacgagcagctgtcctctctggacagggacagtgggcagtgctcccggaacacaagctgtgaaacactagaccactatgatcccgactatgaattcctccagcaagacctctctaacgcagaccagatacctcagcagacggcctggaaccttagcccgttgccagagtctttgggggagtctgggtctccatttcttggccctcctttccagctgcctcttggcggccatccccagccagacggacctctggccccagggcagcagacagatacgccacctgctctccccgagaagaagcgcaggagcgcagcctcccagacggcggacggctctggctgcagggtgtcctacgagcggcatccctcgcagtatgacaacatctctggggaggacctgcagagcacagccccgatcccatccgtcccctacgcgccctttgctgctattctgccctttcagcatggaggttcctcagcccctgtcgaatttgtgggtgattttactgctcctgagtcaaccggtgacccagaaaaaccacctcctctaccagagaagaaaaacaaacacatgctggcctacatgcagttgctggaggactactcggagccgcagccctctatgttctaccagacgccacagaacgagcacatctaccagcagaagaacaagctcctcatggaggtatacggcttcagcgactccttcagtggggtggactccgtgcaggagctggccccgccgcccgccctaccccccaagcagcggcagctggagccaccggctgggaaagacggacatcccagagatccctcagcggtcagcggcgtccctgggaaggacagcagagacggcagtgagagggccccaaagtcaccagatgctctggagtcggctcagtcggaggaggaagtggacgagctgtccctcattgaccacaacgaaattatgtccaggctgacgctcaagcaggagggtgatgacgggccggacgtccgcggaggatctggggacatcttactggtccatgctactgagactgacaggaaagatttggtgttgtactgcgaggcattcctgaccacctacaggaccttcatctccccagaggagctcatcaagaagctgcagtacagatatgagaaattctctccctttgccgacacattcaagaagcgcgtcagcaagaacacgttcttcgtgctggtacgggtggtggatgagctctgcctggtggagttgacagaagagatcctgaagctgctgatggaactggtcttccgcctggtgtgcaatggggagctgagcctggcccgtgtgctccggaagaacatcctggacaaggtggaccagaagaagctactcaggtgtgccacctccagccagcccctggcagcccggggggtagcagccaggccggggaccttgcacgactttcacagccatgagatagcggagcagctaacgctgctggatgctgagctcttctataaaatagagattcctgaggttttgctttgggcaaaagagcagaatgaggagaagagccccaacttgacccagttcacggagcacttcaacaacatgtcctactgggtccggtccataatcatgttacaggaaaaggcccaggacagggaacggctgctcttgaagttcatcaagatcatgaagcacttgcggaagctgaataacttcaactcctacttggccatcctctctgccctggactcggcgcccatccgcaggctggagtggcagaagcagacttcagagggcctggccgagtactgcacactgatcgacagctcgtcctccttccgagcctaccgggccgccctctcggaggtggaaccgccgtgcatcccgtacctggggctgatcctgcaggacctgaccttcgttcacctgggaaacccagactacatcgacgggaaagtgaacttctccaagcggtggcagcagttcaacatcctcgacagcatgcgctgcttccagcaggcgcactatgacatgcggaggaacgacgacattataaacttcttcaatgacttcagtgaccacctggctgaggaggccctatgggaactgtctctgaaaattaaacccaggaacataacaaggagaaaaacagaccgggaagagaagacctaggagcagacgccgggatccaggagaatgctcgaggggcgcagagggcagctcccagaccggagaggaccttggacctgttaggcgcatggcaggagtcccggcctcggagccatgaggctggccagccctcagcggggccgggcgggagctggagcctgccagccgcttcctgcctccttcctctgtgggagcagacccgtgggcctcagggcagccagcaggcaggtcttgttgccaatttacaaaccggtggttttctggtttggttttgttttctgcttttacttccatctctcccctcttgaccttccacccactcccctccagggagagagcagcagagacctcatcagcagaccaaggaagtggtgggtgctccccctccctaagctccagggtccctgaatcttctgaaatctcaaatgagtggaggcctcctggggtggcctgtcctgcaggggccctggaatgggggcaagcagctgggtgggcagaatgcagagtagactcgggggaggatcctttcactttccgcttccccttctgatgcatggaggatggtgtgagcttttcagcaggcccggaaaggtacgcaggtgacgccttagcagccccgcagctggtgctctgccccgcggtactggcgccatcagggcctcccttgcccgcctgagagcagcagcagtctctgtcatcccgtcgccccttaccccccaccccaggccactgggcccctcccacaccacctggggagctgagaagaggaggctggagtaagggaggacttgatcatccaagaaatactttttattgctgggagtcttctgaacctcaccaaactgaggccagagctgagctcctgggggagttaattcagaggggagaggccagcacctccctcctccatcgctcgctgtgtgccttaaactccatctcatgtccctccccatcccctggctttccctccctccttgccccatcctgggccagccagcagggctcctcctctggctcttcagacctttcagccagtgctgtcagtgcccctgggagggaagggcatccctgaggcacccgaatggtccctcagggtgcagggaggcagaagcctggccacagaggagcctcctaaggcagcagctgcagcaagcgcaccctctccccactctccccacgccagagcggcttccagagcagatgctgtttccatcctcctcgtcaaaaccattctcgctgctgagcttgacaatctgggcaaggcttgtggggcgcttgacaaacagaatctgccctgtgccgcctggttccgtggcctccagcatgagcctgcaggcagggcgctgcgggaacccagttgtgctgccccagcccatgcctccgggtctgctgtgcatgaatgagtgctcacttgtcccgggtttaggacgtggtcaagtgaacagcagggtctaactgtgcttacttagcccagttcaaacagaacaaaggaaaaatatagaaagcaacatctgttgatcatttaggtttttttttaaaccaccatgtcactttgagtccttcatgggtttttgaacagcatttatcaagaagaaaatgtgggctttttcccctctcccgtgttttgtttgtcctgtagatagagggaggaaagccgtgcagtggcaggcgggaccccctctggtggcgggaccccctcttgcggtggtcttgcggggccagccgggacctgtcactttattatttaaggagtgtgtgtgtagagtcgctggcttattaacagtattgtgtgtgggttgggtttttagtttgttccttctttttgaagtcccttcatttcaatccttgactctctctccccttcccttgcccagctctgttgaatgctgctgtgcgcgtgtgagggccgctctgcacacagggcccttgggttgtgtgaactgaaattctccctgtatttgtgagactcgcaggagtccccatctgtagcacaggcaatgccagtgccatgctgcagcctcagaaaccaggcctctcactccagcagcaggcagaaccgtgtctgtggtcgggtgctgtccacagctctgtctgccttgttcttgggcttgagctggatagaggtggggtctcttcaccttccctgaattcagaacagaccctgtgcctggccccagtgtgcccaggcaattccccaggccctcactgggagcccttggtgttctgagcagcagggcccaggcagcacatgagcagtgcccaggggctccctgcgtgaggacggcaaggtgcgatgtatgtctaacttattgatggcaggcagccccctgtgccccctaagcctggccctggttattgctgagctctgtgctcagtgctgcggcctggccgtggctcgtctgttcctttggggggcccgggcgggttgtgggaatcagtcttcacagacagacgtgagccaggcggaggactcgttccttgcagaggtcagtcctcacctgcaggtgtcggggtgtgggggggcaaggaggggcaggcacacaccatgtctgacctgaacccgattctggggagcatcttcccgctccggccccacgacctccacagggttacattgtaatatatatgccccagctaacctgtctgatggtggcatcttcctgcagacatttcaaacatgtaacttttatatgaaaaaaaataaacacagatgaaagctgcccaatgcc

SEQ ID NO: 3526 - DNA, 6590 bp, Homo sapiens
  source 1..6590: mol_type = genomic DNA
gagattcctcaggcttcccttgtgaggctgcctgggttctgccgctgggtggtttgggatgtccaagagatatcccctttcagccagtgactcggtcctcagttgctgctccggaaagacgctggggctgggaagggccctgtgtcctctggctttaaaatgggcaatgctattgaaaaacagaagcccttgaaacgaagtcatctgtacccctggaaacaagactctcagcgttctcatctctcttccttcaccatgaagctgatggacaaattccactcacccaaaatcaagagaacgccatcaaagaagggaaaaccagctgaggtgtccgtaaagattccagagaagcctgtgaacaaagaggcaacagacagatttctaccagagggctaccctctccccttggatctggagcagcaggcagtagaatttatgtccaccagtgctgtggcttccaggtctcaaaggcagaagaacctgagctggctggaggagaaagagaaggaagttgtcagtgccctgcgctactttaagaccattgtggacaaaatggcaattgataagaaggtactggagatgcttccagggtcagccagcaaggtgctggaggccatcttacccctggtgcagaacgatcctcgaattcagcacagctcagccctctcttcctgctatagccgagtgtaccaaagcctcgccaacctcattcgctggtctgaccaagtgatgctggaaggcgtgaactcagaagacaaggagatggtgacgactgtgaagggggtcatcaaggctgtgctggatggagtgaaggagctggtcaggctcaccatcgagaagcagggacgtccgtctccgacgagccccgtgaagcccagttcccctgccagcaagcctgatggcccagcagagctccccctgacagaccgcgaggtagagatcctaaacaagacgactgggatgtcacagtcaactgagctcctcccagatgccacggatgaagaggtcgcgccccccaagcctcctctgcctggcattcgggtggttgataatagtcctccaccagcattgccacccaagaaaagacagtcggcgccgtcccctacccgagtggctgtggtggcccccatgagccgagccaccagtggctccagtttgcctgttggaatcaataggcaggattttgatgttgactgttacgcacagaggcgactgtcaggaggcagccactcatatggtggagagtcgccccgcctctccccctgcagcagcataggcaagctcagcaagtcagacgagcagctgtcctctctggacagggacagtgggcagtgctcccggaacacaagctgtgaaacactagaccactatgatcccgactatgaattcctccagcaagacctctctaacgcagaccagatacctcagcagacggcctggaaccttagcccgttgccagagtctttgggggagtctgggtctccatttcttggccctcctttccagctgcctcttggcggccatccccagccagacggacctctggccccagggcagcagacagatacgccacctgctctccccgagaagaagcgcaggagcgcagcctcccagacggcggacggctctggctgcagggtgtcctacgagcggcatccctcgcagtatgacaacatctctggggaggacctgcagagcacagccccgatcccatccgtcccctacgcgccctttgctgctattctgccctttcagcatggaggttcctcagcccctgtcgaatttgtgggtgattttactgctcctgagtcaaccggtgacccagaaaaaccacctcctctaccagagaagaaaaacaaacacatgctggcctacatgcagttgctggaggactactcggagccgcagccctctatgttctaccagacgccacagaacgagcacatctaccagcagaagaacaagctcctcatggaggtatacggcttcagcgactccttcagtggggtggactccgtgcaggagctggccccgccgcccgccctaccccccaagcagcggcagctgcaggcctcctgtgctgcttcttccttctcctctgtctcccactgtgtccagcaaactaaagtggccttcacccccgaggacggcagtgccgctcagggcctcagtgtgtccgtctctaactcctttctcagccggcacggcagcttgcccgtgccctcgtataagtctgtgtttaggtcctactcccaggatttcgtgcctcaccaccaagcttccgttccgcctttccttccgcctacctcctcttcctctccacatttcccacctgcccaccagtctcagagctctgacttagccgtgccaaccatggccggtccacctcccagcaccgtggacgggcctctctcggcttctcaggagagcagctttcatgggaatactgtctgccttccttccgaaacctctttcactgactcggagccaccggctgggaaagacggacatcccagagatccctcagcggtcagcggcgtccctgggaaggacagcagagacggcagtgagagggccccaaagtcaccagatgctctggagtcggctcagtcggaggaggaagtggacgagctgtccctcattgaccacaacgaaattatgtccaggctgacgctcaagcaggagggtgatgacgggccggacgtccgcggaggatctggggacatcttactggtccatgctactgagactgacaggaaagatttggtgttgtactgcgaggcattcctgaccacctacaggaccttcatctccccagaggagctcatcaagaagctgcagtacagatatgagaaattctctccctttgccgacacattcaagaagcgcgtcagcaagaacacgttcttcgtgctggtacgggtggtggatgagctctgcctggtggagttgacagaagagatcctgaagctgctgatggaactggtcttccgcctggtgtgcaatggggagctgagcctggcccgtgtgctccggaagaacatcctggacaaggtggaccagaagaagctactcaggtgtgccacctccagccagcccctggcagcccggggggtagcagccaggccggggaccttgcacgactttcacagccatgagatagcggagcagctaacgctgctggatgctgagctcttctataaaatagagattcctgaggttttgctttgggcaaaagagcagaatgaggagaagagccccaacttgacccagttcacggagcacttcaacaacatgtcctactgggtccggtccataatcatgttacaggaaaaggcccaggacagggaacggctgctcttgaagttcatcaagatcatgaagcacttgcggaagctgaataacttcaactcctacttggccatcctctctgccctggactcggcgcccatccgcaggctggagtggcagaagcagacttcagagggcctggccgagtactgcacactgatcgacagctcgtcctccttccgagcctaccgggccgccctctcggaggtggaaccgccgtgcatcccgtacctggggctgatcctgcaggacctgaccttcgttcacctgggaaacccagactacatcgacgggaaagtgaacttctccaagcggtggcagcagttcaacatcctcgacagcatgcgctgcttccagcaggcgcactatgacatgcggaggaacgacgacattataaacttcttcaatgacttcagtgaccacctggctgaggaggccctatgggaactgtctctgaaaattaaacccaggaacataacaaggagaaaaacagaccgggaagagaagacctaggagcagacgccgggatccaggagaatgctcgaggggcgcagagggcagctcccagaccggagaggaccttggacctgttaggcgcatggcaggagtcccggcctcggagccatgaggctggccagccctcagcggggccgggcgggagctggagcctgccagccgcttcctgcctccttcctctgtgggagcagacccgtgggcctcagggcagccagcaggcaggtcttgttgccaatttacaaaccggtggttttctggtttggttttgttttctgcttttacttccatctctcccctcttgaccttccacccactcccctccagggagagagcagcagagacctcatcagcagaccaaggaagtggtgggtgctccccctccctaagctccagggtccctgaatcttctgaaatctcaaatgagtggaggcctcctggggtggcctgtcctgcaggggccctggaatgggggcaagcagctgggtgggcagaatgcagagtagactcgggggaggatcctttcactttccgcttccccttctgatgcatggaggatggtgtgagcttttcagcaggcccggaaaggtacgcaggtgacgccttagcagccccgcagctggtgctctgccccgcggtactggcgccatcagggcctcccttgcccgcctgagagcagcagcagtctctgtcatcccgtcgccccttaccccccaccccaggccactgggcccctcccacaccacctggggagctgagaagaggaggctggagtaagggaggacttgatcatccaagaaatactttttattgctgggagtcttctgaacctcaccaaactgaggccagagctgagctcctgggggagttaattcagaggggagaggccagcacctccctcctccatcgctcgctgtgtgccttaaactccatctcatgtccctccccatcccctggctttccctccctccttgccccatcctgggccagccagcagggctcctcctctggctcttcagacctttcagccagtgctgtcagtgcccctgggagggaagggcatccctgaggcacccgaatggtccctcagggtgcagggaggcagaagcctggccacagaggagcctcctaaggcagcagctgcagcaagcgcaccctctccccactctccccacgccagagcggcttccagagcagatgctgtttccatcctcctcgtcaaaaccattctcgctgctgagcttgacaatctgggcaaggcttgtggggcgcttgacaaacagaatctgccctgtgccgcctggttccgtggcctccagcatgagcctgcaggcagggcgctgcgggaacccagttgtgctgccccagcccatgcctccgggtctgctgtgcatgaatgagtgctcacttgtcccgggtttaggacgtggtcaagtgaacagcagggtctaactgtgcttacttagcccagttcaaacagaacaaaggaaaaatatagaaagcaacatctgttgatcatttaggtttttttttaaaccaccatgtcactttgagtccttcatgggtttttgaacagcatttatcaagaagaaaatgtgggctttttcccctctcccgtgttttgtttgtcctgtagatagagggaggaaagccgtgcagtggcaggcgggaccccctctggtggcgggaccccctcttgcggtggtcttgcggggccagccgggacctgtcactttattatttaaggagtgtgtgtgtagagtcgctggcttattaacagtattgtgtgtgggttgggtttttagtttgttccttctttttgaagtcccttcatttcaatccttgactctctctccccttcccttgcccagctctgttgaatgctgctgtgcgcgtgtgagggccgctctgcacacagggcccttgggttgtgtgaactgaaattctccctgtatttgtgagactcgcaggagtccccatctgtagcacaggcaatgccagtgccatgctgcagcctcagaaaccaggcctctcactccagcagcaggcagaaccgtgtctgtggtcgggtgctgtccacagctctgtctgccttgttcttgggcttgagctggatagaggtggggtctcttcaccttccctgaattcagaacagaccctgtgcctggccccagtgtgcccaggcaattccccaggccctcactgggagcccttggtgttctgagcagcagggcccaggcagcacatgagcagtgcccaggggctccctgcgtgaggacggcaaggtgcgatgtatgtctaacttattgatggcaggcagccccctgtgccccctaagcctggccctggttattgctgagctctgtgctcagtgctgcggcctggccgtggctcgtctgttcctttggggggcccgggcgggttgtgggaatcagtcttcacagacagacgtgagccaggcggaggactcgttccttgcagaggtcagtcctcacctgcaggtgtcggggtgtgggggggcaaggaggggcaggcacacaccatgtctgacctgaacccgattctggggagcatcttcccgctccggccccacgacctccacagggttacattgtaatatatatgccccagctaacctgtctgatggtggcatcttcctgcagacatttcaaacatgtaacttttatatgaaaaaaaataaacacagatgaaagctgcccaatgcc

SEQ ID NO: 3527 - DNA, 6256 bp, Homo sapiens
  source 1..6256: mol_type = genomic DNA
cgctgcgctgcggccggctcgcgggccgggggagcggcggcgggcgcgcgggaggcggagcggcggcggcgggcgcggcgggagcggctgggcccgggcgggctggagcgcggtcgccgagcgcagggccgcggccgcgcggagcccgccatgccggcgcgggtctgaggcgtggcgagccagggccgaggcgagcggcgggcgcgccgcccctgtcgccccgcggcggcccggcccgggcccgatgagcggcggcctcggcctccggcgcagcccggaaatgtccggcaagatcgagaaagcagactctcagcgttctcatctctcttccttcaccatgaagctgatggacaaattccactcacccaaaatcaagagaacgccatcaaagaagggaaaaccagctgaggtgtccgtaaagattccagagaagcctgtgaacaaagaggcaacagacagatttctaccagagggctaccctctccccttggatctggagcagcaggcagtagaatttatgtccaccagtgctgtggcttccaggtctcaaaggcagaagaacctgagctggctggaggagaaagagaaggaagttgtcagtgccctgcgctactttaagaccattgtggacaaaatggcaattgataagaaggtactggagatgcttccagggtcagccagcaaggtgctggaggccatcttacccctggtgcagaacgatcctcgaattcagcacagctcagccctctcttcctgctatagccgagtgtaccaaagcctcgccaacctcattcgctggtctgaccaagtgatgctggaaggcgtgaactcagaagacaaggagatggtgacgactgtgaagggggtcatcaaggctgtgctggatggagtgaaggagctggtcaggctcaccatcgagaagcagggacgtccgtctccgacgagccccgtgaagcccagttcccctgccagcaagcctgatggcccagcagagctccccctgacagaccgcgaggtagagatcctaaacaagacgactgggatgtcacagtcaactgagctcctcccagatgccacggatgaagaggtcgcgccccccaagcctcctctgcctggcattcgggtggttgataatagtcctccaccagcattgccacccaagaaaagacagtcggcgccgtcccctacccgagtggctgtggtggcccccatgagccgagccaccagtggctccagtttgcctgttggaatcaataggcaggattttgatgttgactgttacgcacagaggcgactgtcaggaggcagccactcatatggtggagagtcgccccgcctctccccctgcagcagcataggcaagctcagcaagtcagacgagcagctgtcctctctggacagggacagtgggcagtgctcccggaacacaagctgtgaaacactagaccactatgatcccgactatgaattcctccagcaagacctctctaacgcagaccagatacctcagcagacggcctggaaccttagcccgttgccagagtctttgggggagtctgggtctccatttcttggccctcctttccagctgcctcttggcggccatccccagccagacggacctctggccccagggcagcagacagatacgccacctgctctccccgagaagaagcgcaggagcgcagcctcccagacggcggacggctctggctgcagggtgtcctacgagcggcatccctcgcagtatgacaacatctctggggaggacctgcagagcacagccccgatcccatccgtcccctacgcgccctttgctgctattctgccctttcagcatggaggttcctcagcccctgtcgaatttgtgggtgattttactgctcctgagtcaaccggtgacccagaaaaaccacctcctctaccagagaagaaaaacaaacacatgctggcctacatgcagttgctggaggactactcggagccgcagccctctatgttctaccagacgccacagaacgagcacatctaccagcagaagaacaagctcctcatggaggtatacggcttcagcgactccttcagtggggtggactccgtgcaggagctggccccgccgcccgccctaccccccaagcagcggcagctggagccaccggctgggaaagacggacatcccagagatccctcagcggtcagcggcgtccctgggaaggacagcagagacggcagtgagagggccccaaagtcaccagatgctctggagtcggctcagtcggaggaggaagtggacgagctgtccctcattgaccacaacgaaattatgtccaggctgacgctcaagcaggagggtgatgacgggccggacgtccgcggaggatctggggacatcttactggtccatgctactgagactgacaggaaagatttggtgttgtactgcgaggcattcctgaccacctacaggaccttcatctccccagaggagctcatcaagaagctgcagtacagatatgagaaattctctccctttgccgacacattcaagaagcgcgtcagcaagaacacgttcttcgtgctggtacgggtggtggatgagctctgcctggtggagttgacagaagagatcctgaagctgctgatggaactggtcttccgcctggtgtgcaatggggagctgagcctggcccgtgtgctccggaagaacatcctggacaaggtggaccagaagaagctactcaggtgtgccacctccagccagcccctggcagcccggggggtagcagccaggccggggaccttgcacgactttcacagccatgagatagcggagcagctaacgctgctggatgctgagctcttctataaaatagagattcctgaggttttgctttgggcaaaagagcagaatgaggagaagagccccaacttgacccagttcacggagcacttcaacaacatgtcctactgggtccggtccataatcatgttacaggaaaaggcccaggacagggaacggctgctcttgaagttcatcaagatcatgaagcacttgcggaagctgaataacttcaactcctacttggccatcctctctgccctggactcggcgcccatccgcaggctggagtggcagaagcagacttcagagggcctggccgagtactgcacactgatcgacagctcgtcctccttccgagcctaccgggccgccctctcggaggtggaaccgccgtgcatcccgtacctggggctgatcctgcaggacctgaccttcgttcacctgggaaacccagactacatcgacgggaaagtgaacttctccaagcggtggcagcagttcaacatcctcgacagcatgcgctgcttccagcaggcgcactatgacatgcggaggaacgacgacattataaacttcttcaatgacttcagtgaccacctggctgaggaggccctatgggaactgtctctgaaaattaaacccaggaacataacaaggagaaaaacagaccgggaagagaagacctaggagcagacgccgggatccaggagaatgctcgaggggcgcagagggcagctcccagaccggagaggaccttggacctgttaggcgcatggcaggagtcccggcctcggagccatgaggctggccagccctcagcggggccgggcgggagctggagcctgccagccgcttcctgcctccttcctctgtgggagcagacccgtgggcctcagggcagccagcaggcaggtcttgttgccaatttacaaaccggtggttttctggtttggttttgttttctgcttttacttccatctctcccctcttgaccttccacccactcccctccagggagagagcagcagagacctcatcagcagaccaaggaagtggtgggtgctccccctccctaagctccagggtccctgaatcttctgaaatctcaaatgagtggaggcctcctggggtggcctgtcctgcaggggccctggaatgggggcaagcagctgggtgggcagaatgcagagtagactcgggggaggatcctttcactttccgcttccccttctgatgcatggaggatggtgtgagcttttcagcaggcccggaaaggtacgcaggtgacgccttagcagccccgcagctggtgctctgccccgcggtactggcgccatcagggcctcccttgcccgcctgagagcagcagcagtctctgtcatcccgtcgccccttaccccccaccccaggccactgggcccctcccacaccacctggggagctgagaagaggaggctggagtaagggaggacttgatcatccaagaaatactttttattgctgggagtcttctgaacctcaccaaactgaggccagagctgagctcctgggggagttaattcagaggggagaggccagcacctccctcctccatcgctcgctgtgtgccttaaactccatctcatgtccctccccatcccctggctttccctccctccttgccccatcctgggccagccagcagggctcctcctctggctcttcagacctttcagccagtgctgtcagtgcccctgggagggaagggcatccctgaggcacccgaatggtccctcagggtgcagggaggcagaagcctggccacagaggagcctcctaaggcagcagctgcagcaagcgcaccctctccccactctccccacgccagagcggcttccagagcagatgctgtttccatcctcctcgtcaaaaccattctcgctgctgagcttgacaatctgggcaaggcttgtggggcgcttgacaaacagaatctgccctgtgccgcctggttccgtggcctccagcatgagcctgcaggcagggcgctgcgggaacccagttgtgctgccccagcccatgcctccgggtctgctgtgcatgaatgagtgctcacttgtcccgggtttaggacgtggtcaagtgaacagcagggtctaactgtgcttacttagcccagttcaaacagaacaaaggaaaaatatagaaagcaacatctgttgatcatttaggtttttttttaaaccaccatgtcactttgagtccttcatgggtttttgaacagcatttatcaagaagaaaatgtgggctttttcccctctcccgtgttttgtttgtcctgtagatagagggaggaaagccgtgcagtggcaggcgggaccccctctggtggcgggaccccctcttgcggtggtcttgcggggccagccgggacctgtcactttattatttaaggagtgtgtgtgtagagtcgctggcttattaacagtattgtgtgtgggttgggtttttagtttgttccttctttttgaagtcccttcatttcaatccttgactctctctccccttcccttgcccagctctgttgaatgctgctgtgcgcgtgtgagggccgctctgcacacagggcccttgggttgtgtgaactgaaattctccctgtatttgtgagactcgcaggagtccccatctgtagcacaggcaatgccagtgccatgctgcagcctcagaaaccaggcctctcactccagcagcaggcagaaccgtgtctgtggtcgggtgctgtccacagctctgtctgccttgttcttgggcttgagctggatagaggtggggtctcttcaccttccctgaattcagaacagaccctgtgcctggccccagtgtgcccaggcaattccccaggccctcactgggagcccttggtgttctgagcagcagggcccaggcagcacatgagcagtgcccaggggctccctgcgtgaggacggcaaggtgcgatgtatgtctaacttattgatggcaggcagccccctgtgccccctaagcctggccctggttattgctgagctctgtgctcagtgctgcggcctggccgtggctcgtctgttcctttggggggcccgggcgggttgtgggaatcagtcttcacagacagacgtgagccaggcggaggactcgttccttgcagaggtcagtcctcacctgcaggtgtcggggtgtgggggggcaaggaggggcaggcacacaccatgtctgacctgaacccgattctggggagcatcttcccgctccggccccacgacctccacagggttacattgtaatatatatgccccagctaacctgtctgatggtggcatcttcctgcagacatttcaaacatgtaacttttatatgaaaaaaaataaacacagatgaaagctgcccaatgcca

SEQ ID NO: 3528 - DNA, 6266 bp, Homo sapiens
  source 1..6266: mol_type = genomic DNA
gagattcctcaggcttcccttgtgaggctgcctgggttctgccgctgggtggtttgggatgtccaagagatatcccctttcagccagtgactcggtcctcagttgctgctccggaaagacgctggggctgggaagggccctgtgtcctctggctttaaaatgggcaatgctattgaaaaacagaagcccttgaaacgaagtcatctgtacccctggaaacaagactctcagcgttctcatctctcttccttcaccatgaagctgatggacaaattccactcacccaaaatcaagagaacgccatcaaagaagggaaaaccagctgaggtgtccgtaaagattccagagaagcctgtgaacaaagaggcaacagacagatttctaccagagggctaccctctccccttggatctggagcagcaggcagtagaatttatgtccaccagtgctgtggcttccaggtctcaaaggcagaagaacctgagctggctggaggagaaagagaaggaagttgtcagtgccctgcgctactttaagaccattgtggacaaaatggcaattgataagaaggtactggagatgcttccagggtcagccagcaaggtgctggaggccatcttacccctggtgcagaacgatcctcgaattcagcacagctcagccctctcttcctgctatagccgagtgtaccaaagcctcgccaacctcattcgctggtctgaccaagtgatgctggaaggcgtgaactcagaagacaaggagatggtgacgactgtgaagggggtcatcaaggctgtgctggatggagtgaaggagctggtcaggctcaccatcgagaagcagggacgtccgtctccgacgagccccgtgaagcccagttcccctgccagcaagcctgatggcccagcagagctccccctgacagaccgcgaggtagagatcctaaacaagacgactgggatgtcacagtcaactgagctcctcccagatgccacggatgaagaggtcgcgccccccaagcctcctctgcctggcattcgggtggttgataatagtcctccaccagcattgccacccaagaaaagacagtcggcgccgtcccctacccgagtggctgtggtggcccccatgagccgagccaccagtggctccagtttgcctgttggaatcaataggcaggattttgatgttgactgttacgcacagaggcgactgtcaggaggcagccactcatatggtggagagtcgccccgcctctccccctgcagcagcataggcaagctcagcaagtcagacgagcagctgtcctctctggacagggacagtgggcagtgctcccggaacacaagctgtgaaacactagaccactatgatcccgactatgaattcctccagcaagacctctctaacgcagaccagatacctcagcagacggcctggaaccttagcccgttgccagagtctttgggggagtctgggtctccatttcttggccctcctttccagctgcctcttggcggccatccccagccagacggacctctggccccagggcagcagacagatacgccacctgctctccccgagaagaagcgcaggagcgcagcctcccagacggcggacggctctggctgcagggtgtcctacgagcggcatccctcgcagtatgacaacatctctggggaggacctgcagagcacagccccgatcccatccgtcccctacgcgccctttgctgctattctgccctttcagcatggaggttcctcagcccctgtcgaatttgtgggtgattttactgctcctgagtcaaccggtgacccagaaaaaccacctcctctaccagagaagaaaaacaaacacatgctggcctacatgcagttgctggaggactactcggagccgcagccctctatgttctaccagacgccacagaacgagcacatctaccagcagaagaacaagctcctcatggaggtatacggcttcagcgactccttcagtggggtggactccgtgcaggagctggccccgccgcccgccctaccccccaagcagcggcagctgagtgaaaacgccagtgaggaagctggtgagggtgaatatgtcaatctgtattcctctggccagagcagcgaggagctggctccctctcgaggagagccaccggctgggaaagacggacatcccagagatccctcagcggtcagcggcgtccctgggaaggacagcagagacggcagtgagagggccccaaagtcaccagatgctctggagtcggctcagtcggaggaggaagtggacgagctgtccctcattgaccacaacgaaattatgtccaggctgacgctcaagcaggagggtgatgacgggccggacgtccgcggaggatctggggacatcttactggtccatgctactgagactgacaggaaagatttggtgttgtactgcgaggcattcctgaccacctacaggaccttcatctccccagaggagctcatcaagaagctgcagtacagatatgagaaattctctccctttgccgacacattcaagaagcgcgtcagcaagaacacgttcttcgtgctggtacgggtggtggatgagctctgcctggtggagttgacagaagagatcctgaagctgctgatggaactggtcttccgcctggtgtgcaatggggagctgagcctggcccgtgtgctccggaagaacatcctggacaaggtggaccagaagaagctactcaggtgtgccacctccagccagcccctggcagcccggggggtagcagccaggccggggaccttgcacgactttcacagccatgagatagcggagcagctaacgctgctggatgctgagctcttctataaaatagagattcctgaggttttgctttgggcaaaagagcagaatgaggagaagagccccaacttgacccagttcacggagcacttcaacaacatgtcctactgggtccggtccataatcatgttacaggaaaaggcccaggacagggaacggctgctcttgaagttcatcaagatcatgaagcacttgcggaagctgaataacttcaactcctacttggccatcctctctgccctggactcggcgcccatccgcaggctggagtggcagaagcagacttcagagggcctggccgagtactgcacactgatcgacagctcgtcctccttccgagcctaccgggccgccctctcggaggtggaaccgccgtgcatcccgtacctggggctgatcctgcaggacctgaccttcgttcacctgggaaacccagactacatcgacgggaaagtgaacttctccaagcggtggcagcagttcaacatcctcgacagcatgcgctgcttccagcaggcgcactatgacatgcggaggaacgacgacattataaacttcttcaatgacttcagtgaccacctggctgaggaggccctatgggaactgtctctgaaaattaaacccaggaacataacaaggagaaaaacagaccgggaagagaagacctaggagcagacgccgggatccaggagaatgctcgaggggcgcagagggcagctcccagaccggagaggaccttggacctgttaggcgcatggcaggagtcccggcctcggagccatgaggctggccagccctcagcggggccgggcgggagctggagcctgccagccgcttcctgcctccttcctctgtgggagcagacccgtgggcctcagggcagccagcaggcaggtcttgttgccaatttacaaaccggtggttttctggtttggttttgttttctgcttttacttccatctctcccctcttgaccttccacccactcccctccagggagagagcagcagagacctcatcagcagaccaaggaagtggtgggtgctccccctccctaagctccagggtccctgaatcttctgaaatctcaaatgagtggaggcctcctggggtggcctgtcctgcaggggccctggaatgggggcaagcagctgggtgggcagaatgcagagtagactcgggggaggatcctttcactttccgcttccccttctgatgcatggaggatggtgtgagcttttcagcaggcccggaaaggtacgcaggtgacgccttagcagccccgcagctggtgctctgccccgcggtactggcgccatcagggcctcccttgcccgcctgagagcagcagcagtctctgtcatcccgtcgccccttaccccccaccccaggccactgggcccctcccacaccacctggggagctgagaagaggaggctggagtaagggaggacttgatcatccaagaaatactttttattgctgggagtcttctgaacctcaccaaactgaggccagagctgagctcctgggggagttaattcagaggggagaggccagcacctccctcctccatcgctcgctgtgtgccttaaactccatctcatgtccctccccatcccctggctttccctccctccttgccccatcctgggccagccagcagggctcctcctctggctcttcagacctttcagccagtgctgtcagtgcccctgggagggaagggcatccctgaggcacccgaatggtccctcagggtgcagggaggcagaagcctggccacagaggagcctcctaaggcagcagctgcagcaagcgcaccctctccccactctccccacgccagagcggcttccagagcagatgctgtttccatcctcctcgtcaaaaccattctcgctgctgagcttgacaatctgggcaaggcttgtggggcgcttgacaaacagaatctgccctgtgccgcctggttccgtggcctccagcatgagcctgcaggcagggcgctgcgggaacccagttgtgctgccccagcccatgcctccgggtctgctgtgcatgaatgagtgctcacttgtcccgggtttaggacgtggtcaagtgaacagcagggtctaactgtgcttacttagcccagttcaaacagaacaaaggaaaaatatagaaagcaacatctgttgatcatttaggtttttttttaaaccaccatgtcactttgagtccttcatgggtttttgaacagcatttatcaagaagaaaatgtgggctttttcccctctcccgtgttttgtttgtcctgtagatagagggaggaaagccgtgcagtggcaggcgggaccccctctggtggcgggaccccctcttgcggtggtcttgcggggccagccgggacctgtcactttattatttaaggagtgtgtgtgtagagtcgctggcttattaacagtattgtgtgtgggttgggtttttagtttgttccttctttttgaagtcccttcatttcaatccttgactctctctccccttcccttgcccagctctgttgaatgctgctgtgcgcgtgtgagggccgctctgcacacagggcccttgggttgtgtgaactgaaattctccctgtatttgtgagactcgcaggagtccccatctgtagcacaggcaatgccagtgccatgctgcagcctcagaaaccaggcctctcactccagcagcaggcagaaccgtgtctgtggtcgggtgctgtccacagctctgtctgccttgttcttgggcttgagctggatagaggtggggtctcttcaccttccctgaattcagaacagaccctgtgcctggccccagtgtgcccaggcaattccccaggccctcactgggagcccttggtgttctgagcagcagggcccaggcagcacatgagcagtgcccaggggctccctgcgtgaggacggcaaggtgcgatgtatgtctaacttattgatggcaggcagccccctgtgccccctaagcctggccctggttattgctgagctctgtgctcagtgctgcggcctggccgtggctcgtctgttcctttggggggcccgggcgggttgtgggaatcagtcttcacagacagacgtgagccaggcggaggactcgttccttgcagaggtcagtcctcacctgcaggtgtcggggtgtgggggggcaaggaggggcaggcacacaccatgtctgacctgaacccgattctggggagcatcttcccgctccggccccacgacctccacagggttacattgtaatatatatgccccagctaacctgtctgatggtggcatcttcctgcagacatttcaaacatgtaacttttatatgaaaaaaaataaacacagatgaaagctgcccaatgcc

SEQ ID NO: 3529 - DNA, 6059 bp, Homo sapiens
  source 1..6059: mol_type = genomic DNA
gagattcctcaggcttcccttgtgaggctgcctgggttctgccgctgggtggtttgggatgtccaagagatatcccctttcagccagtgactcggtcctcagttgctgctccggaaagacgctggggctgggaagggccctgtgtcctctggctttaaaatgggcaatgctattgaaaaacagaagcccttgaaacgaagtcatctgtacccctggaaacaagactctcagcgttctcatctctcttccttcaccatgaagctgatggacaaattccactcacccaaaatcaagagaacgccatcaaagaagggaaaaccagctgaggtgtccgtaaagattccagagaagcctgtgaacaaaaacctgagctggctggaggagaaagagaaggaagttgtcagtgccctgcgctactttaagaccattgtggacaaaatggcaattgataagaaggtactggagatgcttccagggtcagccagcaaggtgctggaggccatcttacccctggtgcagaacgatcctcgaattcagcacagctcagccctctcttcctgctatagccgagtgtaccaaagcctcgccaacctcattcgctggtctgaccaagtgatgctggaaggcgtgaactcagaagacaaggagatggtgacgactgtgaagggggtcatcaaggctgtgctggatggagtgaaggagctggtcaggctcaccatcgagaagcagggacgtccgtctccgacgagccccgtgaagcccagttcccctgccagcaagcctgatggcccagcagagctccccctgacagaccgcgaggtagagatcctaaacaagacgactgggatgtcacagtcaactgagctcctcccagatgccacggatgaagaggtcgcgccccccaagcctcctctgcctggcattcgggtggttgataatagtcctccaccagcattgccacccaagaaaagacagtcggcgccgtcccctacccgagtggctgtggtggcccccatgagccgagccaccagtggctccagtttgcctgttggaatcaataggcaggattttgatgttgactgttacgcacagaggcgactgtcaggaggcagccactcatatggtggagagtcgccccgcctctccccctgcagcagcataggcaagctcagcaagtcagacgagcagctgtcctctctggacagggacagtgggcagtgctcccggaacacaagctgtgaaacactagaccactatgatcccgactatgaattcctccagcaagacctctctaacgcagaccagatacctcagcagacggcctggaaccttagcccgttgccagagtctttgggggagtctgggtctccatttcttggccctcctttccagctgcctcttggcggccatccccagccagacggacctctggccccagggcagcagacagatacgccacctgctctccccgagaagaagcgcaggagcgcagcctcccagacggcggacggctctggctgcagggtgtcctacgagcggcatccctcgcagtatgacaacatctctggggaggacctgcagagcacagccccgatcccatccgtcccctacgcgccctttgctgctattctgccctttcagcatggaggttcctcagcccctgtcgaatttgtgggtgattttactgctcctgagtcaaccggtgacccagaaaaaccacctcctctaccagagaagaaaaacaaacacatgctggcctacatgcagttgctggaggactactcggagccgcagccctctatgttctaccagacgccacagaacgagcacatctaccagcagaagaacaagctcctcatggaggtatacggcttcagcgactccttcagtggggtggactccgtgcaggagctggccccgccgcccgccctaccccccaagcagcggcagctggagccaccggctgggaaagacggacatcccagagatccctcagcggtcagcggcgtccctgggaaggacagcagagacggcagtgagagggccccaaagtcaccagatgctctggagtcggctcagtcggaggaggaagtggacgagctgtccctcattgaccacaacgaaattatgtccaggctgacgctcaagcaggagggtgatgacgggccggacgtccgcggaggatctggggacatcttactggtccatgctactgagactgacaggaaagatttggtgttgtactgcgaggcattcctgaccacctacaggaccttcatctccccagaggagctcatcaagaagctgcagtacagatatgagaaattctctccctttgccgacacattcaagaagcgcgtcagcaagaacacgttcttcgtgctggtacgggtggtggatgagctctgcctggtggagttgacagaagagatcctgaagctgctgatggaactggtcttccgcctggtgtgcaatggggagctgagcctggcccgtgtgctccggaagaacatcctggacaaggtggaccagaagaagctactcaggtgtgccacctccagccagcccctggcagcccggggggtagcagccaggccggggaccttgcacgactttcacagccatgagatagcggagcagctaacgctgctggatgctgagctcttctataaaatagagattcctgaggttttgctttgggcaaaagagcagaatgaggagaagagccccaacttgacccagttcacggagcacttcaacaacatgtcctactgggtccggtccataatcatgttacaggaaaaggcccaggacagggaacggctgctcttgaagttcatcaagatcatgaagcacttgcggaagctgaataacttcaactcctacttggccatcctctctgccctggactcggcgcccatccgcaggctggagtggcagaagcagacttcagagggcctggccgagtactgcacactgatcgacagctcgtcctccttccgagcctaccgggccgccctctcggaggtggaaccgccgtgcatcccgtacctggggctgatcctgcaggacctgaccttcgttcacctgggaaacccagactacatcgacgggaaagtgaacttctccaagcggtggcagcagttcaacatcctcgacagcatgcgctgcttccagcaggcgcactatgacatgcggaggaacgacgacattataaacttcttcaatgacttcagtgaccacctggctgaggaggccctatgggaactgtctctgaaaattaaacccaggaacataacaaggagaaaaacagaccgggaagagaagacctaggagcagacgccgggatccaggagaatgctcgaggggcgcagagggcagctcccagaccggagaggaccttggacctgttaggcgcatggcaggagtcccggcctcggagccatgaggctggccagccctcagcggggccgggcgggagctggagcctgccagccgcttcctgcctccttcctctgtgggagcagacccgtgggcctcagggcagccagcaggcaggtcttgttgccaatttacaaaccggtggttttctggtttggttttgttttctgcttttacttccatctctcccctcttgaccttccacccactcccctccagggagagagcagcagagacctcatcagcagaccaaggaagtggtgggtgctccccctccctaagctccagggtccctgaatcttctgaaatctcaaatgagtggaggcctcctggggtggcctgtcctgcaggggccctggaatgggggcaagcagctgggtgggcagaatgcagagtagactcgggggaggatcctttcactttccgcttccccttctgatgcatggaggatggtgtgagcttttcagcaggcccggaaaggtacgcaggtgacgccttagcagccccgcagctggtgctctgccccgcggtactggcgccatcagggcctcccttgcccgcctgagagcagcagcagtctctgtcatcccgtcgccccttaccccccaccccaggccactgggcccctcccacaccacctggggagctgagaagaggaggctggagtaagggaggacttgatcatccaagaaatactttttattgctgggagtcttctgaacctcaccaaactgaggccagagctgagctcctgggggagttaattcagaggggagaggccagcacctccctcctccatcgctcgctgtgtgccttaaactccatctcatgtccctccccatcccctggctttccctccctccttgccccatcctgggccagccagcagggctcctcctctggctcttcagacctttcagccagtgctgtcagtgcccctgggagggaagggcatccctgaggcacccgaatggtccctcagggtgcagggaggcagaagcctggccacagaggagcctcctaaggcagcagctgcagcaagcgcaccctctccccactctccccacgccagagcggcttccagagcagatgctgtttccatcctcctcgtcaaaaccattctcgctgctgagcttgacaatctgggcaaggcttgtggggcgcttgacaaacagaatctgccctgtgccgcctggttccgtggcctccagcatgagcctgcaggcagggcgctgcgggaacccagttgtgctgccccagcccatgcctccgggtctgctgtgcatgaatgagtgctcacttgtcccgggtttaggacgtggtcaagtgaacagcagggtctaactgtgcttacttagcccagttcaaacagaacaaaggaaaaatatagaaagcaacatctgttgatcatttaggtttttttttaaaccaccatgtcactttgagtccttcatgggtttttgaacagcatttatcaagaagaaaatgtgggctttttcccctctcccgtgttttgtttgtcctgtagatagagggaggaaagccgtgcagtggcaggcgggaccccctctggtggcgggaccccctcttgcggtggtcttgcggggccagccgggacctgtcactttattatttaaggagtgtgtgtgtagagtcgctggcttattaacagtattgtgtgtgggttgggtttttagtttgttccttctttttgaagtcccttcatttcaatccttgactctctctccccttcccttgcccagctctgttgaatgctgctgtgcgcgtgtgagggccgctctgcacacagggcccttgggttgtgtgaactgaaattctccctgtatttgtgagactcgcaggagtccccatctgtagcacaggcaatgccagtgccatgctgcagcctcagaaaccaggcctctcactccagcagcaggcagaaccgtgtctgtggtcgggtgctgtccacagctctgtctgccttgttcttgggcttgagctggatagaggtggggtctcttcaccttccctgaattcagaacagaccctgtgcctggccccagtgtgcccaggcaattccccaggccctcactgggagcccttggtgttctgagcagcagggcccaggcagcacatgagcagtgcccaggggctccctgcgtgaggacggcaaggtgcgatgtatgtctaacttattgatggcaggcagccccctgtgccccctaagcctggccctggttattgctgagctctgtgctcagtgctgcggcctggccgtggctcgtctgttcctttggggggcccgggcgggttgtgggaatcagtcttcacagacagacgtgagccaggcggaggactcgttccttgcagaggtcagtcctcacctgcaggtgtcggggtgtgggggggcaaggaggggcaggcacacaccatgtctgacctgaacccgattctggggagcatcttcccgctccggccccacgacctccacagggttacattgtaatatatatgccccagctaacctgtctgatggtggcatcttcctgcagacatttcaaacatgtaacttttatatgaaaaaaaataaacacagatgaaagctgcccaatgcc

SEQ ID NO: 3530 - DNA, 957 bp, Homo sapiens
  source 1..957: mol_type = genomic DNA
gctggccccgccgcccgccctaccccccaagcagcggcagctgagtgaaaacgccagtgaggaagctggtgagggtgaatatgtcaatctgtattcctctggccagagcagcgaggagctggctccctctcgaggagagccaccggctgggaaagacggacatcccagagatccctcagcggtcagcggcgtccctgggaaggacagcagagacggcagtgagagggccccaaagtcaccagatgctctggagtcggctcagtcggaggaggaagtggacgagctgtccctcattgaccacaacgaaattatgtccaggctgacgctcaagcaggagggtgatgacgggccggacgtccgcggaggatctggggacatcttactggtccatgctactgagactgacaggaaagatttggtgttgtactgcgaggcattcctgaccacctacaggaccttcatctccccagaggagctcatcaagaagctgcagtacagatatgagaaattctctccctttgccgacacattcaagaagcgcgtcagcaagaacacgttcttcgtgctggtacgggtggtggatgagctctgcctggtggagttgacagaagagatcctgaagctgctgatggaactggtcttccgcctggtgtgcaatggggagctgagcctggcccgtgtgctccggaagaacatcctggacaaggtggaccagaagaagctactcaggtgtgccacctccagccagcccctggcagcccggggggtagcagccaggccggggaccttgcacgactttcacagccatgagatagcggagcagctaacgctgctggatgctgagctcttctataaaatagagattcctgaggttttgctttgggcaaaagagcagaatgaggagaagagccccaacttgacccagttcacggagcacttcaacaacatgtcctactg

SEQ ID NO: 3531 - DNA, 683 bp, Homo sapiens
  source 1..683: mol_type = genomic DNA
ctctaccagagaagaaaaacaaacacatgctggcctacatgcagttgctggaggactactcggagccgcagccctctatgttctaccagacgccacagaacgagcacatctaccagcagaagaacaagctcctcatggaggtatacggcttcagcgactccttcagtggggtggactccgtgcaggagctggccccgccgcccgccctaccccccaagcagcggcagctgcaggcctcctgtgctgcttcttccttctcctctgtctcccactgtgtccagcaaactaaagtggccttcacccccgaggacggcagtgccgctcagggcctcagtgtgtccgtctctaactcctttctcagccggcacggcagcttgcccgtgccctcgtataagtctgtgtttaggtcctactcccaggatttcgtgcctcaccaccaagcttccgttccgcctttccttccgcctacctcctcttcctctccacatttcccacctgcccaccagtctcagagctctgacttagccgtgccaaccatggccggtccacctcccagcaccgtggacgggcctctctcggcttctcaggagagcagctttcatgggaatactgtctgccttccttccgaaacctctttcactgactcggagccaccggctgggaaagacggacatcccagagat

SEQ ID NO: 3532 - DNA, 739 bp, Homo sapiens
  source 1..739: mol_type = genomic DNA
gagattcctcaggcttcccttgtgaggctgcctgggttctgccgctgggtggtttgggatgtccaagagatatcccctttcagccagtgactcggtcctcagttgctgctccggaaagacgctggggctgggaagggccctgtgtcctctggctttaaaatgggcaatgctattgaaaaacagaagcccttgaaacgaagtcatctgtacccctggaaacaagactctcagcgttctcatctctcttccttcaccatgaagctgatggacaaattccactcacccaaaatcaagagaacgccatcaaagaagggaaaaccagctgaggtgtccgtaaagattccagagaagcctgtgaacaaagaggcaacagacagatttctaccagagggctaccctctccccttggatctggagcagcaggcagtagaatttatgtccaccagtgctgtggcttccaggtctcaaaggcagaagaacctgagctggctggaggagaaagagaaggaagttgtcagtgccctgcgctactttaagaccattgtggacaaaatggcaattgataagaaggtactggagatgcttccagggtcagccagcaaggtgctggaggccatcttacccctggtgcagaacgatcctcgaattcagcacagctcagccctctcttcctgctatagccgagtgtaccaaagcctcgccaacctcattcgctggtctgaccaagtgatgctggaag

SEQ ID NO: 3533 - DNA, 5799 bp, Homo sapiens
  source 1..5799: mol_type = genomic DNA
tttaagaccattgtggacaaaatggcaattgataagaaggtactggagatgcttccagggtcagccagcaaggtgctggaggccatcttacccctggtgcagaacgatcctcgaattcagcacagctcagccctctcttcctgctatagccgagtgtaccaaagcctcgccaacctcattcgctggtctgaccaagtgatgctggaaggcgtgaactcagaagacaaggagatggtgacgactgtgaagggggtcatcaaggctgtgctggatggagtgaaggagctggtcaggctcaccatcgagaagcagggacgtccgtctccgacgagccccgtgaagcccagttcccctgccagcaagcctgatggcccagcagagctccccctgacagaccgcgaggtagagatcctaaacaagacgactgggatgtcacagtcaactgagctcctcccagatgccacggatgaagaggtcgcgccccccaagcctcctctgcctggcattcgggtggttgataatagtcctccaccagcattgccacccaagaaaagacagtcggcgccgtcccctacccgagtggctgtggtggcccccatgagccgagccaccagtggctccagtttgcctgttggaatcaataggcaggattttgatgttgactgttacgcacagaggcgactgtcaggaggcagccactcatatggtggagagtcgccccgcctctccccctgcagcagcataggcaagctcagcaagtcagacgagcagctgtcctctctggacagggacagtgggcagtgctcccggaacacaagctgtgaaacactagaccactatgatcccgactatgaattcctccagcaagacctctctaacgcagaccagatacctcagcagacggcctggaaccttagcccgttgccagagtctttgggggagtctgggtctccatttcttggccctcctttccagctgcctcttggcggccatccccagccagacggacctctggccccagggcagcagacagatacgccacctgctctccccgagaagaagcgcaggagcgcagcctcccagacggcggacggctctggctgcagggtgtcctacgagcggcatccctcgcagtatgacaacatctctggggaggacctgcagagcacagccccgatcccatccgtcccctacgcgccctttgctgctattctgccctttcagcatggaggttcctcagcccctgtcgaatttgtgggtgattttactgctcctgagtcaaccggtgacccagaaaaaccacctcctctaccagagaagaaaaacaaacacatgctggcctacatgcagttgctggaggactactcggagccgcagccctctatgttctaccagacgccacagaacgagcacatctaccagcagaagaacaagctcctcatggaggtatacggcttcagcgactccttcagtggggtggactccgtgcaggagctggccccgccgcccgccctaccccccaagcagcggcagctggcctcctgtgctgcttcttccttctcctctgtctcccactgtgtccagcaaactaaagtggccttcacccccgaggacggcagtgccgctcagggcctcagtgtgtccgtctctaactcctttctcagccggcacggcagcttgcccgtgccctcggagccaccggctgggaaagacggacatcccagagatccctcagcggtcagcggcgtccctgggaaggacagcagagacggcagtgagagggccccaaagtcaccagatgctctggagtcggctcagtcggaggaggaagtggacgagctgtccctcattgaccacaacgaaattatgtccaggctgacgctcaagcaggagggtgatgacgggccggacgtccgcggaggatctggggacatcttactggtccatgctactgagactgacaggaaagatttggtgttgtactgcgaggcattcctgaccacctacaggaccttcatctccccagaggagctcatcaagaagctgcagtacagatatgagaaattctctccctttgccgacacattcaagaagcgcgtcagcaagaacacgttcttcgtgctggtacgggtggtggatgagctctgcctggtggagttgacagaagagatcctgaagctgctgatggaactggtcttccgcctggtgtgcaatggggagctgagcctggcccgtgtgctccggaagaacatcctggacaaggtggaccagaagaagctactcaggtgtgccacctccagccagcccctggcagcccggggggtagcagccaggccggggaccttgcacgactttcacagccatgagatagcggagcagctaacgctgctggatgctgagctcttctataaaatagagattcctgaggttttgctttgggcaaaagagcagaatgaggagaagagccccaacttgacccagttcacggagcacttcaacaacatgtcctactgggtccggtccataatcatgttacaggaaaaggcccaggacagggaacggctgctcttgaagttcatcaagatcatgaagcacttgcggaagctgaataacttcaactcctacttggccatcctctctgccctggactcggcgcccatccgcaggctggagtggcagaagcagacttcagagggcctggccgagtactgcacactgatcgacagctcgtcctccttccgagcctaccgggccgccctctcggaggtggaaccgccgtgcatcccgtacctggggctgatcctgcaggacctgaccttcgttcacctgggaaacccagactacatcgacgggaaagtgaacttctccaagcggtggcagcagttcaacatcctcgacagcatgcgctgcttccagcaggcgcactatgacatgcggaggaacgacgacattataaacttcttcaatgacttcagtgaccacctggctgaggaggccctatgggaactgtctctgaaaattaaacccaggaacataacaaggagaaaaacagaccgggaagagaagacctaggagcagacgccgggatccaggagaatgctcgaggggcgcagagggcagctcccagaccggagaggaccttggacctgttaggcgcatggcaggagtcccggcctcggagccatgaggctggccagccctcagcggggccgggcgggagctggagcctgccagccgcttcctgcctccttcctctgtgggagcagacccgtgggcctcagggcagccagcaggcaggtcttgttgccaatttacaaaccggtggttttctggtttggttttgttttctgcttttacttccatctctcccctcttgaccttccacccactcccctccagggagagagcagcagagacctcatcagcagaccaaggaagtggtgggtgctccccctccctaagctccagggtccctgaatcttctgaaatctcaaatgagtggaggcctcctggggtggcctgtcctgcaggggccctggaatgggggcaagcagctgggtgggcagaatgcagagtagactcgggggaggatcctttcactttccgcttccccttctgatgcatggaggatggtgtgagcttttcagcaggcccggaaaggtacgcaggtgacgccttagcagccccgcagctggtgctctgccccgcggtactggcgccatcagggcctcccttgcccgcctgagagcagcagcagtctctgtcatcccgtcgccccttaccccccaccccaggccactgggcccctcccacaccacctggggagctgagaagaggaggctggagtaagggaggacttgatcatccaagaaatactttttattgctgggagtcttctgaacctcaccaaactgaggccagagctgagctcctgggggagttaattcagaggggagaggccagcacctccctcctccatcgctcgctgtgtgccttaaactccatctcatgtccctccccatcccctggctttccctccctccttgccccatcctgggccagccagcagggctcctcctctggctcttcagacctttcagccagtgctgtcagtgcccctgggagggaagggcatccctgaggcacccgaatggtccctcagggtgcagggaggcagaagcctggccacagaggagcctcctaaggcagcagctgcagcaagcgcaccctctccccactctccccacgccagagcggcttccagagcagatgctgtttccatcctcctcgtcaaaaccattctcgctgctgagcttgacaatctgggcaaggcttgtggggcgcttgacaaacagaatctgccctgtgccgcctggttccgtggcctccagcatgagcctgcaggcagggcgctgcgggaacccagttgtgctgccccagcccatgcctccgggtctgctgtgcatgaatgagtgctcacttgtcccgggtttaggacgtggtcaagtgaacagcagggtctaactgtgcttacttagcccagttcaaacagaacaaaggaaaaatatagaaagcaacatctgttgatcatttaggtttttttttaaaccaccatgtcactttgagtccttcatgggtttttgaacagcatttatcaagaagaaaatgtgggctttttcccctctcccgtgttttgtttgtcctgtagatagagggaggaaagccgtgcagtggcaggcgggaccccctctggtggcgggaccccctcttgcggtggtcttgcggggccagccgggacctgtcactttattatttaaggagtgtgtgtgtagagtcgctggcttattaacagtattgtgtgtgggttgggtttttagtttgttccttctttttgaagtcccttcatttcaatccttgactctctctccccttcccttgcccagctctgttgaatgctgctgtgcgcgtgtgagggccgctctgcacacagggcccttgggttgtgtgaactgaaattctccctgtatttgtgagactcgcaggagtccccatctgtagcacaggcaatgccagtgccatgctgcagcctcagaaaccaggcctctcactccagcagcaggcagaaccgtgtctgtggtcgggtgctgtccacagctctgtctgccttgttcttgggcttgagctggatagaggtggggtctcttcaccttccctgaattcagaacagaccctgtgcctggccccagtgtgcccaggcaattccccaggccctcactgggagcccttggtgttctgagcagcagggcccaggcagcacatgagcagtgcccaggggctccctgcgtgaggacggcaaggtgcgatgtatgtctaacttattgatggcaggcagccccctgtgccccctaagcctggccctggttattgctgagctctgtgctcagtgctgcggcctggccgtggctcgtctgttcctttggggggcccgggcgggttgtgggaatcagtcttcacagacagacgtgagccaggcggaggactcgttccttgcagaggtcagtcctcacctgcaggtgtcggggtgtgggggggcaaggaggggcaggcacacaccatgtctgacctgaacccgattctggggagcatcttcccgctccggccccacgacctccacagggttacattgtaatatatatgccccagctaacctgtctgatggtggcatcttcctgcagacatttcaaacatgtaacttttatatgaaaaaaaataaacacagatgaaagctgcccaatgcca

SEQ ID NO: 3534 - DNA, 4322 bp, Homo sapiens
  source 1..4322: mol_type = genomic DNA
ccttttctgggcaccgccttctgctagggggttgtagatgaaagtgcctgctcccagagaagcttgtctaacctagcacagtttctaagctacccaggctgccagaccgagcgaccgtgctgccatggacacagactctcagcgttctcatctctcttccttcaccatgaagctgatggacaaattccactcacccaaaatcaagagaacgccatcaaagaagggaaaaccagctgaggtgtccgtaaagattccagagaagcctgtgaacaaagaggcaacagacagatttctaccagagggctaccctctccccttggatctggagcagcaggcagtagaatttatgtccaccagtgctgtggcttccaggtctcaaaggcagaagaacctgagctggctggaggagaaagagaaggaagttgtcagtgccctgcgctactttaagaccattgtggacaaaatggcaattgataagaaggtactggagatgcttccagggtcagccagcaaggtgctggaggccatcttacccctggtgcagaacgatcctcgaattcagcacagctcagccctctcttcctgctatagccgagtgtaccaaagcctcgccaacctcattcgctggtctgaccaagtgatgctggaaggcgtgaactcagaagacaaggagatggtgacgactgtgaagggggtcatcaaggctgtgctggatggagtgaaggagctggtcaggctcaccatcgagaagcagggacgtccgtctccgacgagccccgtgaagcccagttcccctgccagcaagcctgatggcccagcagagctccccctgacagaccgcgaggtagagatcctaaacaagacgactgggatgtcacagtcaactgagctcctcccagatgccacggatgaagaggtcgcgccccccaagcctcctctgcctggcattcgggtggttgataatagtcctccaccagcattgccacccaagaaaagacagtcggcgccgtcccctacccgagtggctgtggtggcccccatgagccgagccaccagtggctccagtttgcctgttggaatcaataggcaggattttgatgttgactgttacgcacagaggcgactgtcaggaggcagccactcatatggtggagagtcgccccgcctctccccctgcagcagcataggcaagctcagcaagtcagacgagcagctgtcctctctggacagggacagtgggcagtgctcccggaacacaagctgtgaaacactagaccactatgatcccgactatgaattcctccagcaagacctctctaacgcagaccagatacctcagcagacggcctggaaccttagcccgttgccagagtctttgggggagtctgggtctccatttcttggccctcctttccagctgcctcttggcggccatccccagccagacggacctctggccccagggcagcagacagatacgccacctgctctccccgagaagaagcgcaggagcgcagcctcccagacggcggacggctctggctgcagggtgtcctacgagcggcatccctcgcagtatgacaacatctctggggaggacctgcagagcacagccccgatcccatccgtcccctacgcgccctttgctgctattctgccctttcagcatggaggttcctcagcccctgtcgaatttgtgggtgattttactgctcctgagtcaaccggtgacccagaaaaaccacctcctctaccagagaagaaaaacaaacacatgctggcctacatgcagttgctggaggactactcggagccgcagccctctatgttctaccagacgccacagaacgagcacatctaccagcagaagaacaagctcctcatggaggtatacggcttcagcgactccttcagtggggtggactccgtgcaggagctggccccgccgcccgccctaccccccaagcagcggcagctgtataagtctgtgtttaggtcctactcccaggatttcgtgcctcaccaccaagcttccgttccgcctttccttccgcctacctcctcttcctctccacatttcccacctgcccaccagtctcagagctctgacttagccgtgccaaccatggccggtccacctcccagcaccgtggacgggcctctctcggcttctcaggagagcagctttcatgggaatactgtctgccttccttccgaaacctctttcactgactcggagccaccggctgggaaagacggacatcccagagatccctcagcggtcagcggcgtccctgggaaggacagcagagacggcagtgagagggccccaaagtcaccagatgctctggagtcggctcagtcggaggaggaagtggacgagctgtccctcattgaccacaacgaaattatgtccaggctgacgctcaagcaggagggtgatgacgggccggacgtccgcggaggatctggggacatcttactggtccatgctactgagactgacaggaaagatttggtgttgtactgcgaggcattcctgaccacctacaggaccttcatctccccagaggagctcatcaagaagctgcagtacagatatgagaaattctctccctttgccgacacattcaagaagcgcgtcagcaagaacacgttcttcgtgctggtacgggtggtggatgagctctgcctggtggagttgacagaagagatcctgaagctgctgatggaactggtcttccgcctggtgtgcaatggggagctgagcctggcccgtgtgctccggaagaacatcctggacaaggtggaccagaagaagctactcaggtgtgccacctccagccagcccctggcagcccggggggtagcagccaggccggggaccttgcacgactttcacagccatgagatagcggagcagctaacgctgctggatgctgagctcttctataaaatagagattcctgaggttttgctttgggcaaaagagcagaatgaggagaagagccccaacttgacccagttcacggagcacttcaacaacatgtcctactgggtccggtccataatcatgttacaggaaaaggcccaggacagggaacggctgctcttgaagttcatcaagatcatgaagcacttgcggaagctgaataacttcaactcctacttggccatcctctctgccctggactcggcgcccatccgcaggctggagtggcagaagcagacttcagagggcctggccgagtactgcacactgatcgacagctcgtcctccttccgagcctaccgggccgccctctcggaggtggaaccgccgtgcatcccgtacctggggctgatcctgcaggacctgaccttcgttcacctgggaaacccagactacatcgacgggaaagtgaacttctccaagcggtggcagcagttcaacatcctcgacagcatgcgctgcttccagcaggcgcactatgacatgcggaggaacgacgacattataaacttcttcaatgacttcagtgaccacctggctgaggaggccctatgggaactgtctctgaaaattaaacccaggaacataacaaggagaaaaacagaccgggaagagaagacctaggagcagacgccgggatccaggagaatgctcgaggggcgcagagggcagctcccagaccggagaggaccttggacctgttaggcgcatggcaggagtcccggcctcggagccatgaggctggccagccctcagcggggccgggcgggagctggagcctgccagccgcttcctgcctccttcctctgtgggagcagacccgtgggcctcagggcagccagcaggcaggtcttgttgccaatttacaaaccggtggttttctggtttggttttgttttctgcttttacttccatctctcccctcttgaccttccacccactcccctccagggagagagcagcagagacctcatcagcagaccaaggaagtggtgggtgctccccctccctaagctccagggtccctgaatcttctgaaatctcaaatgagtggaggcctcctggggtggcctgtcctgcaggggccctggaatgggggcaagcagctgggtgggcagaatgcagagtagactcgggggaggatcctttcactttccgcttccccttctgatgcatggaggatggtgtgagcttttcagcaggcccggaaaggtacgcaggtgacgccttagcagccccgcagctggtgctctgccccgcggtactggcgccatcagggcctcccttgcccgcctgagagcagcagcagtctctgtcatcccgtcgcccc

SEQ ID NO: 3535 - DNA, 6683 bp, Homo sapiens
  source 1..6683: mol_type = genomic DNA
gagattcctcaggcttcccttgtgaggctgcctgggttctgccgctgggtggtttgggatgtccaagagatatcccctttcagccagtgactcggtcctcagttgctgctccggaaagacgctggggctgggaagggccctgtgtcctctggctttaaaatgggcaatgctattgaaaaacagaagcccttgaaacgaagtcatctgtacccctggaaacaagactctcagcgttctcatctctcttccttcaccatgaagctgatggacaaattccactcacccaaaatcaagagaacgccatcaaagaagggaaaaccagctgaggtgtccgtaaagattccagagaagcctgtgaacaaagaggcaacagacagatttctaccagagggctaccctctccccttggatctggagcagcaggcagtagaatttatgtccaccagtgctgtggcttccaggtctcaaaggcagaagaacctgagctggctggaggagaaagagaaggaagttgtcagtgccctgcgctactttaagaccattgtggacaaaatggcaattgataagaaggtactggagatgcttccagggtcagccagcaaggtgctggaggccatcttacccctggtgcagaacgatcctcgaattcagcacagctcagccctctcttcctgctatagccgagtgtaccaaagcctcgccaacctcattcgctggtctgaccaagtgatgctggaaggcgtgaactcagaagacaaggagatggtgacgactgtgaagggggtcatcaaggctgtgctggatggagtgaaggagctggtcaggctcaccatcgagaagcagggacgtccgtctccgacgagccccgtgaagcccagttcccctgccagcaagcctgatggcccagcagagctccccctgacagaccgcgaggtagagatcctaaacaagacgactgggatgtcacagtcaactgagctcctcccagatgccacggatgaagaggtcgcgccccccaagcctcctctgcctggcattcgggtggttgataatagtcctccaccagcattgccacccaagaaaagacagtcggcgccgtcccctacccgagtggctgtggtggcccccatgagccgagccaccagtggctccagtttgcctgttggaatcaataggcaggattttgatgttgactgttacgcacagaggcgactgtcaggaggcagccactcatatggtggagagtcgccccgcctctccccctgcagcagcataggcaagctcagcaagtcagacgagcagctgtcctctctggacagggacagtgggcagtgctcccggaacacaagctgtgaaacactagaccactatgatcccgactatgaattcctccagcaagacctctctaacgcagaccagatacctcagcagacggcctggaaccttagcccgttgccagagtctttgggggagtctgggtctccatttcttggccctcctttccagctgcctcttggcggccatccccagccagacggacctctggccccagggcagcagacagatacgccacctgctctccccgagaagaagcgcaggagcgcagcctcccagacggcggacggctctggctgcagggtgtcctacgagcggcatccctcgcagtatgacaacatctctggggaggacctgcagagcacagccccgatcccatccgtcccctacgcgccctttgctgctattctgccctttcagcatggaggttcctcagcccctgtcgaatttgtgggtgattttactgctcctgagtcaaccggtgacccagaaaaaccacctcctctaccagagaagaaaaacaaacacatgctggcctacatgcagttgctggaggactactcggagccgcagccctctatgttctaccagacgccacagaacgagcacatctaccagcagaagaacaagctcctcatggaggtatacggcttcagcgactccttcagtggggtggactccgtgcaggagctggccccgccgcccgccctaccccccaagcagcggcagctgcaggcctcctgtgctgcttcttccttctcctctgtctcccactgtgtccagcaaactaaagtggccttcacccccgaggacggcagtgccgctcagggcctcagtgtgtccgtctctaactcctttctcagccggcacggcagcttgcccgtgccctcgtataagtctgtgtttaggtcctactcccaggatttcgtgcctcaccaccaagcttccgttccgcctttccttccgcctacctcctcttcctctccacatttcccacctgcccaccagtctcagagctctgacttagccgtgccaaccatggccggtccacctcccagcaccgtggacgggcctctctcggcttctcaggagagcagctttcatgggaatactgtctgccttccttccgaaacctctttcactgactcgagtgaaaacgccagtgaggaagctggtgagggtgaatatgtcaatctgtattcctctggccagagcagcgaggagctggctccctctcgaggagagccaccggctgggaaagacggacatcccagagatccctcagcggtcagcggcgtccctgggaaggacagcagagacggcagtgagagggccccaaagtcaccagatgctctggagtcggctcagtcggaggaggaagtggacgagctgtccctcattgaccacaacgaaattatgtccaggctgacgctcaagcaggagggtgatgacgggccggacgtccgcggaggatctggggacatcttactggtccatgctactgagactgacaggaaagatttggtgttgtactgcgaggcattcctgaccacctacaggaccttcatctccccagaggagctcatcaagaagctgcagtacagatatgagaaattctctccctttgccgacacattcaagaagcgcgtcagcaagaacacgttcttcgtgctggtacgggtggtggatgagctctgcctggtggagttgacagaagagatcctgaagctgctgatggaactggtcttccgcctggtgtgcaatggggagctgagcctggcccgtgtgctccggaagaacatcctggacaaggtggaccagaagaagctactcaggtgtgccacctccagccagcccctggcagcccggggggtagcagccaggccggggaccttgcacgactttcacagccatgagatagcggagcagctaacgctgctggatgctgagctcttctataaaatagagattcctgaggttttgctttgggcaaaagagcagaatgaggagaagagccccaacttgacccagttcacggagcacttcaacaacatgtcctactgggtccggtccataatcatgttacaggaaaaggcccaggacagggaacggctgctcttgaagttcatcaagatcatgaagcacttgcggaagctgaataacttcaactcctacttggccatcctctctgccctggactcggcgcccatccgcaggctggagtggcagaagcagacttcagagggcctggccgagtactgcacactgatcgacagctcgtcctccttccgagcctaccgggccgccctctcggaggtggaaccgccgtgcatcccgtacctggggctgatcctgcaggacctgaccttcgttcacctgggaaacccagactacatcgacgggaaagtgaacttctccaagcggtggcagcagttcaacatcctcgacagcatgcgctgcttccagcaggcgcactatgacatgcggaggaacgacgacattataaacttcttcaatgacttcagtgaccacctggctgaggaggccctatgggaactgtctctgaaaattaaacccaggaacataacaaggagaaaaacagaccgggaagagaagacctaggagcagacgccgggatccaggagaatgctcgaggggcgcagagggcagctcccagaccggagaggaccttggacctgttaggcgcatggcaggagtcccggcctcggagccatgaggctggccagccctcagcggggccgggcgggagctggagcctgccagccgcttcctgcctccttcctctgtgggagcagacccgtgggcctcagggcagccagcaggcaggtcttgttgccaatttacaaaccggtggttttctggtttggttttgttttctgcttttacttccatctctcccctcttgaccttccacccactcccctccagggagagagcagcagagacctcatcagcagaccaaggaagtggtgggtgctccccctccctaagctccagggtccctgaatcttctgaaatctcaaatgagtggaggcctcctggggtggcctgtcctgcaggggccctggaatgggggcaagcagctgggtgggcagaatgcagagtagactcgggggaggatcctttcactttccgcttccccttctgatgcatggaggatggtgtgagcttttcagcaggcccggaaaggtacgcaggtgacgccttagcagccccgcagctggtgctctgccccgcggtactggcgccatcagggcctcccttgcccgcctgagagcagcagcagtctctgtcatcccgtcgccccttaccccccaccccaggccactgggcccctcccacaccacctggggagctgagaagaggaggctggagtaagggaggacttgatcatccaagaaatactttttattgctgggagtcttctgaacctcaccaaactgaggccagagctgagctcctgggggagttaattcagaggggagaggccagcacctccctcctccatcgctcgctgtgtgccttaaactccatctcatgtccctccccatcccctggctttccctccctccttgccccatcctgggccagccagcagggctcctcctctggctcttcagacctttcagccagtgctgtcagtgcccctgggagggaagggcatccctgaggcacccgaatggtccctcagggtgcagggaggcagaagcctggccacagaggagcctcctaaggcagcagctgcagcaagcgcaccctctccccactctccccacgccagagcggcttccagagcagatgctgtttccatcctcctcgtcaaaaccattctcgctgctgagcttgacaatctgggcaaggcttgtggggcgcttgacaaacagaatctgccctgtgccgcctggttccgtggcctccagcatgagcctgcaggcagggcgctgcgggaacccagttgtgctgccccagcccatgcctccgggtctgctgtgcatgaatgagtgctcacttgtcccgggtttaggacgtggtcaagtgaacagcagggtctaactgtgcttacttagcccagttcaaacagaacaaaggaaaaatatagaaagcaacatctgttgatcatttaggtttttttttaaaccaccatgtcactttgagtccttcatgggtttttgaacagcatttatcaagaagaaaatgtgggctttttcccctctcccgtgttttgtttgtcctgtagatagagggaggaaagccgtgcagtggcaggcgggaccccctctggtggcgggaccccctcttgcggtggtcttgcggggccagccgggacctgtcactttattatttaaggagtgtgtgtgtagagtcgctggcttattaacagtattgtgtgtgggttgggtttttagtttgttccttctttttgaagtcccttcatttcaatccttgactctctctccccttcccttgcccagctctgttgaatgctgctgtgcgcgtgtgagggccgctctgcacacagggcccttgggttgtgtgaactgaaattctccctgtatttgtgagactcgcaggagtccccatctgtagcacaggcaatgccagtgccatgctgcagcctcagaaaccaggcctctcactccagcagcaggcagaaccgtgtctgtggtcgggtgctgtccacagctctgtctgccttgttcttgggcttgagctggatagaggtggggtctcttcaccttccctgaattcagaacagaccctgtgcctggccccagtgtgcccaggcaattccccaggccctcactgggagcccttggtgttctgagcagcagggcccaggcagcacatgagcagtgcccaggggctccctgcgtgaggacggcaaggtgcgatgtatgtctaacttattgatggcaggcagccccctgtgccccctaagcctggccctggttattgctgagctctgtgctcagtgctgcggcctggccgtggctcgtctgttcctttggggggcccgggcgggttgtgggaatcagtcttcacagacagacgtgagccaggcggaggactcgttccttgcagaggtcagtcctcacctgcaggtgtcggggtgtgggggggcaaggaggggcaggcacacaccatgtctgacctgaacccgattctggggagcatcttcccgctccggccccacgacctccacagggttacattgtaatatatatgccccagctaacctgtctgatggtggcatcttcctgcagacatttcaaacatgtaacttttatatgaaaaaaaataaacacagatgaaagctgcccaatgcc

SEQ ID NO: 3536 - DNA, 588 bp, Homo sapiens
  source 1..588: mol_type = genomic DNA
gcggccgcgcggagcccgccatgccggcgcgggtctgaggcgtggcgagccagggccgaggcgagcggcgggcgcgccgcccctgtcgccccgcggcggcccggcccgggcccgatgagcggcggcctcggcctccggcgcagcccggaaatgtccggcaagatcgagaaagcagactctcagcgttctcatctctcttccttcaccatgaagctgatggacaaattccactcacccaaaatcaagagaacgccatcaaagaagggaaaaccagctgaggtgtccgtaaagattccagagaagcctgtgaacaaaaacctgagctggctggaggagaaagagaaggaagttgtcagtgccctgcgctactttaagaccattgtggacaaaatggcaattgataagaaggtactggagatgcttccagggtcagccagcaaggtgctggaggccatcttacccctggtgcagaacgatcctcgaattcagcacagctcagccctctcttcctgctatagccgagtgtaccaaagcctcgccaacctcattcgctggtctgaccaagtgatgctggaaggcgtgaactca

SEQ ID NO: 3537 - DNA, 563 bp, Homo sapiens
  source 1..563: mol_type = genomic DNA
acaacatctctggggaggacctgcagagcacagccccgatcccatccgtcccctacgcgccctttgctgctattctgccctttcagcatggaggttcctcagcccctgtcgaatttgtgggtgattttactgctcctgagtcaaccggtgacccagaaaaaccacctcctctaccagagaagaaaaacaaacacatgctggcctacatgcagttgctggaggactactcggagccgcagccctctatgttctaccagacgccacagaacgagcacatctaccagcagaagaacaagctcctcatggaggtatacggcttcagcgactccttcagtggggtggactccgtgcaggagctggccccgccgcccgccctaccccccaagcagcggcagctggagccaccggctgggaaagacggacatcccagagatccctcagcggtcagcggcgtccctgggaaggacagcagagacggcagtgagagcggaatcacttccgtgtacagatggaacatccagaggcagcagcgactgtcctatggccacacagccagtcagtag

SEQ ID NO: 3538 - DNA, 10180 bp, Homo sapiens
  source 1..10180: mol_type = genomic DNA
tgagtaaacagccggagctgggaaagtcgagctctggcagcgtctgggtgctgaggggcagaggcggagagaaccctgtcctgatcttcctaggtgggataaatatcggggtgacagtggtaggccgcggggaaccctcagtctgcccaccctccgccccctcgcggcgagatgcctcgttccccgggcttctcccgccctccgccgatctcctccctctgttgaaagctgcccgggaaagtggtggcgggagcgggcccaggcccgaatgtggcgtgggctcaggtgtctggtgtcgggcgccggaggaggttcgcgctggggtttggtgattcggaggcctggggtgcagacgcggcgtggctgtgaggcccgggcgggcgtgcgggtgtgagggccggactcacactgggccgccgcggggctgtttccatcggtcactggattttctcctcttccggttcgggcctcagggtggccgacatgacggccaggggtcagagccccctcgcgccgctgttggagactttggaagacccttctgcctcccatggagggcagactgacgcttacctgactctgaccagtcgtatgactggagaagaaggaaaagaagtaattacagaaattgagaaaaaacttcctcggctgtacaaagttttaaagactcacatttccagtcaaaactcggagctgagtagtgctgctctacaagccctggggttttgcttatataatcccaaaattacctcagaattatcagaggcaaatgctctagaattgctttcaaaattgaatgataccattaagaattcagacaaaaatgtacgtactagagcactttgggtgatatctaagcagacatttccctctgaagtggttggcaaaatggtatccagtataattgattcattagaaatactgtttaacaaaggagagacgcattctgctgttgttgattttgaagcattaaatgttatcgtaaggctaattgaacaagccccaattcaaatgggagaagaggcagtgaggtgggcaaaactggtcatacctttagtggttcattcagcacaaaaggtacatttgcggggagcaactgctctggagatgggaatgccattattgcttcagaaacagcaagaaatagcatctattacggagcagcttatgactactaaattaatctcagaacttcagaagctatttatgagtaaaaatgagacttacgtgttaaaattatggcctttgtttgtcaaactacttggaaggaccttgcatcgaagtgggagtttcatcaattctctcttgcaactagaagaacttggatttcgtagtggagcacccatgattaaaaagatagcttttattgcttggaagagtttaatagataattttgctttaaatccagatatactatgtagtgcaaaaagactcaagttgttaatgcagcctttgagttccatccatgtgagaacagaaactctagcattaacaaaactagaagtctggtggtatttactgatgagacttggacctcatcttcctgctaattttgaacaggtttgtgtgcctctgattcaaagtacaataagcattgattctaatgcctcacctcagggcaattcgtgtcatgtagctacatctccaggtttaaatcctatgactcctgtacacaaaggtgcttcctccccgtacggagccccgggaactccccgaatgaacctgagttcgaatttaggtggaatggccacaatcccatccattcaacttttgggacttgaaatgttgcttcatttcttgttgggtccagaagccttgagttttgctaagcaaaataaacttgtgctgagcttagagccattggaacatccgttaatcagcagcccttcctttttttccaaacatgcaaatacacttatcactgctgttcatgatagctttgttgcagttggaaaagatgcccccgatgtggttgtcagtgctatctggaaggagctaattagcttggtgaagtcagttactgaatcaggtaacaaaaaagagaaaccaggttctgaagttttgactctcttattaaagtctttggaaagcatagtaaagtctgaagtatttcctgtatcaaaaacgctggtcctcatggaaattacaattaaaggacttcctcagaaagtattaggttcaccagcatatcaggttgctaatatggatattcttaatggaactccagctttgttcttaattcaattaattttcaacaatttcttggaatgtggtgtatcagatgaaaggttctttctcagtttggaatcacttgtaggctgtgttctttctggtccaacttcaccactagctttcagtgactcagttttaaatgttattaatcaaaatgcaaagcagttggaaaataaggagcatctctggaaaatgtggagtgttatagtcaccccattaactgaattgattaatcagaccaatgaagtaaatcaaggtgatgccttagaacataattttagtgccatctatggtgcattgactttaccagtaaaccacattttttcagaacagagatttccagtggccaccatgaagactttgcttagaacttggtcagaattatatagagcatttgctcgttgtgctgctttggtggcaacagcagaagagaacttgtgctgtgaggaactttcttccaagataatgtccagtttggaagatgaaggcttttctaatttgttgttcgtggatagaattatttatattattactgtaatggttgattgcattgacttctcaccatataatattaaatatcagcccaaagttaaatcaccacagagaccttcagattggtccaaaaagaagaatgagcccctagggaaattgacttctttatttaaacttattgtgaaagtgatctattctttccacacactgagcttcaaggaagcacattctgataccctcttcactattggcaactcaatcaccggcattatttccagtgtacttgggcatatttctttgccttctatgatccgaaaaatatttgcaactttaacaagacctctggcattattttatgaaaactcaaagcttgatgaagttcctaaagtatatagttgtctgaacaacaagttagaaaagctactgggagaaattattgcttgtctgcaattcagctacaccggaacttatgatagtgaacttcttgaacaactctccccactattatgcataatatttctgcacaagaataaacagattcgaaaacagagtgctcagttctggaatgccacttttgccaaagtgatgatgttggtttatcctgaagagttaaaaccagtactaacacaagccaaacaaaaatttctgctcctgttgcctggtttggaaactgttgaaatgatggaggaatccagtggaccatattctgatggaacagaaaattcacaactaaatgtgaagataagtggcatggagagaaaatcaaatggaaaaagagattcatttttggcacaaacaaagaataaaaaagaaaatatgaaaccagcagccaaactgaaacttgaatcttcgtctttaaaagtaaagggtgaaattcttttggaagaggaaaagtctactgactttgtgtttatacctccagaaggaaaagatgcaaaggaaagaatattaactgatcatcaaaaagaagttctcaaaacaaagcggtgtgatattcctgccatgtataataatctggatgtttcccaagataccttatttactcagtatagtcaggaagagcctatggaaattcctactttaaccagaaaaccaaaggaggattctaagatgatgattacggaggagcaaatggacagtgacattgtcattcctcaagatgtcacggaagactgtggtatggctgaacatcttgaaaagtcctccctttcgaataatgagtgtggttctcttgacaaaaccagtccagaaatgtcaaacagtaataatgatgaaagaaaaaaagctttaatttcatcaaggaaaacatcaactgaatgtgcatctagtacagaaaattctttcgttgtcagcagtagttcagtttctaataccactgttgctggaactcccccataccctacaagtcggaggcaaacctttattactttggagaagtttgatggttcagaaaatagaccttttagtccatcccccttgaataatatttcatcaactgttacagtgaaaaataaccaggaaaccatgattaaaacagattttctaccaaaagcaaagcaaagagaagggactttttcaaaatctgattctgaaaaaatagtgaatggaactaagagatcaagccggagagctggtaaagctgaacaaacagggaataaaaggtctaagcccttaatgagatctgagccggagaaaaatactgaggaatctgttgaaggcattgtagtcttagaaaataacccacctggtttgcttaatcaaacagaatgtgtgtcagataatcaggttcatctttctgaatctacaatggagcatgacaatacaaagcttaaagcagcaacagtggaaaatgctgtattattggaaactaatactgtagaggagaaaaatgtagaaattaatttggaatccaaagagaatacacccccagtagtaatatcagcagatcaaatggtaaatgaggatagtcaggttcagataactccaaatcagaaaacccttagacggtcttcaaggcgacgttcagaagtagtagagtctaccactgaaagccaagataaggaaaatagtcatcaaaaaaaggaacgacgtaaggaagaagaaaaacctcttcagaagagtccattgcatataaaagatgatgtgttacctaaacaaaaactgattgctgaacaaactctacaggagaatttaattgagaaaggaagtaatttacatgagaagactcttggggaaactagtgctaatgcagaaactgaacaaaataaaaaaaaggcagaccctgagaacattaagtctgagggggatggtacccaggacattgtagataagtcctctgagaaactagtcagaggccgaacacggtatcaaactagaagagcatctcagggtttgctttccagcattgaaaactcagaatctgatagttcggaggcaaaagaagaaggttctaggaagaagagatctggaaaatggaaaaacaaaagcaatgaaagtgttgacattcaagatcaagaagagaaagtggtgaaacaggaatgtataaaagctgaaaatcagtcacatgattataaagcaacttctgaagaagatgtaagcataaaatctccgatttgcgaaaaacaagatgaaagtaatactgtaatatgtcaggattctacagtaacttcagatttgttgcaagttcctgatgatttaccaaatgtgtgtgaggaaaaaaatgaaactagcaaatatgcagaatattcctttacaagtctacctgtgccagaatcaaatctaaggactagaaatgccattaagagattacataagcgagactcttttgataattgtagtttgggagaatcctcaaaaatagggatatcagatatttcttcgctttcagaaaaaacttttcaaacacttgaatgccaacacaagagaagtaggagggtgaggagatctaaaggttgtgattgctgtggggaaaaatcacaacctcaggaaaagtcactcattgggttaaagaatacagaaaataatgacgtagagattagtgaaacaaaaaaggcagatgtgcaagcacctgtaagcccatcagaaacttctcaagctaatccatattctgaaggacaatttttagatgaacatcatagtgtgaattttcatttgggtctcaaagaggataatgatactattaatgattcattaattgtttctgaaaccaaatcaaaagaaaacactatgcaagaatctcttccttctggaatagtaaactttagagaggaaatttgtgatatggattctagtgaagcaatgtctcttgaaagccaggagtcacctaatgaaaattttaaaactgttggcccgtgtttaggagactcgaaaaatgtttcacaggaatctttggagacaaaagaagaaaaaccagaagaaaccccaaaaatggaactgagtctagagaatgttactgttgaaggaaatgcatgtaaagtaacagaatccaatctagagaaagcaaaaactatggaattgaatgtaggaaatgaagctagctttcatggacaagagagaaccaaaactggtatttctgaagaagcagcaatagaagaaaataaaagaaatgatgactctgaagcagacacagctaaactgaatgccaaagaagtagcaactgaggaatttaattcagatattagtctttctgataatactacacctgtaaaattgaatgctcaaactgagatttctgaacaaacagcagctggggaactagatggaggaaatgatgtatctgatctacactcatctgaagaaacgaataccaaaatgaaaaataatgaagaaatgatgatcggcgaggcaatggctgaaactggccatgatggtgaaacagagaatgagggcataactaccaaaacctcaaagcctgatgaagctgaaacaaacatgttgactgcagaaatggacaactttgtttgtgacacagttgaaatgagcactgaagaaggaatcattgacgctaataaaactgaaacaaatactgagtatagtaaatctgaagaaaaattagataacaatcaaatggtaatggaaagtgatattttacaggaagatcaccatacttcacagaaagtggaggaaccatcacagtgtctggcatctggaacagctatctctgagctaataatagaagacaataatgcatctcctcaaaaactaagggaacttgatccttcacttgtgtcagcaaatgacagtcctagtggcatgcagacacgctgtgtctggtctcctttggcttctccgtctacgagcattttaaagagaggactaaaaagatcccaagaagatgaaatctcatcacctgttaataaggttcgccgtgtctcctttgcagatccaatataccaagcaggattggcagatgacattgatagacggtgctctattgttaggtcccattcttccaatagttctcccataggaaaaagtgttaaaacttctcctactacacaatctaagcataataccacttcagccaaaggatttctgtccccaggatcacgtagccctaaatttaagagctcaaagaagtgtttaatttcagaaatggccaaagaatccataccatgcccaacagaaagtgtttacccaccattggtgaactgtgtggcaccagttgacatcattttacctcagattacatcaaacatgtgggcaagaggcctgggacaactcattagagctaagaatataaaaactattggtgatttgagtactcttacagcatctgaaataaaaactcttcctatccgttctccaaaagtgtccaatgtaaaaaaggctctcagaatatatcatgagcagcaggtgaagactcgtggactagaagagattccagtttttgatatttctgaaaaaacagtaaatggaatagaaaataaatctttgtcacctgatgaagaaagacttgtctcagatataattgatcctgttgctttagaaattccattatccaaaaaccttctggcacagattagtgctcttgctcttcagctggattcagaagatcttcataattattcaggaagccaactatttgaaatgcacgagaaactaagttgtatggcaaactctgtaataaaaaatctacagtcacgttggagatcaccatcccatgaaaattctatttagtattttcagagaaaattgaaggtttttttaaacatcactggatttcttgattgaggaaacaagttctgaaataatagcacaatttcaaagaagagactctttgcaaagttgataacatttcaaaccctgaaggacagtgacttattatgtaagttcaattttgtaagttcattatgtaagatccttttttttttcataatatgtattcttggctgctatgcgtggtttttcaggaaatttaattatcttactgagatgtgaaagcaaaactagtaacagaacttacattttatttcatgctttcttaaacccgtgcatattctggtgaaacatgtaaaatactttaagtaaaattgaacatttttatttgaatttttgctgaactgataaaggtgtttatatttttgtttgttggtttgtttaattcatgtttgttgggactgaggtttaggaagtttgttactggttaaaaacctcaaatgaaatgcgaaagaatttgaatttttcctgcatatgtcaactttggacagctttcaagaaaaatgagaaaagtttcaacttctggcggttaaaatattaatgcagaatttactaagattttattcatttgcattagcaaatattcatgcagcagcagttgactgaaaatttattcttatgagacgtatagtattcatttttaaatgcatgattgtacattatgtatagacgacaatgtttttaatttataaatttcattctttgttaattgcatgggtttttctgcagcttattgtgaataccttggttctgttcaatagaaacattttgtatatattaaatactgaaatatcagtatcgacggtggaagtgcttcatgggcttgctgcacatatttgtaggatactgtatctgcaaatgcaacaacaaatagttttgtacttggttaacagtcttagttaaaacatgagtttattttctaaaagtatccagaataagtaaaattatagaaataagaaaatgttacacaactttgctgttcatacccttaccttcttactacttttggtttggaggagggtatcaccactagaaagtgtgcctccttaagatttcttaaaggaaagttagtttcagtatttcacagcaagttggactacaaaatctagagttgatctgctttttaaaccttcatttaaaagcaaacttggaagaaatttgaaactgatgtttttaatatatgtctgtgttgcctaggttttctttttttaaagaggtatgtaattaaaacctttgtaaaatttgccaactaatattagtgcctgacttcccatatttgtttcatctttttaactgacagtatatctcacttcttctttgaatagaatgagtgagtgatctcagttttcacattttattcagaagctaatccctacttagcaaggcacacattctacagcaagtcatagaaagtttaatccttgtgcctccttagctctcgtatattcagggatctctataaaagttggtgtcttttttcatcatcataaattcatcataatcacagatatttttgggtctaagatattcatataccaaggatggttttgtaaagaattctgggatcattgaattaaggattgtggcttgaagtaactaaagaaaaatactaatttccttaaaaggaattataattatgatttacattttacatcattaatttcccaaattatatttaaccgtaaggaggtgcacatgagtttttagcaaacaggtatgaataagcagctatgtatatgtgtttggggcagaggggagcagattactttaacacacttcagaattaaaatcagttcgtttcatgactctgtgccttaacgtttgtgtgaactaaacttgctgattgaatgaaattcttgggaagccgaacagtaatagcagaaaatgtgaccaaatgagtatcatgtacttaaatcactgaattttatataagcacaagtattaattttaaaaacattatagtttaataaagctgcatttaaaaatatttgggagcaaagacaagcatgctaaatcttcattttgctatggctataagcatatatttttggcaacttatttgcaatattcttgccttaaagtttcctgcaaatttcccccttagtaattcccgaatagcaaaacattaatattccatgattagctctactgtgttgtctcactattaaaatggaattcgttttttcagatcttttctaatggttaataaaacaaatgtcagatcataataacactcaaa

SEQ ID NO: 3539 - DNA, 544 bp, Homo sapiens
  source 1..544: mol_type = genomic DNA
ttggtctaggagggagcgcgccgcacgcgtgagtaaacagccggagctgggaaagtcgagctctggcagcgtctgggtgctgaggggcagaggcggagagaaccctgtcctgatcttcctaggtgggataaatatcggggtgacagtggtaggccgcggggaaccctcagtctgcccaccctccgccccctcgcggcgagatgcctcgttccccgggcttctcccgccctccgccgatctcctccctctgttgaaagctgcccgggaaagtggtggccgacatgacggccaggggtcagagccccctcgcgccgctgttggagactttggaagacccttctgcctcccatggagggcagactgacgcttacctgactctgaccagtcgtatgactggagaagaaggaaaagaagtaattacagaaattgagaaaaaacttcctcggctgtacaaagttttaaagactcacatttccagtcaaaactcggagctgagtagtgctgctctacaagccctggggttttgcttatataatcccaaaat

SEQ ID NO: 3540 - DNA, 7722 bp, Homo sapiens
  source 1..7722: mol_type = genomic DNA
actcctgggcccgcccagccgccatcttggtctaggagggagcgcgccgcacgcggtggccgacatgacggccaggggtcagagccccctcgcgccgctgttggagactttggaagacccttctgcctcccatggagggcagactgacgcttacctgactctgaccagtcgtatgactggagaagaaggaaaagaagtaattacagaaattgagaaaaaacttcctcggctgtacaaagttttaaagactcacatttccagtcaaaactcggagctgagtagtgctgctctacaagccctggggttttgcttatataatcccaaaattacctcagaattatcagaggcaaatgctctagaattgctttcaaaattgaatgataccattaagaattcagacaaaaatgtacgtactagagcactttgggtgatatctaagcagacatttccctctgaagtggttggcaaaatggtatccagtataattgattcattagaaatactgtttaacaaaggagagacgcattctgctgttgttgattttgaagcattaaatgttatcgtaaggctaattgaacaagccccaattcaaatgggagaagaggcagtgaggtgggcaaaactggtcatacctttagtggttcattcagcacaaaaggtacatttgcggggagcaactgctctggagatgggaatgccattattgcttcagaaacagcaagaaatagcatctattacggagcagcttatgactactaaattaatctcagaacttcagaagctatttatgagtaaaaatgagacttacgtgttaaaattatggcctttgtttgtcaaactacttggaaggaccttgcatcgaagtgggagtttcatcaattctctcttgcaactagaagaacttggatttcgtagtggagcacccatgattaaaaagatagcttttattgcttggaagagtttaatagataattttgctttaaatccagatatactatgtagtgcaaaaagactcaagttgttaatgcagcctttgagttccatccatgtgagaacagaaactctagcattaacaaaactagaagtctggtggtatttactgatgagacttggacctcatcttcctgctaattttgaacaggtttgtgtgcctctgattcaaagtacaataagcattgattctaatgcctcacctcagggcaattcgtgtcatgtagctacatctccaggtttaaatcctatgactcctgtacacaaaggtgcttcctccccgtacggagccccgggaactccccgaatgaacctgagttcgaatttaggtggaatggccacaatcccatccattcaacttttgggacttgaaatgttgcttcatttcttgttgggtccagaagccttgagttttgctaagcaaaataaacttgtgctgagcttagagccattggaacatccgttaatcagcagcccttcctttttttccaaacatgcaaatacacttatcactgctgttcatgatagctttgttgcagttggaaaagatgcccccgatgtggttgtcagtgctatctggaaggagctaattagcttggtgaagtcagttactgaatcaggtaacaaaaaagagaaaccaggttctgaagttttgactctcttattaaagtctttggaaagcatagtaaagtctgaagtatttcctgtatcaaaaacgctggtcctcatggaaattacaattaaaggacttcctcagaaagtattaggttcaccagcatatcaggttgctaatatggatattcttaatggaactccagctttgttcttaattcaattaattttcaacaatttcttggaatgtggtgtatcagatgaaaggttctttctcagtttggaatcacttgtaggctgtgttctttctggtccaacttcaccactagctttcagtgactcagttttaaatgttattaatcaaaatgcaaagcagttggaaaataaggagcatctctggaaaatgtggagtgttatagtcaccccattaactgaattgattaatcagaccaatgaagtaaatcaaggtgatgccttagaacataattttagtgccatctatggtgcattgactttaccagtaaaccacattttttcagaacagagatttccagtggccaccatgaagactttgcttagaacttggtcagaattatatagagcatttgctcgttgtgctgctttggtggcaacagcagaagagaacttgtgctgtgaggaactttcttccaagataatgtccagtttggaagatgaaggcttttctaatttgttgttcgtggatagaattatttatattattactgtaatggttgattgcattgacttctcaccatataatattaaatatcagcccaaagttaaatcaccacagagaccttcagattggtccaaaaagaagaatgagcccctagggaaattgacttctttatttaaacttattgtgaaagtgatctattctttccacacactgagcttcaaggaagcacattctgataccctcttcactattggcaactcaatcaccggcattatttccagtgtacttgggcatatttctttgccttctatgatccgaaaaatatttgcaactttaacaagacctctggcattattttatgaaaactcaaagcttgatgaagttcctaaagtatatagttgtctgaacaacaagttagaaaagctactgggagaaattattgcttgtctgcaattcagctacaccggaacttatgatagtgaacttcttgaacaactctccccactattatgcataatatttctgcacaagaataaacagattcgaaaacagagtgctcagttctggaatgccacttttgccaaagtgatgatgttggtttatcctgaagagttaaaaccagtactaacacaagccaaacaaaaatttctgctcctgttgcctggtttggaaactgttgaaatgatggaggaatccagtggaccatattctgatggaacagaaaattcacaactaaatgtgaagataagtggcatggagagaaaatcaaatggaaaaagagattcatttttggcacaaacaaagaataaaaaagaaaatatgaaaccagcagccaaactgaaacttgaatcttcgtctttaaaagtaaagggtgaaattcttttggaagaggaaaagtctactgactttgtgtttatacctccagaaggaaaagatgcaaaggaaagaatattaactgatcatcaaaaagaagttctcaaaacaaagcggtgtgatattcctgccatgtataataatctggatgtttcccaagataccttatttactcagtatagtcaggaagagcctatggaaattcctactttaaccagaaaaccaaaggaggattctaagatgatgattacggaggagcaaatggacagtgacattgtcattcctcaagatgtcacggaagactgtggtatggctgaacatcttgaaaagtcctccctttcgaataatgagtgtggttctcttgacaaaaccagtccagaaatgtcaaacagtaataatgatgaaagaaaaaaagctttaatttcatcaaggaaaacatcaactgaatgtgcatctagtacagaaaattctttcgttgtcagcagtagttcagtttctaataccactgttgctggaactcccccataccctacaagtcggaggcaaacctttattactttggagaagtttgatggttcagaaaatagaccttttagtccatcccccttgaataatatttcatcaactgttacagtgaaaaataaccaggaaaccatgattaaaacagattttctaccaaaagcaaagcaaagagaagggactttttcaaaatctgattctgaaaaaatagtgaatggaactaagagatcaagccggagagctggtaaagctgaacaaacagggaataaaaggtctaagcccttaatgagatctgagccggagaaaaatactgaggaatctgttgaaggcattgtagtcttagaaaataacccacctggtttgcttaatcaaacagaatgtgtgtcagataatcaggttcatctttctgaatctacaatggagcatgacaatacaaagcttaaagcagcaacagtggaaaatgctgtattattggaaactaatactgtagaggagaaaaatgtagaaattaatttggaatccaaagagaatacacccccagtagtaatatcagcagatcaaatggtaaatgaggatagtcaggttcagataactccaaatcagaaaacccttagacggtcttcaaggcgacgttcagaagtagtagagtctaccactgaaagccaagataaggaaaatagtcatcaaaaaaaggaacgacgtaaggaagaagaaaaacctcttcagaagagtccattgcatataaaagatgatgtgttacctaaacaaaaactgattgctgaacaaactctacaggagaatttaattgagaaaggaagtaatttacatgagaagactcttggggaaactagtgctaatgcagaaactgaacaaaataaaaaaaaggcagaccctgagaacattaagtctgagggggatggtacccaggacattgtagataagtcctctgagaaactagtcagaggccgaacacggtatcaaactagaagagcatctcagggtttgctttccagcattgaaaactcagaatctgatagttcggaggcaaaagaagaaggttctaggaagaagagatctggaaaatggaaaaacaaaagcaatgaaagtgttgacattcaagatcaagaagagaaagtggtgaaacaggaatgtataaaagctgaaaatcagtcacatgattataaagcaacttctgaagaagatgtaagcataaaatctccgatttgcgaaaaacaagatgaaagtaatactgtaatatgtcaggattctacagtaacttcagatttgttgcaagttcctgatgatttaccaaatgtgtgtgaggaaaaaaatgaaactagcaaatatgcagaatattcctttacaagtctacctgtgccagaatcaaatctaaggactagaaatgccattaagagattacataagcgagactcttttgataattgtagtttgggagaatcctcaaaaatagggatatcagatatttcttcgctttcagaaaaaacttttcaaacacttgaatgccaacacaagagaagtaggagggtgaggagatctaaaggttgtgattgctgtggggaaaaatcacaacctcaggaaaagtcactcattgggttaaagaatacagaaaataatgacgtagagattagtgaaacaaaaaaggcagatgtgcaagcacctgtaagcccatcagaaacttctcaagctaatccatattctgaaggacaatttttagatgaacatcatagtgtgaattttcatttgggtctcaaagaggataatgatactattaatgattcattaattgtttctgaaaccaaatcaaaagaaaacactatgcaagaatctcttccttctggaatagtaaactttagagaggaaatttgtgatatggattctagtgaagcaatgtctcttgaaagccaggagtcacctaatgaaaattttaaaactgttggcccgtgtttaggagactcgaaaaatgtttcacaggaatctttggagacaaaagaagaaaaaccagaagaaaccccaaaaatggaactgagtctagagaatgttactgttgaaggaaatgcatgtaaagtaacagaatccaatctagagaaagcaaaaactatggaattgaatgtaggaaatgaagctagctttcatggacaagagagaaccaaaactggtatttctgaagaagcagcaatagaagaaaataaaagaaatgatgactctgaagcagacacagctaaactgaatgccaaagaagtagcaactgaggaatttaattcagatattagtctttctgataatactacacctgtaaaattgaatgctcaaactgagatttctgaacaaacagcagctggggaactagatggaggaaatgatgtatctgatctacactcatctgaagaaacgaataccaaaatgaaaaataatgaagaaatgatgatcggcgaggcaatggctgaaactggccatgatggtgaaacagagaatgagggcataactaccaaaacctcaaagcctgatgaagctgaaacaaacatgttgactgcagaaatggacaactttgtttgtgacacagttgaaatgagcactgaagaaggaatcattgacgctaataaaactgaaacaaatactgagtatagtaaatctgaagaaaaattagataacaatcaaatggtaatggaaagtgatattttacaggaagatcaccatacttcacagaaagtggaggaaccatcacagtgtctggcatctggaacagctatctctgagctaataatagaagacaataatgcatctcctcaaaaactaagggaacttgatccttcacttgtgtcagcaaatgacagtcctagtggcatgcagacacgctgtgtctggtctcctttggcttctccgtctacgagcattttaaagagaggactaaaaagatcccaagaagatgaaatctcatcacctgttaataaggttcgccgtgtctcctttgcagatccaatataccaagcaggattggcagatgacattgatagacggtgctctattgttaggtcccattcttccaatagttctcccataggaaaaagtgttaaaacttctcctactacacaatctaagatttcagaaatggccaaagaatccataccatgcccaacagaaagtgtttacccaccattggtgaactgtgtggcaccagttgacatcattttacctcagattacatcaaacatgtgggcaagaggcctgggacaactcattagagctaagaatataaaaactattggtgatttgagtactcttacagcatctgaaataaaaactcttcctatccgttctccaaaagtgtccaatgtaaaaaaggctctcagaatatatcatgagcagcaggtgaagactcgtggactagaagagattccagtttttgatatttctgaaaaaacagtaaatggaatagaaaataaatctttgtcacctgatgaagaaagacttgtctcagatataattgatcctgttgctttagaaattccattatccaaaaaccttctggcacagattagtgctcttgctcttcagctggattcagaagatcttcataattattcaggaagccaactatttgaaatgcacgagaaactaagttgtatggcaaactctgtaataaaaaatctacagtcacgttggagatcaccatcccatgaaaattctatttagtattttcagagaaaattgaaggtttttttaaacatcactggatttcttgattgaggaaacaagttctgaaataatagcacaatttcaaagaagagactctttgcaaagttgataacatttcaaaccctgaaggacagtgacttattatgtaagttcaattttgtaagttcattatgtaagatccttttttttttcataatatgtattcttggctgctatgcgtggtttttcaggaaatttaattatcttactgagatgtgaaagcaaaactagtaacagaacttacattttatttcatgctttcttaaacccgtgca

SEQ ID NO: 3541 - DNA, 7992 bp, Homo sapiens
  source 1..7992: mol_type = genomic DNA
ccctccgccccctcgcggcgagatgcctcgttccccgggcttctcccgccctccgccgatctcctccctctgttgaaagctgcccgggaaagtggtggcgggagcgggcccaggcccgaatgtggcgtgggctcaggtgtctggtgtcgggcgccggaggaggttcgcgctggggtttggtgattcggaggcctggggtgcagacgcggcgtggctgtgaggcccgggcgggcgtgcgggtgtgagggccggactcacactgggccgccgcggggctgtttccatcggtcactggattttctcctcttccggttcgggcctcagggtggccgacatgacggccaggggtcagagccccctcgcgccgctgttggagactttggaagacccttctgcctcccatggagggcagactgacgcttacctgactctgaccagtcgtatgactggagaagaaggaaaagaagtaattacagaaattgagaaaaaacttcctcggctgtacaaagttttaaagactcacatttccagtcaaaactcggagctgagtagtgctgctctacaagccctggggttttgcttatataatcccaaaattacctcagaattatcagaggcaaatgctctagaattgctttcaaaattgaatgataccattaagaattcagacaaaaatgtacgtactagagcactttgggtgatatctaagcagacatttccctctgaagtggttggcaaaatggtatccagtataattgattcattagaaatactgtttaacaaaggagagacgcattctgctgttgttgattttgaagcattaaatgttatcgtaaggctaattgaacaagccccaattcaaatgggagaagaggcagtgaggtgggcaaaactggtcatacctttagtggttcattcagcacaaaaggtacatttgcggggagcaactgctctggagatgggaatgccattattgcttcagaaacagcaagaaatagcatctattacggagcagcttatgactactaaattaatctcagaacttcagaagctatttatgagtaaaaatgagacttacgtgttaaaattatggcctttgtttgtcaaactacttggaaggaccttgcatcgaagtgggagtttcatcaattctctcttgcaactagaagaacttggatttcgtagtggagcacccatgattaaaaagatagcttttattgcttggaagagtttaatagataattttgctttaaatccagatatactatgtagtgcaaaaagactcaagttgttaatgcagcctttgagttccatccatgtgagaacagaaactctagcattaacaaaactagaagtctggtggtatttactgatgagacttggacctcatcttcctgctaattttgaacaggtttgtgtgcctctgattcaaagtacaataagcattgattctaatgcctcacctcagggcaattcgtgtcatgtagctacatctccaggtttaaatcctatgactcctgtacacaaaggtgcttcctccccgtacggagccccgggaactccccgaatgaacctgagttcgaatttaggtggaatggccacaatcccatccattcaacttttgggacttgaaatgttgcttcatttcttgttgggtccagaagccttgagttttgctaagcaaaataaacttgtgctgagcttagagccattggaacatccgttaatcagcagcccttcctttttttccaaacatgcaaatacacttatcactgctgttcatgatagctttgttgcagttggaaaagatgcccccgatgtggttgtcagtgctatctggaaggagctaattagcttggtgaagtcagttactgaatcaggtaacaaaaaagagaaaccaggttctgaagttttgactctcttattaaagtctttggaaagcatagtaaagtctgaagtatttcctgtatcaaaaacgctggtcctcatggaaattacaattaaaggacttcctcagaaagtattaggttcaccagcatatcaggttgctaatatggatattcttaatggaactccagctttgttcttaattcaattaattttcaacaatttcttggaatgtggtgtatcagatgaaaggttctttctcagtttggaatcacttgtaggctgtgttctttctggtccaacttcaccactagctttcagtgactcagttttaaatgttattaatcaaaatgcaaagcagttggaaaataaggagcatctctggaaaatgtggagtgttatagtcaccccattaactgaattgattaatcagaccaatgaagtaaatcaaggtgatgccttagaacataattttagtgccatctatggtgcattgactttaccagtaaaccacattttttcagaacagagatttccagtggccaccatgaagactttgcttagaacttggtcagaattatatagagcatttgctcgttgtgctgctttggtggcaacagcagaagagaacttgtgctgtgaggaactttcttccaagataatgtccagtttggaagatgaaggcttttctaatttgttgttcgtggatagaattatttatattattactgtaatggttgattgcattgacttctcaccatataatattaaatatcagcccaaagttaaatcaccacagagaccttcagattggtccaaaaagaagaatgagcccctagggaaattgacttctttatttaaacttattgtgaaagtgatctattctttccacacactgagcttcaaggaagcacattctgataccctcttcactattggcaactcaatcaccggcattatttccagtgtacttgggcatatttctttgccttctatgatccgaaaaatatttgcaactttaacaagacctctggcattattttatgaaaactcaaagcttgatgaagttcctaaagtatatagttgtctgaacaacaagttagaaaagctactgggagaaattattgcttgtctgcaattcagctacaccggaacttatgatagtgaacttcttgaacaactctccccactattatgcataatatttctgcacaagaataaacagattcgaaaacagagtgctcagttctggaatgccacttttgccaaagtgatgatgttggtttatcctgaagagttaaaaccagtactaacacaagccaaacaaaaatttctgctcctgttgcctggtttggaaactgttgaaatgatggaggaatccagtggaccatattctgatggaacagaaaattcacaactaaatgtgaagataagtggcatggagagaaaatcaaatggaaaaagagattcatttttggcacaaacaaagaataaaaaagaaaatatgaaaccagcagccaaactgaaacttgaatcttcgtctttaaaagtaaagggtgaaattcttttggaagaggaaaagtctactgactttgtgtttatacctccagaaggaaaagatgcaaaggaaagaatattaactgatcatcaaaaagaagttctcaaaacaaagcggtgtgatattcctgccatgtataataatctggatgtttcccaagataccttatttactcagtatagtcaggaagagcctatggaaattcctactttaaccagaaaaccaaaggaggattctaagatgatgattacggaggagcaaatggacagtgacattgtcattcctcaagatgtcacggaagactgtggtatggctgaacatcttgaaaagtcctccctttcgaataatgagtgtggttctcttgacaaaaccagtccagaaatgtcaaacagtaataatgatgaaagaaaaaaagctttaatttcatcaaggaaaacatcaactgaatgtgcatctagtacagaaaattctttcgttgtcagcagtagttcagtttctaataccactgttgctggaactcccccataccctacaagtcggaggcaaacctttattactttggagaagtttgatggttcagaaaatagaccttttagtccatcccccttgaataatatttcatcaactgttacagtgaaaaataaccaggaaaccatgattaaaacagattttctaccaaaagcaaagcaaagagaagggactttttcaaaatctgattctgaaaaaatagtgaatggaactaagagatcaagccggagagctggtaaagctgaacaaacagggaataaaaggtctaagcccttaatgagatctgagccggagaaaaatactgaggaatctgttgaaggcattgtagtcttagaaaataacccacctggtttgcttaatcaaacagaatgtgtgtcagataatcaggttcatctttctgaatctacaatggagcatgacaatacaaagcttaaagcagcaacagtggaaaatgctgtattattggaaactaatactgtagaggagaaaaatgtagaaattaatttggaatccaaagagaatacacccccagtagtaatatcagcagatcaaatggtaaatgaggatagtcaggttcagataactccaaatcagaaaacccttagacggtcttcaaggcgacgttcagaagtagtagagtctaccactgaaagccaagataaggaaaatagtcatcaaaaaaaggaacgacgtaaggaagaagaaaaacctcttcagaagagtccattgcatataaaagatgatgtgttacctaaacaaaaactgattgctgaacaaactctacaggagaatttaattgagaaaggaagtaatttacatgagaagactcttggggaaactagtgctaatgcagaaactgaacaaaataaaaaaaaggcagaccctgagaacattaagtctgagggggatggtacccaggacattgtagataagtcctctgagaaactagtcagaggccgaacacggtatcaaactagaagagcatctcagggtttgctttccagcattgaaaactcagaatctgatagttcggaggcaaaagaagaaggttctaggaagaagagatctggaaaatggaaaaacaaaagcaatgaaagtgttgacattcaagatcaagaagagaaagtggtgaaacaggaatgtataaaagctgaaaatcagtcacatgattataaagcaacttctgaagaagatgtaagcataaaatctccgatttgcgaaaaacaagatgaaagtaatactgtaatatgtcaggattctacagtaacttcagatttgttgcaagttcctgatgatttaccaaatgtgtgtgaggaaaaaaatgaaactagcaaatatgcagaatattcctttacaagtctacctgtgccagaatcaaatctaaggactagaaatgccattaagagattacataagcgagactcttttgataattgtagtttgggagaatcctcaaaaatagggatatcagatatttcttcgctttcagaaaaaacttttcaaacacttgaatgccaacacaagagaagtaggagggtgaggagatctaaaggttgtgattgctgtggggaaaaatcacaacctcaggaaaagtcactcattgggttaaagaatacagaaaataatgacgtagagattagtgaaacaaaaaaggcagatgtgcaagcacctgtaagcccatcagaaacttctcaagctaatccatattctgaaggacaatttttagatgaacatcatagtgtgaattttcatttgggtctcaaagaggataatgatactattaatgattcattaattgtttctgaaaccaaatcaaaagaaaacactatgcaagaatctcttccttctggaatagtaaactttagagaggaaatttgtgatatggattctagtgaagcaatgtctcttgaaagccaggagtcacctaatgaaaattttaaaactgttggcccgtgtttaggagactcgaaaaatgtttcacaggaatctttggagacaaaagaagaaaaaccagaagaaaccccaaaaatggaactgagtctagagaatgttactgttgaaggaaatgcatgtaaagtaacagaatccaatctagagaaagcaaaaactatggaattgaatgtaggaaatgaagctagctttcatggacaagagagaaccaaaactggtatttctgaagaagcagcaatagaagaaaataaaagaaatgatgactctgaagcagacacagctaaactgaatgccaaagaagtagcaactgaggaatttaattcagatattagtctttctgataatactacacctgtaaaattgaatgctcaaactgagatttctgaacaaacagcagctggggaactagatggaggaaatgatgtatctgatctacactcatctgaagaaacgaataccaaaatgaaaaataatgaagaaatgatgatcggcgaggcaatggctgaaactggccatgatggtgaaacagagaatgagggcataactaccaaaacctcaaagcctgatgaagctgaaacaaacatgttgactgcagaaatggacaactttgtttgtgacacagttgaaatgagcactgaagaaggaatcattgacgctaataaaactgaaacaaatactgagtatagtaaatctgaagaaaaattagataacaatcaaatggtaatggaaagtgatattttacaggaagatcaccatacttcacagaaagtggaggaaccatcacagtgtctggcatctggaacagctatctctgagctaataatagaagacaataatgcatctcctcaaaaactaagggaacttgatccttcacttgtgtcagcaaatgacagtcctagtggcatgcagacacgctgtgtctggtctcctttggcttctccgtctacgagcattttaaagagaggactaaaaagatcccaagaagatgaaatctcatcacctgttaataaggttcgccgtgtctcctttgcagatccaatataccaagcaggattggcagatgacattgatagacggtgctctattgttaggtcccattcttccaatagttctcccataggaaaaagtgttaaaacttctcctactacacaatctaagatttcagaaatggccaaagaatccataccatgcccaacagaaagtgtttacccaccattggtgaactgtgtggcaccagttgacatcattttacctcagattacatcaaacatgtgggcaagaggcctgggacaactcattagagctaagaatataaaaactattggtgatttgagtactcttacagcatctgaaataaaaactcttcctatccgttctccaaaagtgtccaatgtaaaaaaggctctcagaatatatcatgagcagcaggtgaagactcgtggactagaagagattccagtttttgatatttctgaaaaaacagtaaatggaatagaaaataaatctttgtcacctgatgaagaaagacttgtctcagatataattgatcctgttgctttagaaattccattatccaaaaaccttctggcacagattagtgctcttgctcttcagctggattcagaagatcttcataattattcaggaagccaactatttgaaatgcacgagaaactaagttgtatggcaaactctgtaataaaaaatctacagtcacgttggagatcaccatcccatgaaaattctatttagtattttcagagaaaattgaaggtttttttaaacatcactggatttcttgattgaggaaacaagttctgaaataatagcacaatttcaaagaagagactctttgcaaagttgataacatttcaaaccctgaaggacagtgacttattatgtaagttcaattttgtaagttcattatgtaagatccttttttttttcataatatgtattcttggctgctatgcgtggtttttcaggaaatttaattatcttactgagatgtgaaagcaaaactagtaacagaacttacattttatttcatgctttcttaaacccgtgca

SEQ ID NO: 3542 - DNA, 1605 bp, Homo sapiens
  source 1..1605: mol_type = genomic DNA
ccagccgccatcttggtctaggagggagcgcgccgcacgcggtggccgacatgacggccaggggtcagagccccctcgcgccgctgttggagactttggaagacccttctgcctcccatggagggcagactgacgcttacctgactctgaccagtcgtatgactggagaagaaggaaaagaagtaattacagaaattgagaaaaaacttcctcggctgtacaaagttttaaagactcacatttccagtcaaaactcggagctgagtagtgctgctctacaagccctggggttttgcttatataatcccaaaattacctcagaattatcagaggcaaatgctctagaattgctttcaaaattgaatgataccattaagaattcagacaaaaatgtacgtactagagcactttgggtgatatctaagcagacatttccctctgaagtggttggcaaaatggtatccagtataattgattcattagaaatactgtttaacaaaggagagacgcattctgctgttgttgattttgaagcattaaatgttatcgtaaggctaattgaacaagccccaattcaaatgggagaagaggcagtgaggtgggcaaaactggtcatacctttagtggttcattcagcacaaaaggtacatttgcggggagcaactgctctggagatgggaatgccattattgcttcagaaacagcaagaaatagcatctattacggagcagcttatgactactaccttgcatcgaagtgggagtttcatcaattctctcttgcaactagaagaacttggatttcgtagtggagcacccatgattaaaaagatagcttttattgcttggaagagtttaatagataattttgctttaaatccagatatactatgtagtgcaaaaagactcaagttgttaatgcagcctttgagttccatccatgtgagaacagaaactctagcattaacaaaactagaagtctggtggtatttactgatgagacttggacctcatcttcctgctaattttgaacaggtgcttcctccccgtacggagccccgggaactccccgaatgaacctgagttcgaatttaggtggaatggccacaatcccatccattcaacttttgggacttgaaatgttgcttcatttcttgttgggtccagaagccttgagttttgctaagcaaaataaacttgtgctgagcttagagccattggaacatccgttaatcagcagcccttcctttttttccaaacatgcaaatacacttatcactgctgttcatgatagctttgttgcagttggaaaagatgcccccgatgtggttgtcagtgctatctggaaggagctaattagcttggtgaagtcagttactgaatcaggtaacaaaaaagagaaaccaggttctgaagttttgactctcttattaaagtctttggaaagcatagtaaagtctgaagtatttcctgtatcaaaaacgctggtcctcatggaaattacaattaaaggacttcctcagaaagtattaggttcaccagcatatcaggttgctaatatggatattcttaatggaactccagctttgttcttaattcaattaat

SEQ ID NO: 3543 - DNA, 7897 bp, Homo sapiens
  source 1..7897: mol_type = genomic DNA
cgcactcctgggcccgcccagccgccatcttggtctaggagggagcgcgccgcacgcgtgagtaaacagccggagctgggaaagtcgagctctggcagcgtctgggtgctgaggggcagaggcggagagaaccctgtcctgatcttcctagggtggccgacatgacggccaggggtcagagccccctcgcgccgctgttggagactttggaagacccttctgcctcccatggagggcagactgacgcttacctgactctgaccagtcgtatgactggagaagaaggaaaagaagtaattacagaaattgagaaaaaacttcctcggctgtacaaagttttaaagactcacatttccagtcaaaactcggagctgagtagtgctgctctacaagccctggggttttgcttatataatcccaaaattacctcagaattatcagaggcaaatgctctagaattgctttcaaaattgaatgataccattaagaattcagacaaaaatgtacgtactagagcactttgggtgatatctaagcagacatttccctctgaagtggttggcaaaatggtatccagtataattgattcattagaaatactgtttaacaaaggagagacgcattctgctgttgttgattttgaagcattaaatgttatcgtaaggctaattgaacaagccccaattcaaatgggagaagaggcagtgaggtgggcaaaactggtcatacctttagtggttcattcagcacaaaaggtacatttgcggggagcaactgctctggagatgggaatgccattattgcttcagaaacagcaagaaatagcatctattacggagcagcttatgactactaaattaatctcagaacttcagaagctatttatgagtaaaaatgagacttacgtgttaaaattatggcctttgtttgtcaaactacttggaaggaccttgcatcgaagtgggagtttcatcaattctctcttgcaactagaagaacttggatttcgtagtggagcacccatgattaaaaagatagcttttattgcttggaagagtttaatagataattttgctttaaatccagatatactatgtagtgcaaaaagactcaagttgttaatgcagcctttgagttccatccatgtgagaacagaaactctagcattaacaaaactagaagtctggtggtatttactgatgagacttggacctcatcttcctgctaattttgaacaggtttgtgtgcctctgattcaaagtacaataagcattgattctaatgcctcacctcagggcaattcgtgtcatgtagctacatctccaggtttaaatcctatgactcctgtacacaaaggtgcttcctccccgtacggagccccgggaactccccgaatgaacctgagttcgaatttaggtggaatggccacaatcccatccattcaacttttgggacttgaaatgttgcttcatttcttgttgggtccagaagccttgagttttgctaagcaaaataaacttgtgctgagcttagagccattggaacatccgttaatcagcagcccttcctttttttccaaacatgcaaatacacttatcactgctgttcatgatagctttgttgcagttggaaaagatgcccccgatgtggttgtcagtgctatctggaaggagctaattagcttggtgaagtcagttactgaatcaggtaacaaaaaagagaaaccaggttctgaagttttgactctcttattaaagtctttggaaagcatagtaaagtctgaagtatttcctgtatcaaaaacgctggtcctcatggaaattacaattaaaggacttcctcagaaagtattaggttcaccagcatatcaggttgctaatatggatattcttaatggaactccagctttgttcttaattcaattaattttcaacaatttcttggaatgtggtgtatcagatgaaaggttctttctcagtttggaatcacttgtaggctgtgttctttctggtccaacttcaccactagctttcagtgactcagttttaaatgttattaatcaaaatgcaaagcagttggaaaataaggagcatctctggaaaatgtggagtgttatagtcaccccattaactgaattgattaatcagaccaatgaagtaaatcaaggtgatgccttagaacataattttagtgccatctatggtgcattgactttaccagtaaaccacattttttcagaacagagatttccagtggccaccatgaagactttgcttagaacttggtcagaattatatagagcatttgctcgttgtgctgctttggtggcaacagcagaagagaacttgtgctgtgaggaactttcttccaagataatgtccagtttggaagatgaaggcttttctaatttgttgttcgtggatagaattatttatattattactgtaatggttgattgcattgacttctcaccatataatattaaatatcagcccaaagttaaatcaccacagagaccttcagattggtccaaaaagaagaatgagcccctagggaaattgacttctttatttaaacttattgtgaaagtgatctattctttccacacactgagcttcaaggaagcacattctgataccctcttcactattggcaactcaatcaccggcattatttccagtgtacttgggcatatttctttgccttctatgatccgaaaaatatttgcaactttaacaagacctctggcattattttatgaaaactcaaagcttgatgaagttcctaaagtatatagttgtctgaacaacaagttagaaaagctactgggagaaattattgcttgtctgcaattcagctacaccggaacttatgatagtgaacttcttgaacaactctccccactattatgcataatatttctgcacaagaataaacagattcgaaaacagagtgctcagttctggaatgccacttttgccaaagtgatgatgttggtttatcctgaagagttaaaaccagtactaacacaagccaaacaaaaatttctgctcctgttgcctggtttggaaactgttgaaatgatggaggaatccagtggaccatattctgatggaacagaaaattcacaactaaatgtgaagataagtggcatggagagaaaatcaaatggaaaaagagattcatttttggcacaaacaaagaataaaaaagaaaatatgaaaccagcagccaaactgaaacttgaatcttcgtctttaaaagtaaagggtgaaattcttttggaagaggaaaagtctactgactttgtgtttatacctccagaaggaaaagatgcaaaggaaagaatattaactgatcatcaaaaagaagttctcaaaacaaagcggtgtgatattcctgccatgtataataatctggatgtttcccaagataccttatttactcagtatagtcaggaagagcctatggaaattcctactttaaccagaaaaccaaaggaggattctaagatgatgattacggaggagcaaatggacagtgacattgtcattcctcaagatgtcacggaagactgtggtatggctgaacatcttgaaaagtcctccctttcgaataatgagtgtggttctcttgacaaaaccagtccagaaatgtcaaacagtaataatgatgaaagaaaaaaagctttaatttcatcaaggaaaacatcaactgaatgtgcatctagtacagaaaattctttcgttgtcagcagtagttcagtttctaataccactgttgctggaactcccccataccctacaagtcggaggcaaacctttattactttggagaagtttgatggttcagaaaatagaccttttagtccatcccccttgaataatatttcatcaactgttacagtgaaaaataaccaggaaaccatgattaaaacagattttctaccaaaagcaaagcaaagagaagggactttttcaaaatctgattctgaaaaaatagtgaatggaactaagagatcaagccggagagctggtaaagctgaacaaacagggaataaaaggtctaagcccttaatgagatctgagccggagaaaaatactgaggaatctgttgaaggcattgtagtcttagaaaataacccacctggtttgcttaatcaaacagaatgtgtgtcagataatcaggttcatctttctgaatctacaatggagcatgacaatacaaagcttaaagcagcaacagtggaaaatgctgtattattggaaactaatactgtagaggagaaaaatgtagaaattaatttggaatccaaagagaatacacccccagtagtaatatcagcagatcaaatggtaaatgaggatagtcaggttcagataactccaaatcagaaaacccttagacggtcttcaaggcgacgttcagaagtagtagagtctaccactgaaagccaagataaggaaaatagtcatcaaaaaaaggaacgacgtaaggaagaagaaaaacctcttcagaagagtccattgcatataaaagatgatgtgttacctaaacaaaaactgattgctgaacaaactctacaggagaatttaattgagaaaggaagtaatttacatgagaagactcttggggaaactagtgctaatgcagaaactgaacaaaataaaaaaaaggcagaccctgagaacattaagtctgagggggatggtacccaggacattgtagataagtcctctgagaaactagtcagaggccgaacacggtatcaaactagaagagcatctcagggtttgctttccagcattgaaaactcagaatctgatagttcggaggcaaaagaagaaggttctaggaagaagagatctggaaaatggaaaaacaaaagcaatgaaagtgttgacattcaagatcaagaagagaaagtggtgaaacaggaatgtataaaagctgaaaatcagtcacatgattataaagcaacttctgaagaagatgtaagcataaaatctccgatttgcgaaaaacaagatgaaagtaatactgtaatatgtcaggattctacagtaacttcagatttgttgcaagttcctgatgatttaccaaatgtgtgtgaggaaaaaaatgaaactagcaaatatgcagaatattcctttacaagtctacctgtgccagaatcaaatctaaggactagaaatgccattaagagattacataagcgagactcttttgataattgtagtttgggagaatcctcaaaaatagggatatcagatatttcttcgctttcagaaaaaacttttcaaacacttgaatgccaacacaagagaagtaggagggtgaggagatctaaaggttgtgattgctgtggggaaaaatcacaacctcaggaaaagtcactcattgggttaaagaatacagaaaataatgacgtagagattagtgaaacaaaaaaggcagatgtgcaagcacctgtaagcccatcagaaacttctcaagctaatccatattctgaaggacaatttttagatgaacatcatagtgtgaattttcatttgggtctcaaagaggataatgatactattaatgattcattaattgtttctgaaaccaaatcaaaagaaaacactatgcaagaatctcttccttctggaatagtaaactttagagaggaaatttgtgatatggattctagtgaagcaatgtctcttgaaagccaggagtcacctaatgaaaattttaaaactgttggcccgtgtttaggagactcgaaaaatgtttcacaggaatctttggagacaaaagaagaaaaaccagaagaaaccccaaaaatggaactgagtctagagaatgttactgttgaaggaaatgcatgtaaagtaacagaatccaatctagagaaagcaaaaactatggaattgaatgtaggaaatgaagctagctttcatggacaagagagaaccaaaactggtatttctgaagaagcagcaatagaagaaaataaaagaaatgatgactctgaagcagacacagctaaactgaatgccaaagaagtagcaactgaggaatttaattcagatattagtctttctgataatactacacctgtaaaattgaatgctcaaactgagatttctgaacaaacagcagctggggaactagatggaggaaatgatgtatctgatctacactcatctgaagaaacgaataccaaaatgaaaaataatgaagaaatgatgatcggcgaggcaatggctgaaactggccatgatggtgaaacagagaatgagggcataactaccaaaacctcaaagcctgatgaagctgaaacaaacatgttgactgcagaaatggacaactttgtttgtgacacagttgaaatgagcactgaagaaggaatcattgacgctaataaaactgaaacaaatactgagtatagtaaatctgaagaaaaattagataacaatcaaatggtaatggaaagtgatattttacaggaagatcaccatacttcacagaaagtggaggaaccatcacagtgtctggcatctggaacagctatctctgagctaataatagaagacaataatgcatctcctcaaaaactaagggaacttgatccttcacttgtgtcagcaaatgacagtcctagtggcatgcagacacgctgtgtctggtctcctttggcttctccgtctacgagcattttaaagagaggactaaaaagatcccaagaagatgaaatctcatcacctgttaataaggttcgccgtgtctcctttgcagatccaatataccaagcaggattggcagatgacattgatagacggtgctctattgttaggtcccattcttccaatagttctcccataggaaaaagtgttaaaacttctcctactacacaatctaagcataataccacttcagccaaaggatttctgtccccaggatcacgtagccctaaatttaagagctcaaagaagtgtttaatttcagaaatggccaaagaatccataccatgcccaacagaaagtgtttacccaccattggtgaactgtgtggcaccagttgacatcattttacctcagattacatcaaacatgtgggcaagaggcctgggacaactcattagagctaagaatataaaaactattggtgatttgagtactcttacagcatctgaaataaaaactcttcctatccgttctccaaaagtgtccaatgtaaaaaaggctctcagaatatatcatgagcagcaggtgaagactcgtggactagaagagattccagtttttgatatttctgaaaaaacagtaaatggaatagaaaataaatctttgtcacctgatgaagaaagacttgtctcagatataattgatcctgttgctttagaaattccattatccaaaaaccttctggcacagattagtgctcttgctcttcagctggattcagaagatcttcataattattcaggaagccaactatttgaaatgcacgagaaactaagttgtatggcaaactctgtaataaaaaatctacagtcacgttggagatcaccatcccatgaaaattctatttagtattttcagagaaaattgaaggtttttttaaacatcactggatttcttgattgaggaaacaagttctgaaataatagcacaatttcaaagaagagactctttgcaaagttgataacatttcaaaccctgaaggacagtgacttattatgtaagttcaattttgtaagttcattatgtaagatccttttttttttcataatatgtattcttggctgctatgcgtggtttttcaggaaatttaattatcttactgagatgtgaaagcaaaactagtaacagaacttacattttatttcatgctttcttaaacccgtgca

SEQ ID NO: 3544 - DNA, 8053 bp, Homo sapiens
  source 1..8053: mol_type = genomic DNA
cgcactcctgggcccgcccagccgccatcttggtctaggagggagcgcgccgcacgcgtgagtaaacagccggagctgggaaagtcgagctctggcagcgtctgggtgctgaggggcagaggcggagagaaccctgtcctgatcttcctagggtggccgacatgacggccaggggtcagagccccctcgcgccgctgttggagactttggaagacccttctgcctcccatggagggcagactgacgcttacctgactctgaccagtcgtatgactggagaagaaggaaaagaagtaattacagaaattgagaaaaaacttcctcggctgtacaaagttttaaagactcacatttccagtcaaaactcggagctgagtagtgctgctctacaagccctggggttttgcttatataatcccaaaattacctcagaattatcagaggcaaatgctctagaattgctttcaaaattgaatgataccattaagaattcagacaaaaatgtacgtactagagcactttgggtgatatctaagcagacatttccctctgaagtggttggcaaaatggtatccagtataattgattcattagaaatactgtttaacaaaggagagacgcattctgctgttgttgattttgaagcattaaatgttatcgtaaggctaattgaacaagccccaattcaaatgggagaagaggcagtgaggtgggcaaaactggtcatacctttagtggttcattcagcacaaaaggtacatttgcggggagcaactgctctggagatgggaatgccattattgcttcagaaacagcaagaaatagcatctattacggagcagcttatgactactaaattaatctcagaacttcagaagctatttatgagtaaaaatgagacttacgtgttaaaattatggcctttgtttgtcaaactacttggaaggaccttgcatcgaagtgggagtttcatcaattctctcttgcaactagaagaacttggatttcgtagtggagcacccatgattaaaaagatagcttttattgcttggaagagtttaatagataattttgctttaaatccagatatactatgtagtgcaaaaagactcaagttgttaatgcagcctttgagttccatccatgtgagaacagaaactctagcattaacaaaactagaagtctggtggtatttactgatgagacttggacctcatcttcctgctaattttgaacaggtttgtgtgcctctgattcaaagtacaataagcattgattctaatgcctcacctcagggcaattcgtgtcatgtagctacatctccaggtttaaatcctatgactcctgtacacaaaggtgcttcctccccgtacggagccccgggaactccccgaatgaacctgagttcgaatttaggtggaatggccacaatcccatccattcaacttttgggacttgaaatgttgcttcatttcttgttgggtccagaagccttgagttttgctaagcaaaataaacttgtgctgagcttagagccattggaacatccgttaatcagcagcccttcctttttttccaaacatgcaaatacacttatcactgctgttcatgatagctttgttgcagttggaaaagatgcccccgatgtggttgtcagtgctatctggaaggagctaattagcttggtgaagtcagttactgaatcaggtaacaaaaaagagaaaccaggttctgaagttttgactctcttattaaagtctttggaaagcatagtaaagtctgaagtatttcctgtatcaaaaacgctggtcctcatggaaattacaattaaaggacttcctcagaaagtattaggttcaccagcatatcaggttgctaatatggatattcttaatggaactccagctttgttcttaattcaattaattttcaacaatttcttggaatgtggtgtatcagatgaaaggttctttctcagtttggaatcacttgtaggctgtgttctttctggtccaacttcaccactagctttcagtgactcagttttaaatgttattaatcaaaatgcaaagcagttggaaaataaggagcatctctggaaaatgtggagtgttatagtcaccccattaactgaattgattaatcagaccaatgaagtaaatcaaggtgatgccttagaacataattttagtgccatctatggtgcattgactttaccagtaaaccacattttttcagaacagagatttccagtggccaccatgaagactttgcttagaacttggtcagaattatatagagcatttgctcgttgtgctgctttggtggcaacagcagaagagaacttgtgctgtgaggaactttcttccaagataatgtccagtttggaagatgaaggcttttctaatttgttgttcgtggatagaattatttatattattactgtaatggttgattgcattgacttctcaccatataatattaaatatcagcccaaagttaaatcaccacagagaccttcagattggtccaaaaagaagaatgagcccctagggaaattgacttctttatttaaacttattgtgaaagtgatctattctttccacacactgagcttcaaggaagcacattctgataccctcttcactattggcaactcaatcaccggcattatttccagtgtacttgggcatatttctttgccttctatgatccgaaaaatatttgcaactttaacaagacctctggcattattttatgaaaactcaaagcttgatgaagttcctaaagtatatagttgtctgaacaacaagttagaaaagctactgggagaaattattgcttgtctgcaattcagctacaccggaacttatgatagtgaacttcttgaacaactctccccactattatgcataatatttctgcacaagaataaacagattcgaaaacagagtgctcagttctggaatgccacttttgccaaagtgatgatgttggtttatcctgaagagttaaaaccagtactaacacaagccaaacaaaaatttctgctcctgttgcctggtttggaaactgttgaaatgatggaggaatccagtggaccatattctgatggaacagaaaattcacaactaaatgtgaagataagtggcatggagagaaaatcaaatggaaaaagagattcatttttggcacaaacaaagaataaaaaagaaaatatgaaaccagcagccaaactgaaacttgaatcttcgtctttaaaagtaaagggtgaaattcttttggaagaggaaaagtctactgactttgtgtttatacctccagaaggaaaagatgcaaaggaaagaatattaactgatcatcaaaaagaagttctcaaaacaaagcggtgtgatattcctgccatgtataataatctggatgtttcccaagataccttatttactcagtatagtcaggaagagcctatggaaattcctactttaaccagaaaaccaaaggaggattctaagatgatgattacggaggagcaaatggacagtgacattgtcattcctcaagatgtcacggaagactgtggtatggctgaacatcttgaaaagtcctccctttcgaataatgagtgtggttctcttgacaaaaccagtccagaaatgtcaaacagtaataatgatgaaagaaaaaaagctttaatttcatcaaggaaaacatcaactgaatgtgcatctagtacagaaaattctttcgttgtcagcagtagttcagtttctaataccactgttgctggaactcccccataccctacaagtcggaggcaaacctttattactttggagaagtttgatggttcagaaaatagaccttttagtccatcccccttgaataatatttcatcaactgttacagtgaaaaataaccaggaaaccatgattaaaacagattttctaccaaaagcaaagcaaagagaagggactttttcaaaatctgattctgaaaaaatagtgaatggaactaagagatcaagccggagagctggtaaagctgaacaaacagggaataaaaggtctaagcccttaatgagatctgagccggagaaaaatactgaggaatctgttgaaggcattgtagtcttagaaaataacccacctggtttgcttaatcaaacagaatgtgtgtcagataatcaggttcatctttctgaatctacaatggagcatgacaatacaaagcttaaagcagcaacagtggaaaatgctgtattattggaaactaatactgtagaggagaaaaatgtagaaattaatttggaatccaaagagaatacacccccagtagtaatatcagcagatcaaatggtaaatgaggatagtcaggttcagataactccaaatcagaaaacccttagacggtcttcaaggcgacgttcagaagtagtagagtctaccactgaaagccaagataaggaaaatagtcatcaaaaaaaggaacgacgtaaggaagaagaaaaacctcttcagaagagtccattgcatataaaagatgatgtgttacctaaacaaaaactgattgctgaacaaactctacaggagaatttaattgagaaaggaagtaatttacatgagaagactcttggggaaactagtgctaatgcagaaactgaacaaaataaaaaaaaggcagaccctgagaacattaagtctgagggggatggtacccaggacattgtagataagtcctctgagaaactagtcagaggccgaacacggtatcaaactagaagagcatctcagggtttgctttccagcattgaaaactcagaatctgatagttcggaggcaaaagaagaaggttctaggaagaagagatctggaaaatggaaaaacaaaagcaatgaaagtgttgacattcaagatcaagaagagaaagtggtgaaacaggaatgtataaaagctgaaaatcagtcacatgattataaagcaacttctgaagaagatgtaagcataaaatctccgatttgcgaaaaacaagatgaaagtaatactgtaatatgtcaggattctacagtaacttcagatttgttgcaagttcctgatgatttaccaaatgtgtgtgaggaaaaaaatgaaactagcaaatatgcagaatattcctttacaagtctacctgtgccagaatcaaatctaaggactagaaatgccattaagagattacataagcgagactcttttgataattgtagtttgggagaatcctcaaaaatagggatatcagatatttcttcgctttcagaaaaaacttttcaaacacttgaatgccaacacaagagaagtaggagggtgaggagatctaaaggttgtgattgctgtggggaaaaatcacaacctcaggaaaagtcactcattgggttaaagaatacagaaaataatgacgtagagattagtgaaacaaaaaaggcagatgtgcaagcacctgtaagcccatcagaaacttctcaagctaatccatattctgaaggacaatttttagatgaacatcatagtgtgaattttcatttgggtctcaaagaggataatgatactattaatgattcattaattgtttctgaaaccaaatcaaaagaaaacactatgcaagaatctcttccttctggaatagtaaactttagagaggaaatttgtgatatggattctagtgaagcaatgtctcttgaaagccaggagtcacctaatgaaaattttaaaactgttggcccgtgtttaggagactcgaaaaatgtttcacaggaatctttggagacaaaagaagaaaaaccagaagaaaccccaaaaatggaactgagtctagagaatgttactgttgaaggaaatgcatgtaaagtaacagaatccaatctagagaaagcaaaaactatggaattgaatgtaggaaatgaagctagctttcatggacaagagagaaccaaaactggtatttctgaagaagcagcaatagaagaaaataaaagaaatgatgactctgaagcagacacagctaaactgaatgccaaagaagtagcaactgaggaatttaattcagatattagtctttctgataatactacacctgtaaaattgaatgctcaaactgagatttctgaacaaacagcagctggggaactagatggaggaaatgatgtatctgatctacactcatctgaagaaacgaataccaaaatgaaaaataatgaagaaatgatgatcggcgaggcaatggctgaaactggccatgatggtgaaacagagaatgagggcataactaccaaaacctcaaagcctgatgaagctgaaacaaacatgttgactgcagaaatggacaactttgtttgtgacacagttgaaatgagcactgaagaaggaatcattgacgctaataaaactgaaacaaatactgagtatagtaaatctgaagaaaaattagataacaatcaaatggtaatggaaagtgatattttacaggaagatcaccatacttcacagaaagtggaggaaccatcacagtgtctggcatctggaacagctatctctgagctaataatagaagacaataatgcatctcctcaaaaactaagggaacttgatccttcacttgtgtcagcaaatgacagtcctagtggcatgcagacacgctgtgtctggtctcctttggcttctccgtctacgagcattttaaagagaggactaaaaagatcccaagaagatgaaatctcatcacctgttaataaggttcgccgtgtctcctttgcagatccaatataccaagcaggattggcagatgacattgatagacggtgctctattgttaggtcccattcttccaatagttctcccataggaaaaagtgttaaaacttctcctactacacaatctaagatttcagaaatggccaaagaatccataccatgcccaacagaaagtgtttacccaccattggtgaactgtgtggcaccagttgacatcattttacctcagattacatcaaacatgtgggcaagaggcctgggacaactcattagagctaagaatataaaaactattggtgatttgagtactcttacagcatctgaaataaaaactcttcctatccgttctccaaaagtgtccaatgtaaaaaaggctctcagaatatatcatgagcagcaggtgaagactcgtggactagaagagattccagtttttgatatttctgaaaaaacagtaaatggaatagaaaataaatctttgtcacctgatgaagaaagacttgtctcagatataattgatcctgttgctttagaaattccattatccaaaaaccttctggcacagattagtgctcttgctcttcagctggattcagaagatcttcataattattcaggaagccaactatttgaaatgcacgagaaactaagttgtatggcaaactctgtaataaaaaatctacagtcacgttggagatcaccatcccatgaaaattctatttagtattttcagagaaaattgaaggtttttttaaacatcactggatttcttgattgaggaaacaagttctgaaataatagcacaatttcaaagaagagactctttgcaaagttgataacatttcaaaccctgaaggacagtgacttattatgtaagttcaattttgtaagttcattatgtaagatccttttttttttcataatatgtattcttggctgctatgcgtggtttttcaggaaatttaattatcttactgagatgtgaaagcaaaactagtaacagaacttacattttatttcatgctttcttaaacccgtgcatattctggtgaaacatgtaaaatactttaagtaaaattgaacatttttatttgaatttttgctgaactgataaaggtgtttatatttttgtttgttggtttgtttaattcatgtttgttgggactgaggtttaggaagtttgttactggttaaaaacctcaaatgaaatgcgaaagaatttgaatttttcctgcatatgtcaactttggacagctttcaagaaaaatgagaaaa

SEQ ID NO: 3545 - DNA, 1586 bp, Homo sapiens
  source 1..1586: mol_type = genomic DNA
atccttcgcgtactgacggaaacactggcggcacatattgaggccgtatttcaggatcagacctgccggttcgaacacacgcgacaagagcaaagaagttaaaagagaagtgtctgtgtggctccttccacgtgggtgaaggactgtgccagctgagaggtggtagagcaggaagctgcctgaggacctccatttatttggtgaaaaactgggctccgcccttaagagagcaagtcgagggccgtgtaggagttggaggagagaaatgaaattttggaagagtcagcagaagatcgtcagtatttaaacagatcacatcatgcgtgagtacaagctagtggtccttggttcaggaggcgttgggaagtctgctctgacagttcagtttgttcagggaatttttgttgaaaaatatgacccaacgatagaagattcctacagaaagcaagttgaagtcgattgccaacagtgtatgctcgaaatcctggatactgcagggacagagcaatttacagcaatgagggatttgtatatgaagaacggccaaggttttgcactagtatattctattacagctcagtccacgtttaacgacttacaggacctgagggaacagattttacgggttaaggacacggaagatgttccaatgattttggttggcaataaatgtgacctggaagatgagcgagtagttggcaaagagcagggccagaatttagcaagacagtggtgtaactgtgcctttttagaatcttctgcaaagtcaaagatcaatgttaatgagatattttatgacctggtcagacagataaataggaaaacaccagtggaaaagaagaagcctaaaaagaaatcatgtctgctgctctaggcccatagtcagcagcagctctgagccagattacaggaatgaagaactgttgcctaattggaaagtgccagcattccagacttcaaaaataaaaaatctgaagaggcttctcctgttttatatattatgtgaagaatttagatcttatattggtttgcacaagttccctggagaaaaaaattgctctgtgtatatctcttggaaaataagacaatagtatttctcctttgcaatagcagttataacagatgtgaaaatatacttgactctaatatgattatacaaaagagcatggatgcatttcaaatgttagatattgctactataatcaaatgatttcatattgatctttttatcatgatcctccctatcaagcactaaaaagttgaaccattatactttatatctgtaatgatactgattatgaaatgtcccctcaaactcattgcagcagataacttttttgagtcattgacttcattttatatttaaaaaattatggaatatcatctgtcattatattctaattaaaattgtgcataatgctttggaaaaatgggtcttttataggaaaaaaactgggataactgatttctatggctttcaaagctaaaatatataatatactaaaccaactctaatattgcttcttgtgttttactgtcagattaaattacagcttttatggatgattaaattttagtacattttc

SEQ ID NO: 3546 - DNA, 5024 bp, Homo sapiens
  source 1..5024: mol_type = genomic DNA
ggcgccgccgccgctcccgaggcccctgccgccgccgctcccgctgctgtcgccgcgcagagccggagcaggagccacggccgagaggagggaggaggaggaggaggaggtggaggaggtggaggaggtggaggaggcgccggaccggggggatcgtcagtatttaaacagatcacatcatgcgtgagtacaagctagtggtccttggttcaggaggcgttgggaagtctgctctgacagttcagtttgttcagggaatttttgttgaaaaatatgacccaacgatagaagattcctacagaaagcaagttgaagtcgattgccaacagtgtatgctcgaaatcctggatactgcagggacagagcaatttacagcaatgagggatttgtatatgaagaacggccaaggttttgcactagtatattctattacagctcagtccacgtttaacgacttacaggacctgagggaacagattttacgggttaaggacacggaagatgttccaatgattttggttggcaataaatgtgacctggaagatgagcgagtagttggcaaagagcagggccagaatttagcaagacagtggtgtaactgtgcctttttagaatcttctgcaaagtcaaagatcaatgttaatgagatattttatgacctggtcagacagataaataggaaaacaccagtggaaaagaagaagcctaaaaagaaatcatgtctgctgctctaggcccatagtcagcagcagctctgagccagattacaggaatgaagaactgttgcctaattggaaagtgccagcattccagacttcaaaaataaaaaatctgaagaggcttctcctgttttatatattatgtgaagaatttagatcttatattggtttgcacaagttccctggagaaaaaaattgctctgtgtatatctcttggaaaataagacaatagtatttctcctttgcaatagcagttataacagatgtgaaaatatacttgactctaatatgattatacaaaagagcatggatgcatttcaaatgttagatattgctactataatcaaatgatttcatattgatctttttatcatgatcctccctatcaagcactaaaaagttgaaccattatactttatatctgtaatgatactgattatgaaatgtcccctcaaactcattgcagcagataacttttttgagtcattgacttcattttatatttaaaaaattatggaatatcatctgtcattatattctaattaaaattgtgcataatgctttggaaaaatgggtcttttataggaaaaaaactgggataactgatttctatggctttcaaagctaaaatatataatatactaaaccaactctaatattgcttcttgtgttttactgtcagattaaattacagcttttatggatgattaaattttagtacattttcatttggtttgtgtgtttttgttattgtttatagattaaagcgtttattttataatgaccacattgttttaaatgcgacagtagctcctttctgcctagtatctgcagaacactggctttaaactatactaagtaactggtgatttctctaggaacagacctcgcactttctgttctaaatatatttattcctactatacagtaaaatacatcagacaacatagaatagttttgtatattctctcttgatcttaaagattgtatcttattgaatatcccactgtatattatttttatatgtaaaaagataagtttaatactgtatcagggtttaacttttactatttcagatcttccacagcttgtaatttcatcaagggaatccttttgcattgttaatttgttgggtgtgagtccaccaatgaagtgttatgtgaaaaatttcaaacttgctttataatagattgaagaatttgagagaagtgagagaaagttaaaacacataaaaggaatgtgttacttttgcttaaactacttatgaaatagtatggtagtagtaatatggaagagattgctaagttaaaattgtagcttcctatatagtggtgctttttcttttccttcccagttattttcctctttacaaaagatagggcttaagtaagacatggacccagggtgatactacttatgtagtctctataaagagaggtagaacaaaaagcttgttagccaattaagttctggaaaaggaaagaaacaagcttagaaaaccctgtgccttgtcctcaaatattaaggaggagacagaccagtcctagaaagtctaagtcattgctcagggatctctagatactgtctctttgcaactaggtatgaagaagtgttcatgccttgctgagattttccaggcatgtggtcagcctgtcacttactaaactgaaattttaaaatcaggtttcaaatgttaagctttgaccaacctgagaaaatgttaaagtattgtttttaaaaaaatggaaattttttttgtttgtgtttttgttttagtttcgaataaacttagttaccttacacttcccttctacttatccaattatgcatatgtctgggattgaggggccaaaactatagcgaacttgaatgaagtattagggccagttgtcaggtcagggtggcatcttttattttaaggtcctctaaagtcattctgctttaaaacacccctcaaacatacctttaaacttaagatcatagacagacatctcatcaaccagtaaaactttctaaatactaccttgtcacatctattgtgtagttatttaacagattaaatagaagtcatttaataagactccaagtctcagtctgcttgactagtagcataaactcagtctattctattttagaatgtggtggagaaagatgatagttattagattcctttgtcacatcttatacagtccacttgggttaaaggtggaactgtcaagaaaaacgcctttctggcacacagtgatatgcagagcaggaccagctgaagtcagatgtgcaaggaaatctgtggttgctgagcaggatgaaaagtatcctgttagaaagtgagataggtgtgtttttatattgtcctaatgtgaactccttagtcttggttccaaagggaagggtacctgaaaataaatgtatttttatagctgaaaaatcaagagtttctaggatattgtgtgaatgtcaaatgataaatatctagaaactgatttcatattagtatgtgtggctatttaaagtataatgactttggtttggttatatgagtgacacagaatttaaggaggcttcatgccatagttcatagtttgctctaatggcttggtggtatccctgaacagtctacttttagaaattaacagtaaatacacaatccagctgtaatcttaccctccaccagggggagcttcaacatcggttaatactttttttttttttgagatggagtctcgccctgtcgcccaggctagagtgcaatggctcagtctccgctcactgcaacctctgcctcccgggttcaaacagttgtgcctcagtcttccaagtagctgggattacaggcacccgccaccacgcccagctaatttttgtatttttagtagagacggggtttcatcatgttggcgaggctggtcttgaactcctgacttcgtgatccgcccccccctcagcctcccaaagtgctgggattacaggcgtgagccaccgcgcctggcccggttaatactttcataagcattgaagtaactatttaagtcctagtacataaacactgtgtggttcacaaaaaggcatagagacattctctcaagagtttacaatctaattgggcagggaagatactacagttcatcaaagatatgaataacaccctagttttctgaactgcagctgcatgggtaattatcttaagaacttttggcaaaatatggatgttggtgtgttactctcttctccctacaactctgaactaatctgtgtttggcaccttgatttgccatcataaatggccaccatttactcctcactgaaatattcttcttctttgaggttataatgtacttggaaaagttaatacttatagaaaataatgatctttattaccaactttattaaaacaggcttggaacatttttctccatagaagaatagtaataagacattctacatttcctggacatggccagtttaaaatattttgccccattacccttgtagatacacatgtatttgtcagtttatgtgcctcagttttgtcttaggcactgagggacagaaagagaaataaggaataccttggtattttcctttgcaagcaatcacagcagaatgctagaaaacataaaatatactcttataaattgtatgtgtgttgaaaccaaagtgtgaagaaattgtcaggtatttggaggaggaaaataatttgtaaaataacctttttaagaatttggattttgtacttatttaaggtgctaaatatgtgttaaaatatcccctcttgaatcagctccaggcttaaaagggcagagtggtttggattcttgtccagggtctggaaagagctcatcttgccgagagggaaataaatgtgagctttgaggcggtctaactacccagcttttagtatttatgttccccaaaatgtaaaaactgtaagttattcttgaaaatgtagtccagacatttctttgatcctggattttactgcagtttcatcatgggtttgttgaatgtgcagtccatttattgccctgtcttgcttaaatattcttgttgagaacagctggaggctttgactgggttcctagttctgttttctgggaaggcaacgtggattctgttttgtagacattaatgagctttaaatgggaattggggatgatgtatgttcgttgggcatgctgagaagcggcctcctgtggttctgggcccaaggtgtgacatacatttcccactaattgcttctctcaagaagcaagagattggctgttcctcttgaggaaaaaccttaataaaccttcccattttaaa

SEQ ID NO: 3547 - DNA, 666 bp, Homo sapiens
  source 1..666: mol_type = genomic DNA
ggaggaggcgccgccgccgctcccgaggcccctgccgccgccgctcccgctgctgtcgccgcgcagagccggagcaggagccacggccgagaggagggaggaggaggaggaggaggtggaggaggtggaggaggtggaggaggcgccggaccgggggggatagattcccagaagtgggataactggatcagagggtgattaccctgtgtataagagtatgtgtctcactgcaccttcaatggcattgagtagatcgtcagtatttaaacagatcacatcatgcgtgagtacaagctagtggtccttggttcaggaggcgttgggaagtctgctctgacagttcagtttgttcagggaatttttgttgaaaaatatgacccaacgatagaagattcctacagaaagcaagttgaagtcgattgccaacagtgtatgctcgaaatcctggatactgcagggacagagcaatttacagcaatgagggatttgtatatgaagaacggccaaggttttgcactagtatattctattacagctcagtccacgtttaacgacttacaggacctgagggaacagattttacgggttaaggacacggaagatgttccaatgattttggttggcaataaatgtgacctggaagatgagcgagtagttggcaaagag

SEQ ID NO: 3548 - DNA, 1906 bp, Homo sapiens
  source 1..1906: mol_type = genomic DNA
ggcgccgccgccgctcccgaggcccctgccgccgccgctcccgctgctgtcgccgcgcagagccggagcaggagccacggccgagaggagggaggaggaggaggaggaggtggaggaggtggaggaggtggaggaggcgccggaccgggggggatagattcccagaagtgggataactggatcagagggtgattaccctgtgtataagagtatgtgtctcactgcaccttcaatggcattgagtagatcgtcagtatttaaacagatcacatcatgcgtgagtacaagctagtggtccttggttcaggaggcgttgggaagtctgctctgacagttcagtttgttcagggaatttttgttgaaaaatatgacccaacgatagaagattcctacagaaagcaagttgaagtcgattgccaacagtgtatgctcgaaatcctggatactgcagggacagagcaatttacagcaatgagggatttgtatatgaagaacggccaaggttttgcactagtatattctattacagctcagtccacgtttaacgacttacaggacctgagggaacagattttacgggttaaggacacggaagatgttccaatgattttggttggcaataaatgtgacctggaagatgagcgagtagttggcaaagagcagggccagaatttagcaagacagtggtgtaactgtgcctttttagaatcttctgcaaagtcaaagatcaatgttaatgagatattttatgacctggtcagacagataaataggaaaacaccagtggaaaagaagaagcctaaaaagaaatcatgtctgctgctctaggcccatagtcagcagcagctctgagccagattacaggaatgaagaactgttgcctaattggaaagtgccagcattccagacttcaaaaataaaaaatctgaagaggcttctcctgttttatatattatgtgaagaatttagatcttatattggtttgcacaagttccctggagaaaaaaattgctctgtgtatatctcttggaaaataagacaatagtatttctcctttgcaatagcagttataacagatgtgaaaatatacttgactctaatatgattatacaaaagagcatggatgcatttcaaatgttagatattgctactataatcaaatgatttcatattgatctttttatcatgatcctccctatcaagcactaaaaagttgaaccattatactttatatctgtaatgatactgattatgaaatgtcccctcaaactcattgcagcagataacttttttgagtcattgacttcattttatatttaaaaaattatggaatatcatctgtcattatattctaattaaaattgtgcataatgctttggaaaaatgggtcttttataggaaaaaaactgggataactgatttctatggctttcaaagctaaaatatataatatactaaaccaactctaatattgcttcttgtgttttactgtcagattaaattacagcttttatggatgattaaattttagtacattttcatttggtttgtgtgtttttgttattgtttatagattaaagcgtttattttataatgaccacattgttttaaatgcgacagtagctcctttctgcctagtatctgcagaacactggctttaaactatactaagtaactggtgatttctctaggaacagacctcgcactttctgttctaaatatatttattcctactatacagtaaaatacatcagacaacatagaatagttttgtatattctctcttgatcttaaagattgtatcttattgaatatcccactgtatattatttttatatgtaaaaagataagtttaatactgtatcagggtttaacttttactatttcagatcttccacagcttgta

SEQ ID NO: 3549 - DNA, 869 bp, Homo sapiens
  source 1..869: mol_type = genomic DNA
caaccacgcccgcggaccgacccggtcgactgtaggcctgcgggagaccgtcgggaggggccccggccggctgtgggagagaaagaggacattgtgtcccccacccttcagctccccgaggtgtcatagcacaagcccatttccctcgccgtctccccagacacggtgccctcgtacctcactgcctgagagaagtagaagatcgtcagtatttaaacagatcacatcatgcgtgagtacaagctagtggtccttggttcaggaggcgttgggaagtctgctctgacagttcagtttgttcagggaatttttgttgaaaaatatgacccaacgatagaagattcctacagaaagcaagttgaagtcgattgccaacagtgtatgctcgaaatcctggatactgcagggacagagcaatttacagcaatgagggatttgtatatgaagaacggccaaggttttgcactagtatattctattacagctcagtccacgtttaacgacttacaggacctgagggaacagattttacgggttaaggacacggaagatgttccaatgattttggttggcaataaatgtgacctggaagatgagcgagtagttggcaaagagcagggccagaatttagcaagacagtggtgtaactgtgcctttttagaatcttctgcaaagtcaaagatcaatgttaatgagatattttatgacctggtcagacagataaataggaaaacaccagtggaaaagaagaagcctaaaaagaaatcatgtctgctgctctaggcccatagtcagcagcagctctgagccagattacaggaatgaagaactgttgcctaattggaaagtgccagcattccagacttcaa

SEQ ID NO: 3550 - DNA, 3567 bp, Homo sapiens
  source 1..3567: mol_type = genomic DNA
cccttcctccctgtaactgaacagtgaaaattcacattgtggatccgctaacaggcacagatgtcatgtgaaaacgcacatgctctgccatccacaccgcctttctttcttttctttctgtttccttttttcccccttgttccttctccctcttctttgtaactaacaaaaccaccaccaactcctcctcctgctgctgcccttcctcctcctcctcagtccaagtgatcacaaaagaaatcttctgagccggaggcggtggcattttttaaaaagcaagcacattggagagaaagaaaaagaaaaacaaaaccaaaacaaaacccaggcaccagacagccagaacatttttttttcacccttcctgaaaacaaacaaacaaacaaacaatcatcaaaacagtcaccaccaacatcaaaactgttaacatagcggcggcggcggcaaacgtcaccctgcagccacggcgtccgcctaaagggatggttttctcggcagagcagctcttcgccgaccaccttcttcactcgtgctgagcgggatttttgggctctccggggttcgggctgggagcagcttcatgactacgcggagcgggagagcggccacaccatgcgagcacaaattgaagtgataccatgcaaaatttgtggcgataagtcctctgggatccactacggagtcatcacatgtgaaggctgcaagggattctttaggaggagccagcagaacaatgcttcttattcctgcccaaggcagagaaactgtttaattgacagaacgaacagaaaccgttgccaacactgccgactgcagaagtgtcttgccctaggaatgtcaagagatgctgtgaagtttgggaggatgtccaagaagcaaagggacagcctgtatgctgaggtgcagaagcaccagcagcggctgcaggaacagcggcagcagcagagtggggaggcagaagcccttgccagggtgtacagcagcagcattagcaacggcctgagcaacctgaacaacgagaccagcggcacttatgccaacgggcacgtcattgacctgcccaagtctgagggttattacaacgtcgattccggtcagccgtcccctgatcagtcaggacttgacatgactggaatcaaacagataaagcaagaacctatctatgacctcacatccgtacccaacttgtttacctatagctctttcaacaatgggcagttagcaccagggataaccatgactgaaatcgaccgaattgcacagaacatcattaagtcccatttggagacatgtcaatacaccatggaagagctgcaccagctggcgtggcagacccacacctatgaagaaattaaagcatatcaaagcaagtccagggaagcactgtggcaacaatgtgccatccagatcactcacgccatccaatacgtggtggagtttgcaaagcggataacaggcttcatggagctctgtcaaaatgatcaaattctacttctgaagtcaggttgcttggaagtggttttagtgagaatgtgccgtgccttcaacccattaaacaacactgttctgtttgaaggaaaatatggaggaatgcaaatgttcaaagccttaggttctgatgacctagtgaatgaagcatttgactttgcaaagaatttgtgttccttgcagctgaccgaggaggagatcgctttgttctcatctgctgttctgatatctccagaccgagcctggcttatagaaccaaggaaagtccagaagcttcaggaaaaaatttattttgcacttcaacatgtgattcagaagaatcacctggatgatgagaccttggcaaagttaatagccaagataccaaccatcacggcagtttgcaacttgcacggggagaagctgcaggtatttaagcaatctcatccagagatagtgaatacactgtttcctccgttatacaaggagctctttaatcctgactgtgccaccggctgcaaatgaaggggacaagagaactgtctcatagtcatggaatgcatcaccattaagacaaaagcaatgtgttcatgaagacttaagaaaaatgtcactactgcaacattaggaatgtcctgcacttaatagaattatttttcaccgctacagtttgaagaatgtaaatatgcacctgagtggggctcttttatttgtttgtttgtttttgaaatgaccataaatatacaaatataggacactgggtgttatcctttttttaattttattcgggtatgttttgggagacaactgtttatagaattttattgtagatatatacaagaaaagagcggtactttacatgattacttttcctgttgattgttcaaatataatttaagaaaattccacttaataggcttacctatttctatgtttttaggtagttgatgcatgtgtaaatttgtagctgtcttggaaagtactgtgcatgtatgtaataagtatataatatgtgagaatattatatatgactattacttatacatgcacatgcactgtggcttaaataccatacctactagcaatggaggttcagtcaggctctcttctatgatttaccttctgtgttatatgttacctttatgttagacaatcaggattttgttttcccagccagagttttcatctatagtcaatggcaggacggtaccaactcagagttaagtctacaaaggaataaacataatgtgtggcctctatatacaaactctatttctgtcaatgacatcaaagccttgtcaagatggttcatattgggaaggagacagtattttaagccattttcctgtttcaagaattaggccacagataacattgcaaggtccaagacttttttgaccaaacagtagatattttctatttttcaccagaacacataaaaacactttttttcttttggatttctggttgtgaaacaagcttgatttcagtgcttattgtgtcttcaactgaaaaatacaatctgtggattatgactaccagcaatttttttctaggaaagttaaaagaataaatcagaacccagggcaacaatgccatttcatgtaaacattttctctctcaccatgttttggcaagaaaaggtagaaagagaagacccagagtgaagaagtaattctttatattcctttctttaatgtatttgttaggaaaagtggcaataaagggggaggcatattataaaatgctataatataaaaatgtagcaaaaacttgacagactagaaaaaaaaagatctgtgttattctagggaactaatgtaccccaaagccaaaactaattcctgtgaagtttacagttacatcatccatttaccctagaattatttttttagcaacttttagaaataaagaatacaactgtgacattaggatcagagattttagacttccttgtacaaattctcacttctccacctgctcaccaatgaaattaatcataagaaaagcatatattccaagaaatttgttctgcctgtgtcctggaggcctatacctctgttattttctgatacaaaataaaacttaaaaaaaagaaaa

SEQ ID NO: 3551 - DNA, 2996 bp, Homo sapiens
  source 1..2996: mol_type = genomic DNA
atgtgtgagaaccagctcaaaactaaagctgacgccactgcacaaattgaagtgataccatgcaaaatttgtggcgataagtcctctgggatccactacggagtcatcacatgtgaaggctgcaagggattctttaggaggagccagcagaacaatgcttcttattcctgcccaaggcagagaaactgtttaattgacagaacgaacagaaaccgttgccaacactgccgactgcagaagtgtcttgccctaggaatgtcaagagatgctgtgaagtttgggaggatgtccaagaagcaaagggacagcctgtatgctgaggtgcagaagcaccagcagcggctgcaggaacagcggcagcagcagagtggggaggcagaagcccttgccagggtgtacagcagcagcattagcaacggcctgagcaacctgaacaacgagaccagcggcacttatgccaacgggcacgtcattgacctgcccaagtctgagggttattacaacgtcgattccggtcagccgtcccctgatcagtcaggacttgacatgactggaatcaaacagataaagcaagaacctatctatgacctcacatccgtacccaacttgtttacctatagctctttcaacaatgggcagttagcaccagggataaccatgactgaaatcgaccgaattgcacagaacatcattaagtcccatttggagacatgtcaatacaccatggaagagctgcaccagctggcgtggcagacccacacctatgaagaaattaaagcatatcaaagcaagtccagggaagcactgtggcaacaatgtgccatccagatcactcacgccatccaatacgtggtggagtttgcaaagcggataacaggcttcatggagctctgtcaaaatgatcaaattctacttctgaagtcaggttgcttggaagtggttttagtgagaatgtgccgtgccttcaacccattaaacaacactgttctgtttgaaggaaaatatggaggaatgcaaatgttcaaagccttaggttctgatgacctagtgaatgaagcatttgactttgcaaagaatttgtgttccttgcagctgaccgaggaggagatcgctttgttctcatctgctgttctgatatctccagaccgagcctggcttatagaaccaaggaaagtccagaagcttcaggaaaaaatttattttgcacttcaacatgtgattcagaagaatcacctggatgatgagaccttggcaaagttaatagccaagataccaaccatcacggcagtttgcaacttgcacggggagaagctgcaggtatttaagcaatctcatccagagatagtgaatacactgtttcctccgttatacaaggagctctttaatcctgactgtgccaccggctgcaaatgaaggggacaagagaactgtctcatagtcatggaatgcatcaccattaagacaaaagcaatgtgttcatgaagacttaagaaaaatgtcactactgcaacattaggaatgtcctgcacttaatagaattatttttcaccgctacagtttgaagaatgtaaatatgcacctgagtggggctcttttatttgtttgtttgtttttgaaatgaccataaatatacaaatataggacactgggtgttatcctttttttaattttattcgggtatgttttgggagacaactgtttatagaattttattgtagatatatacaagaaaagagcggtactttacatgattacttttcctgttgattgttcaaatataatttaagaaaattccacttaataggcttacctatttctatgtttttaggtagttgatgcatgtgtaaatttgtagctgtcttggaaagtactgtgcatgtatgtaataagtatataatatgtgagaatattatatatgactattacttatacatgcacatgcactgtggcttaaataccatacctactagcaatggaggttcagtcaggctctcttctatgatttaccttctgtgttatatgttacctttatgttagacaatcaggattttgttttcccagccagagttttcatctatagtcaatggcaggacggtaccaactcagagttaagtctacaaaggaataaacataatgtgtggcctctatatacaaactctatttctgtcaatgacatcaaagccttgtcaagatggttcatattgggaaggagacagtattttaagccattttcctgtttcaagaattaggccacagataacattgcaaggtccaagacttttttgaccaaacagtagatattttctatttttcaccagaacacataaaaacactttttttcttttggatttctggttgtgaaacaagcttgatttcagtgcttattgtgtcttcaactgaaaaatacaatctgtggattatgactaccagcaatttttttctaggaaagttaaaagaataaatcagaacccagggcaacaatgccatttcatgtaaacattttctctctcaccatgttttggcaagaaaaggtagaaagagaagacccagagtgaagaagtaattctttatattcctttctttaatgtatttgttaggaaaagtggcaataaagggggaggcatattataaaatgctataatataaaaatgtagcaaaaacttgacagactagaaaaaaaaagatctgtgttattctagggaactaatgtaccccaaagccaaaactaattcctgtgaagtttacagttacatcatccatttaccctagaattatttttttagcaacttttagaaataaagaatacaactgtgacattaggatcagagattttagacttccttgtacaaattctcacttctccacctgctcaccaatgaaattaatcataagaaaagcatatattccaagaaatttgttctgcctgtgtcctggaggcctatacctctgttattttctgatacaaaataaaacttaaaaaaaagaaaacaagctaa

SEQ ID NO: 3552 - DNA, 1751 bp, Homo sapiens
  source 1..1751: mol_type = genomic DNA
gcgatctacgtttcagtcttaacggttgcggcgcggctctggcccgggcgcacgcgcacactgacacgcgtacacgcacgcacgcgaccggggcggtggttggcggctacggacgcgcaggactgggggacgggcgggtacggctatgggcgaggcggaggcgccttctttcgaaatgacctggagcagcacgacgagcagtggctactgcagccaagaggactcggactcggagctcgagcagtacttcaccgcgcgaacctcgctagctcgcaggccgcgccgggaccaggacgagcctgtggagtgggagacacctgacctttctcaagctgagattgagcagaagatcaaggagtacaatgcccagatcaacagcaacctcttcatgagcttgaacaaggacggttcttacacaggcttcatcaaggttcagctgaagctggtgcgccctgtctctgtgccctccagcaagaagccaccctccttgcaggatgcccggcggggcccaggacggggcacaagtgtcaggcgccgcacttccttttacctgcccaaggatgctgtcaagcacctgcatgtgctgtcacgcacaagggcacgtgaagtcattgaggccctgctgcgaaagttcttggtggtggatgacccccgcaagtttgcactctttgagcgcgctgagcgtcacggccaagtgtacttgcggaagctgttggatgatgagcagcccctgcggctgcggctcctggcagggcccagtgacaaggccctgagctttgtcctgaaggaaaatgactctggggaggtgaactgggacgccttcagcatgcctgaactacataacttcctacgtatcctgcagcgggaggaggaggagcacctccgccagatcctgcagaagtactcctattgccgccagaagatccaagaggccctgcacgcctgcccccttgggtgacctcttgtacccccaggtggaaggcagacagcaggcagcgccaagtgcgtgccgtgtgagtgtgacagggccagtggggcctgtggaatgagtgtgcatggaggccctcctgtgctgggggaatgagcccagagaacagcgaagtagcttgctccctgtgtccacctgtgggtgtagccaggtatggctctgcacccctctgccctcattactgggccttagtgggccagggctgccctgagaagctgctccaggcctgcagcaggagtggtgcagacagaagtctcctcaatttttgtctcagaagtgaaaatcttggagaccctgcaaacagaacagggtcatgtttgcaggggtgacggccctcatctatgaggaaaggttttggatcttgaatgtggtctcaggatatccttatcagagctaagggtgggtgctcagaataaggcaggcattgaggaagagtcttggtttctctctacagtgccaactcctcacacaccctgaggtcagggagtgctggctcacagtacagcatgtgccttaatgcttcatatgaggaggatgtccctgggccagggtctgtgtgaatgtgggcactggcccaggttcataccttatttgctaatcaaagccagggtctctccctcaggtgttttttatgaagtgcgtgaatgtatgtaatgtgtggtggcctcagctgaatgcctcctgtggggaaaggggttggggtgacagtcatcatcagggcctggggcctgagagaattggctcaataaagatttcaagatcc

SEQ ID NO: 3553 - DNA, 1864 bp, Homo sapiens
  source 1..1864: mol_type = genomic DNA
cgcccaaagccagcgaagcacgggcccaaccgggccatgtcgggggagcctgagctcattgagctgcgggagctggcacccgctgggcgcgctgggaagggccgcacccggctggagcgtgccaacgcgctgcgcatcgcgcggggcaccgcgtgcaaccccacacggcagctggtccctggccgtggccaccgcttccagcccgcggggcccgccacgcacacgtggtgcgacctctgtggcgacttcatctggggcgtcgtgcgcaaaggcctgcagtgcgcgcgcctctctgcagattgcaagttcacctgccactaccgctgccgcgcgctcgtctgcctggactgttgcgggccccgggacctgggctgggaacccgcggtggagcgggacacgaacgtggacgagcctgtggagtgggagacacctgacctttctcaagctgagattgagcagaagatcaaggagtacaatgcccagatcaacagcaacctcttcatgagcttgaacaaggacggttcttacacaggcttcatcaaggttcagctgaagctggtgcgccctgtctctgtgccctccagcaagaagccaccctccttgcaggatgcccggcggggcccaggacggggcacaagtgtcaggcgccgcacttccttttacctgcccaaggatgctgtcaagcacctgcatgtgctgtcacgcacaagggcacgtgaagtcattgaggccctgctgcgaaagttcttggtggtggatgacccccgcaagtttgcactctttgagcgcgctgagcgtcacggccaagtgtacttgcggaagctgttggatgatgagcagcccctgcggctgcggctcctggcagggcccagtgacaaggccctgagctttgtcctgaaggaaaatgactctggggaggtgaactgggacgccttcagcatgcctgaactacataacttcctacgtatcctgcagcgggaggaggaggagcacctccgccagatcctgcagaagtactcctattgccgccagaagatccaagaggccctgcacgcctgcccccttgggtgacctcttgtacccccaggtggaaggcagacagcaggcagcgccaagtgcgtgccgtgtgagtgtgacagggccagtggggcctgtggaatgagtgtgcatggaggccctcctgtgctgggggaatgagcccagagaacagcgaagtagcttgctccctgtgtccacctgtgggtgtagccaggtatggctctgcacccctctgccctcattactgggccttagtgggccagggctgccctgagaagctgctccaggcctgcagcaggagtggtgcagacagaagtctcctcaatttttgtctcagaagtgaaaatcttggagaccctgcaaacagaacagggtcatgtttgcaggggtgacggccctcatctatgaggaaaggttttggatcttgaatgtggtctcaggatatccttatcagagctaagggtgggtgctcagaataaggcaggcattgaggaagagtcttggtttctctctacagtgccaactcctcacacaccctgaggtcagggagtgctggctcacagtacagcatgtgccttaatgcttcatatgaggaggatgtccctgggccagggtctgtgtgaatgtgggcactggcccaggttcataccttatttgctaatcaaagccagggtctctccctcaggtgttttttatgaagtgcgtgaatgtatgtaatgtgtggtggcctcagctgaatgcctcctgtggggaaaggggttggggtgacagtcatcatcagggcctggggcctgagagaattggctcaataaagatttcaagatcc

SEQ ID NO: 3554 - DNA, 1923 bp, Homo sapiens
  source 1..1923: mol_type = genomic DNA
cagtctggatcctgggggaggcgctgaagtcggggcccgccctgtggccccgcccggcccgcgcttgctagcgcccaaagccagcgaagcacgggcccaaccgggccatgtcgggggagcctgagctcattgagctgcgggagctggcacccgctgggcgcgctgggaagggccgcacccggctggagcgtgccaacgcgctgcgcatcgcgcggggcaccgcgtgcaaccccacacggcagctggtccctggccgtggccaccgcttccagcccgcggggcccgccacgcacacgtggtgcgacctctgtggcgacttcatctggggcgtcgtgcgcaaaggcctgcagtgcgcgcattgcaagttcacctgccactaccgctgccgcgcgctcgtctgcctggactgttgcgggccccgggacctgggctgggaacccgcggtggagcgggacacgaacgtggacgagcctgtggagtgggagacacctgacctttctcaagctgagattgagcagaagatcaaggagtacaatgcccagatcaacagcaacctcttcatgagcttgaacaaggacggttcttacacaggcttcatcaaggttcagctgaagctggtgcgccctgtctctgtgccctccagcaagaagccaccctccttgcaggatgcccggcggggcccaggacggggcacaagtgtcaggcgccgcacttccttttacctgcccaaggatgctgtcaagcacctgcatgtgctgtcacgcacaagggcacgtgaagtcattgaggccctgctgcgaaagttcttggtggtggatgacccccgcaagtttgcactctttgagcgcgctgagcgtcacggccaagtgtacttgcggaagctgttggatgatgagcagcccctgcggctgcggctcctggcagggcccagtgacaaggccctgagctttgtcctgaaggaaaatgactctggggaggtgaactgggacgccttcagcatgcctgaactacataacttcctacgtatcctgcagcgggaggaggaggagcacctccgccagatcctgcagaagtactcctattgccgccagaagatccaagaggccctgcacgcctgcccccttgggtgacctcttgtacccccaggtggaaggcagacagcaggcagcgccaagtgcgtgccgtgtgagtgtgacagggccagtggggcctgtggaatgagtgtgcatggaggccctcctgtgctgggggaatgagcccagagaacagcgaagtagcttgctccctgtgtccacctgtgggtgtagccaggtatggctctgcacccctctgccctcattactgggccttagtgggccagggctgccctgagaagctgctccaggcctgcagcaggagtggtgcagacagaagtctcctcaatttttgtctcagaagtgaaaatcttggagaccctgcaaacagaacagggtcatgtttgcaggggtgacggccctcatctatgaggaaaggttttggatcttgaatgtggtctcaggatatccttatcagagctaagggtgggtgctcagaataaggcaggcattgaggaagagtcttggtttctctctacagtgccaactcctcacacaccctgaggtcagggagtgctggctcacagtacagcatgtgccttaatgcttcatatgaggaggatgtccctgggccagggtctgtgtgaatgtgggcactggcccaggttcataccttatttgctaatcaaagccagggtctctccctcaggtgttttttatgaagtgcgtgaatgtatgtaatgtgtggtggcctcagctgaatgcctcctgtggggaaaggggttggggtgacagtcatcatcagggcctggggcctgagagaattggctcaataaagatttcaagatcc

SEQ ID NO: 3555 - DNA, 1657 bp, Homo sapiens
  source 1..1657: mol_type = genomic DNA
caactgttgagcaggcctctctgcctgtggccttccggccggtttccagacgcccaggtggccaacattagagtccgcgtagcagtgtgagattgcaagttcacctgccactaccgctgccgcgcgctcgtctgcctggactgttgcgggccccgggacctgggctgggaacccgcggtggagcgggacacgaacgtggacgagcctgtggagtgggagacacctgacctttctcaagctgagattgagcagaagatcaaggagtacaatgcccagatcaacagcaacctcttcatgagcttgaacaaggacggttcttacacaggcttcatcaaggttcagctgaagctggtgcgccctgtctctgtgccctccagcaagaagccaccctccttgcaggatgcccggcggggcccaggacggggcacaagtgtcaggcgccgcacttccttttacctgcccaaggatgctgtcaagcacctgcatgtgctgtcacgcacaagggcacgtgaagtcattgaggccctgctgcgaaagttcttggtggtggatgacccccgcaagtttgcactctttgagcgcgctgagcgtcacggccaagtgtacttgcggaagctgttggatgatgagcagcccctgcggctgcggctcctggcagggcccagtgacaaggccctgagctttgtcctgaaggaaaatgactctggggaggtgaactgggacgccttcagcatgcctgaactacataacttcctacgtatcctgcagcgggaggaggaggagcacctccgccagatcctgcagaagtactcctattgccgccagaagatccaagaggccctgcacgcctgcccccttgggtgacctcttgtacccccaggtggaaggcagacagcaggcagcgccaagtgcgtgccgtgtgagtgtgacagggccagtggggcctgtggaatgagtgtgcatggaggccctcctgtgctgggggaatgagcccagagaacagcgaagtagcttgctccctgtgtccacctgtgggtgtagccaggtatggctctgcacccctctgccctcattactgggccttagtgggccagggctgccctgagaagctgctccaggcctgcagcaggagtggtgcagacagaagtctcctcaatttttgtctcagaagtgaaaatcttggagaccctgcaaacagaacagggtcatgtttgcaggggtgacggccctcatctatgaggaaaggttttggatcttgaatgtggtctcaggatatccttatcagagctaagggtgggtgctcagaataaggcaggcattgaggaagagtcttggtttctctctacagtgccaactcctcacacaccctgaggtcagggagtgctggctcacagtacagcatgtgccttaatgcttcatatgaggaggatgtccctgggccagggtctgtgtgaatgtgggcactggcccaggttcataccttatttgctaatcaaagccagggtctctccctcaggtgttttttatgaagtgcgtgaatgtatgtaatgtgtggtggcctcagctgaatgcctcctgtggggaaaggggttggggtgacagtcatcatcagggcctggggcctgagagaattggctcaataaagatttcaagatcc

SEQ ID NO: 3556 - DNA, 5282 bp, Homo sapiens
  source 1..5282: mol_type = genomic DNA
aatgctgtgagttccttgttaggcctctccttccgatgaaaagagaaaggaagaatggactacagccaccaaacgtccctagtcccatgtggacaagataaatacatttccaaaaatgaacttctcttgcatctgaagacctacaacttgtactatgaaggccagaatttacagctccggcaccgggaggaagaagacgagttcattgtggaggggctcctgaacatctcctggggcctgcgccggcccattcgcctgcagatgcaggatgacaacgaacgcattcgaccccctccatcctcctcctcctggcactctggctgtaacctgggggctcagggaaccactctgaagcccctgactgtgcccaaagttcagatctcagaggtggatgccccgccggagggtgaccagatgccaagctccacagactccaggggcctgaagcccctgcaggaggacaccccacagctgatgcgcacacgcagtgatgttggggtgcgtcgccgtggcaatgtgaggacgcctagtgaccagcggcgaatcagacgccaccgcttctccatcaacggccatttctacaaccataagacatccgtgttcacaccagcctatggctctgtcaccaacgtccgcatcaacagcaccatgaccaccccacaggtcctgaagctgctgctcaacaaatttaagattgagaattcagcagaggagtttgccttgtacgtggtccatacgagtggtgagaaacagaagctgaaggccaccgattacccgctgattgcccgaatcctccagggcccatgtgagcagatctccaaagtgttcctaatggagaaggaccaggtggaggaagtcacctacgacgtggcccagtatataaagttcgagatgccggtacttaaaagcttcattcagaagctccaggaggaagaagatcgggaagtaaagaagctgatgcgcaagtacaccgtgctccggctaatgattcgacagaggctggaggagatagccgagaccccagcaacaatctgagccatgagaacgaggggatctgggcaccccaggaaccgccattgcccataagacccccaggaagctaggcactttctttccatggaaacatttagacacaaacctccccagctccggccaagccatcatttgctacctggagctggatgtagaagtcagcagacagctccctatccctggacccctgccctccttttttctgctcacaaggacttttgattttagttataaggaggacccaaaatgtgtgtgtgtacatgtgtgtgcacacatggtacgtgtccatgtgcctacctgatactttcacatgtaattaaattccaggcaaccagcacaagagccgtgagcttggcacatgtgctgctcgtgagcaggaaaatcagaggagccactgatctgagtggtatttaggttgaaggaaagatttctcctctcaagtgccagggagcagccacacgtctgtctgtgtttagagagggaagagggttctccaggttcaccatttgggttgtttatatgttggtagaaattctccctgtatgcctagaaggatcagtgaatgtaagagccttggaaattaacaaaataacagccacataaccttgcggcaagtctgatggaaagaaaaagataaaccatccgtggggtagatgcaataagcccacgtatttttacactggaaacgttgattgttttaaatgacaaagacatatgtgatgttctatgtggaaacctgtgaagagtggattctgcctccatctctgcctccatggctacctttaggagacagagaagatcctgtgtgtttctctgtacccagctgacagcctgtctctatggcgcttccttgagtggaaggaaatgtctcaagaaacaaagatctcgctggtgcgtacacagtgctgaccagctagtgtggccagggcctggtggcctggtggccaggaagtttcaggttgaagggaaatgtcgaggctacctgcagatatgacaggtgccttgaacgcagcccatcttcatgtcatcaaaggtcttcctgcacttgaagctggggcgatgtttgcagtcaagaccattctttccaacctctgggttcttgcaagttgccctcaccttgtgtgtggagatgcattccaagaatgaagcctcatcttgctactgagtgtggggttcagggaagctctttaggccacctggtgaaggtgcatggggaggatggagcttctcctcagctcctctgagcagccacctatgtgatctttaaatccaaccccaatgggagaaaagggcaagaacagtctgtgccctgggactcctatcaggaagcttgacaggcagctgggcatcagtgcagctgatatcgtttgaggagggagacagatgcttggacctgggtgcctggctatggagattgaccaagcaagatcaggagctcctgatagcaggcgtctttgagcctagctggggtagaggcactgcccatctcttctccaccttctctccacagaatgtttgcagagctgggcagttgaggaaaggacagcccctggttggtgcctccaaaggaaggtggacttttttggtggagacgtttctgccctgggcaccctcctgcccccgattcatacctatggcttcttgagaaggctcacagctgtggtcttaacgtagactgcagaaagatggcatgcggcccctggcatttcgccaagggttttatagcaagtctccttcctccatagggacagcagcaccagccctgtggggcatggagtggaagcccagaagggcttctgcaagctgcacagaactggggtaagaagacaaagagtagccaccgggagaggcttcctttgttacagctgggaaagaacagttctgtgaatgcaaacacctcctgagttttgcaattgagaaaatgatttggagaacttctcttctggtaatttttattttgaatgttcagggccttagttggccccagtaattctccttggaggacttgggagaagaatttccacaaagcaaactactaaccactagctcttactggacagcgatttctggcttataagagttctctttgatttgcactagcactacgatagtgttagatggggaaatactgcaacatgtccagttggccagatcactttccaagggagcgatactaaggcagactcagctttttaaagatgggaggtcaggaggtggaagtgagaggagatcccatctcacacaacacacttccacgtaatgcagaccacacttttccattttgtcctgccctcttgagaggtcatttctcacgtcctaagaacctgatcagaaattttggaagggttctttgaaatagcagcagttgaaacagagacactttgccacagtgtggagcagattttctcactggtatcacatggtcttgcagttttgaactcttcgaccgatttgtgggagtttatgtaattgcgtgcaatgaacctgaaattgtgtaaaggacaaaagaccagtttatagggttgggttttttttccaacttgtgaaaagcagtttagctgcatctgtctccccaccacccccaccccgggaggggcttatgttacaaggtgatcaagtgaaggaaaaacctgagcctatctggctgggatggtggaattaagcacaaggtcacattctctgtgatcacatgagagggaaggtgatgacttaaatggcagggggtggggattatcttggggagaggctgaaaagcacaaaagatagtcttccctgtacgtattggtgaagaacgtgcacaaggctggatggacttcaacttggagttgagttgaggcaagaggatttctggatattagtcacccatctgcaagaaaaatgctgaggcctcgggtcaagattttgatctgagacatgctgatgcttcaaggagaaatattttcacaatcctctcttccctcaccagaagagaacagtactctctcctagaaacctctaggtaaacacattttatcctaatatcggtagcatataatgccccccccaaaatatctgttttccatgcaaaaaagtctcaacaagaagtctgtggagttgagtggttacttcaaagtgtcaggagagtgaagaaattggccacagaagagcaagaagctctcttaagaaaagggaattctctttaaagaaaccaccaccaacaacaaaacaaccaaaaaccatgttttatgtcaaagctctgtagcacagagaatgtggtgtcacagatacatcgccgagagaggtttctttctttcttttttttttttttgagacagagtctggttctgtttcccaggctggagtgcagtggtgggatctcagctcactgcaacatccgcctctggggttcaagtgattctcctgtctcagcctcccaagtagctggaattacagggacccgccaccacgcccggctaatttttttgtgtggttttagtagaggtggggtttcaccatcttggccaggctggtcttgaactcctgacctcgtgatccacccgcctaggcctcccaaagtgttgggattacaggcgtgagccactgtgcccagccaaaagagaaatttctacatgaacaaggcaatttcagtgtcttacagcggccaaaccatgacgtgaagaatgagataggagacaggagatcaccataagcgtccctgatatagcagcacacattttcacgtttccacttaaatcgttttgcacaaagtcttgcttcgctcagatgagatgagatatgatttcctagagatgtaaaaataagaatgaatgtggcgcccccttcttccagatgtaatagaaagctctgccctatcacaaggggggtgttgaagcgccccttgtgttttaactgtatttaactgagcacaagatgcacaagctgtggtgggaaaccctcagtttacctttggagtcttccctgcagatcgcagacctgtttccaggctgatgtttctggtgtgtaattgctagcgtttctgaagggttttcccaattgttttagccttgtgaagtattcttaattataacttgcctttcagcgatggtacatgacttgattcaacgtttggttctgaacttacacactgatgcgtttactcatctaacataatctgacagggcctcagcaagggagccatacatttttgtaacattttgatatgttttaatgcatctgacttagatcttactgaaataaagcacttttcaaag

SEQ ID NO: 3557 - DNA, 5427 bp, Homo sapiens
  source 1..5427: mol_type = genomic DNA
ggggaggaagaaaggcgaaggcaaggcgaaggggtggagagtgatatgaagagcgagagaaaagagaggacagcggacgagcagatccggtatctggaatcccggcgcctagaacgtgtttttcgggagagcaaaggctgtgtctacggcagcctggggatatagcctctccttccgatgaaaagagaaaggaagaatggactacagccaccaaacgtccctagtcccatgtggacaagataaatacatttccaaaaatgaacttctcttgcatctgaagacctacaacttgtactatgaaggccagaatttacagctccggcaccgggaggaagaagacgagttcattgtggaggggctcctgaacatctcctggggcctgcgccggcccattcgcctgcagatgcaggatgacaacgaacgcattcgaccccctccatcctcctcctcctggcactctggctgtaacctgggggctcagggaaccactctgaagcccctgactgtgcccaaagttcagatctcagaggtggatgccccgccggagggtgaccagatgccaagctccacagactccaggggcctgaagcccctgcaggaggacaccccacagctgatgcgcacacgcagtgatgttggggtgcgtcgccgtggcaatgtgaggacgcctagtgaccagcggcgaatcagacgccaccgcttctccatcaacggccatttctacaaccataagacatccgtgttcacaccagcctatggctctgtcaccaacgtccgcatcaacagcaccatgaccaccccacaggtcctgaagctgctgctcaacaaatttaagattgagaattcagcagaggagtttgccttgtacgtggtccatacgagtggtgagaaacagaagctgaaggccaccgattacccgctgattgcccgaatcctccagggcccatgtgagcagatctccaaagtgttcctaatggagaaggaccaggtggaggaagtcacctacgacgtggcccagtatataaagttcgagatgccggtacttaaaagcttcattcagaagctccaggaggaagaagatcgggaagtaaagaagctgatgcgcaagtacaccgtgctccggctaatgattcgacagaggctggaggagatagccgagaccccagcaacaatctgagccatgagaacgaggggatctgggcaccccaggaaccgccattgcccataagacccccaggaagctaggcactttctttccatggaaacatttagacacaaacctccccagctccggccaagccatcatttgctacctggagctggatgtagaagtcagcagacagctccctatccctggacccctgccctccttttttctgctcacaaggacttttgattttagttataaggaggacccaaaatgtgtgtgtgtacatgtgtgtgcacacatggtacgtgtccatgtgcctacctgatactttcacatgtaattaaattccaggcaaccagcacaagagccgtgagcttggcacatgtgctgctcgtgagcaggaaaatcagaggagccactgatctgagtggtatttaggttgaaggaaagatttctcctctcaagtgccagggagcagccacacgtctgtctgtgtttagagagggaagagggttctccaggttcaccatttgggttgtttatatgttggtagaaattctccctgtatgcctagaaggatcagtgaatgtaagagccttggaaattaacaaaataacagccacataaccttgcggcaagtctgatggaaagaaaaagataaaccatccgtggggtagatgcaataagcccacgtatttttacactggaaacgttgattgttttaaatgacaaagacatatgtgatgttctatgtggaaacctgtgaagagtggattctgcctccatctctgcctccatggctacctttaggagacagagaagatcctgtgtgtttctctgtacccagctgacagcctgtctctatggcgcttccttgagtggaaggaaatgtctcaagaaacaaagatctcgctggtgcgtacacagtgctgaccagctagtgtggccagggcctggtggcctggtggccaggaagtttcaggttgaagggaaatgtcgaggctacctgcagatatgacaggtgccttgaacgcagcccatcttcatgtcatcaaaggtcttcctgcacttgaagctggggcgatgtttgcagtcaagaccattctttccaacctctgggttcttgcaagttgccctcaccttgtgtgtggagatgcattccaagaatgaagcctcatcttgctactgagtgtggggttcagggaagctctttaggccacctggtgaaggtgcatggggaggatggagcttctcctcagctcctctgagcagccacctatgtgatctttaaatccaaccccaatgggagaaaagggcaagaacagtctgtgccctgggactcctatcaggaagcttgacaggcagctgggcatcagtgcagctgatatcgtttgaggagggagacagatgcttggacctgggtgcctggctatggagattgaccaagcaagatcaggagctcctgatagcaggcgtctttgagcctagctggggtagaggcactgcccatctcttctccaccttctctccacagaatgtttgcagagctgggcagttgaggaaaggacagcccctggttggtgcctccaaaggaaggtggacttttttggtggagacgtttctgccctgggcaccctcctgcccccgattcatacctatggcttcttgagaaggctcacagctgtggtcttaacgtagactgcagaaagatggcatgcggcccctggcatttcgccaagggttttatagcaagtctccttcctccatagggacagcagcaccagccctgtggggcatggagtggaagcccagaagggcttctgcaagctgcacagaactggggtaagaagacaaagagtagccaccgggagaggcttcctttgttacagctgggaaagaacagttctgtgaatgcaaacacctcctgagttttgcaattgagaaaatgatttggagaacttctcttctggtaatttttattttgaatgttcagggccttagttggccccagtaattctccttggaggacttgggagaagaatttccacaaagcaaactactaaccactagctcttactggacagcgatttctggcttataagagttctctttgatttgcactagcactacgatagtgttagatggggaaatactgcaacatgtccagttggccagatcactttccaagggagcgatactaaggcagactcagctttttaaagatgggaggtcaggaggtggaagtgagaggagatcccatctcacacaacacacttccacgtaatgcagaccacacttttccattttgtcctgccctcttgagaggtcatttctcacgtcctaagaacctgatcagaaattttggaagggttctttgaaatagcagcagttgaaacagagacactttgccacagtgtggagcagattttctcactggtatcacatggtcttgcagttttgaactcttcgaccgatttgtgggagtttatgtaattgcgtgcaatgaacctgaaattgtgtaaaggacaaaagaccagtttatagggttgggttttttttccaacttgtgaaaagcagtttagctgcatctgtctccccaccacccccaccccgggaggggcttatgttacaaggtgatcaagtgaaggaaaaacctgagcctatctggctgggatggtggaattaagcacaaggtcacattctctgtgatcacatgagagggaaggtgatgacttaaatggcagggggtggggattatcttggggagaggctgaaaagcacaaaagatagtcttccctgtacgtattggtgaagaacgtgcacaaggctggatggacttcaacttggagttgagttgaggcaagaggatttctggatattagtcacccatctgcaagaaaaatgctgaggcctcgggtcaagattttgatctgagacatgctgatgcttcaaggagaaatattttcacaatcctctcttccctcaccagaagagaacagtactctctcctagaaacctctaggtaaacacattttatcctaatatcggtagcatataatgccccccccaaaatatctgttttccatgcaaaaaagtctcaacaagaagtctgtggagttgagtggttacttcaaagtgtcaggagagtgaagaaattggccacagaagagcaagaagctctcttaagaaaagggaattctctttaaagaaaccaccaccaacaacaaaacaaccaaaaaccatgttttatgtcaaagctctgtagcacagagaatgtggtgtcacagatacatcgccgagagaggtttctttctttcttttttttttttttgagacagagtctggttctgtttcccaggctggagtgcagtggtgggatctcagctcactgcaacatccgcctctggggttcaagtgattctcctgtctcagcctcccaagtagctggaattacagggacccgccaccacgcccggctaatttttttgtgtggttttagtagaggtggggtttcaccatcttggccaggctggtcttgaactcctgacctcgtgatccacccgcctaggcctcccaaagtgttgggattacaggcgtgagccactgtgcccagccaaaagagaaatttctacatgaacaaggcaatttcagtgtcttacagcggccaaaccatgacgtgaagaatgagataggagacaggagatcaccataagcgtccctgatatagcagcacacattttcacgtttccacttaaatcgttttgcacaaagtcttgcttcgctcagatgagatgagatatgatttcctagagatgtaaaaataagaatgaatgtggcgcccccttcttccagatgtaatagaaagctctgccctatcacaaggggggtgttgaagcgccccttgtgttttaactgtatttaactgagcacaagatgcacaagctgtggtgggaaaccctcagtttacctttggagtcttccctgcagatcgcagacctgtttccaggctgatgtttctggtgtgtaattgctagcgtttctgaagggttttcccaattgttttagccttgtgaagtattcttaattataacttgcctttcagcgatggtacatgacttgattcaacgtttggttctgaacttacacactgatgcgtttactcatctaacataatctgacagggcctcagcaagggagccatacatttttgtaacattttgatatgttttaatgcatctgacttagatcttactgaaataaagcacttttcaaagaga

SEQ ID NO: 3558 - DNA, 2518 bp, Homo sapiens
  source 1..2518: mol_type = genomic DNA
ctgaagcctggggtcagcaggcgctgcgggcgcagctccggtgcaagcgaggacacgacacatgcagtggcttctggactgcgcgatgactggacgcaagtaacttctaggtctgcagacaagaggaagagaagatgaaggaagactgtctgccgagttctcacgtgcccatcagtgacagcaagtccattcagaagagggatgtgcaaggcctgagtgaagaagggactctgatcatcgaggggctcctcaacattgcctgggggctgaggcggcccatccggctgcagatgcaggatgaccgggagcaggtgcacctcccctccacctcatggatgcccagacggcctagctgccctctgggctgctggtctcttctccttggcctgagctccctttctctgccggcagccatctcagccctgcagttgtctgttttcagaaaggagccatcgccccagaacgggaacatcacagcccaggggccaagcattcagccagtgcacaaggctgagagttccacagacagctcggggcccctggaggaggcagaggaggccccccagctgatgcggaccaagagcgacgccagttgcatgagccagaggaggcccaagtgccgcgcccccggtgaggcccagcgcatccggcgacaccggttctctatcaacggccacttctacaatcataagacctccgtgtttactccagcctatggatccgtgaccaatgtgagggtcaacagcaccatgacaaccctgcaggtgctcaccctgctgctgaacaaatttagggtggaagatggccccagtgagttcgcactctacatcgttcacgagtctggggagcggacaaaattaaaagactgcgagtacccgctgatttccagaatcctgcatgggccatgtgagaagatcgccaggatcttcctgatggaagctgacttgggcgtggaagtcccccatgaagtcgctcagtacattaagtttgaaatgccggtgctggacagttttgttgaaaaattaaaagaagaggaagaaagagaaataatcaaactgaccatgaagttccaagccctgcgtctgacgatgctgcagcgcctggagcagctggtggaggccaagtaactggccaacacctgcctcttccaaagtccccagcagtggcaggtgtacactgagccctggttgctggccccggccggtcacattgactgatggccaccgcctgacgaatcgagtgcctgtgtgtctacctctctgaagcctgagcaccatgattcccacagccagctcttggctccaagatgagcacccacaggaagccgacccaggcctgaggggccaggaacttgctgggtcagatctgtgtggccagccctgtccacaccatgcctctcctgcactggagagcagtgctggcccagcccctgcggcttaggcttcatctgcttgcacattgcctgtcccagagcccctgtgggtccacaagcccctgtcctcttccttcatatgagattcttgtctgccctcatatcacgctgccccacaggaatgctgctgggaaaagcagggcctgccagcaggtatgagatctagcctgctttcagccatcaccttgccacagtgtccccggcttctaagcctccaatatcaccctgtgagcctcgcacagctcagccccaacacagaggtgagaccaggaataaggccacaagtatctcactttctctgcagaaatcaatctttacttcatcagagagacctaaagcgattcttacaaggagcttgctgcaagaaacacggtcattcaatcacattgaggagggtccacatggcattgagagggtgctgcccgctcaatgcccagcagcagctctggaaggcagtgctcagccccatcaccactgtcccgtggatgcctgtgtacctcttgccttttctgggcttgcgtttctctcctctagtgggtggggatgactttcaatgactttcaatacttcccctgaaggaagaatgataaggagaaatgtctgttttgaggaaagggctttgaattccccagatactgaacaatttgtgtttgtgactgatggagaatttcaggaatgaatgagaaagcctttgcgaaactatgcaacagtttacatcagtcatgtgaagtatttgtctaaaacagagcaaactgaagaccaaattattctcctgttgaggtccgtggatggcagatttaaagggaagaaccacaaaggcttgcaaagataggagaggctccatctctaatgcatgtagaagctccttacgggtgcccatcaagagcatagcttggaagccaccatgctgtgcggaactgcgtcagggcaaatgtcacagcaggatttccccaacccagctccatcatcacagacacagagagctgcaggggaggcctgcccactgttttgtcgactctgccctcctctggcagcatagatccttaggtgctcaataaaggtgtgctgtattgaactgaagaagtg

SEQ ID NO: 3559 - DNA, 2474 bp, Homo sapiens
  source 1..2474: mol_type = genomic DNA
cgctgcgggcgcagctccggtgcaagcgaggacacgacacatgcagtggcttctggactgcgcgatgactggacgcaagtaacttctaggtctgcagacaagaggaagagaagatgaaggaagactgtctgccgagttctcacgtgcccatcagtgacagcaagtccattcagaagtcggagctcttaggcctgctgaaaacctacaactgctaccatgagggcaagagcttccagctgagacaccgtgaggaagaagggactctgatcatcgaggggctcctcaacattgcctgggggctgaggcggcccatccggctgcagatgcaggatgaccgggagcaggtgcacctcccctccacctcatggatgcccagacggcctagctgccctctaaaggagccatcgccccagaacgggaacatcacagcccaggggccaagcattcagccagtgcacaaggctgagagttccacagacagctcggggcccctggaggaggcagaggaggccccccagctgatgcggaccaagagcgacgccagttgcatgagccagaggaggcccaagtgccgcgcccccggtgaggcccagcgcatccggcgacaccggttctctatcaacggccacttctacaatcataagacctccgtgtttactccagcctatggatccgtgaccaatgtgagggtcaacagcaccatgacaaccctgcaggtgctcaccctgctgctgaacaaatttagggtggaagatggccccagtgagttcgcactctacatcgttcacgagtctggggagcggacaaaattaaaagactgcgagtacccgctgatttccagaatcctgcatgggccatgtgagaagatcgccaggatcttcctgatggaagctgacttgggcgtggaagtcccccatgaagtcgctcagtacattaagtttgaaatgccggtgctggacagttttgttgaaaaattaaaagaagaggaagaaagagaaataatcaaactgaccatgaagttccaagccctgcgtctgacgatgctgcagcgcctggagcagctggtggaggccaagtaactggccaacacctgcctcttccaaagtccccagcagtggcaggtgtacactgagccctggttgctggccccggccggtcacattgactgatggccaccgcctgacgaatcgagtgcctgtgtgtctacctctctgaagcctgagcaccatgattcccacagccagctcttggctccaagatgagcacccacaggaagccgacccaggcctgaggggccaggaacttgctgggtcagatctgtgtggccagccctgtccacaccatgcctctcctgcactggagagcagtgctggcccagcccctgcggcttaggcttcatctgcttgcacattgcctgtcccagagcccctgtgggtccacaagcccctgtcctcttccttcatatgagattcttgtctgccctcatatcacgctgccccacaggaatgctgctgggaaaagcagggcctgccagcaggtatgagatctagcctgctttcagccatcaccttgccacagtgtccccggcttctaagcctccaatatcaccctgtgagcctcgcacagctcagccccaacacagaggtgagaccaggaataaggccacaagtatctcactttctctgcagaaatcaatctttacttcatcagagagacctaaagcgattcttacaaggagcttgctgcaagaaacacggtcattcaatcacattgaggagggtccacatggcattgagagggtgctgcccgctcaatgcccagcagcagctctggaaggcagtgctcagccccatcaccactgtcccgtggatgcctgtgtacctcttgccttttctgggcttgcgtttctctcctctagtgggtggggatgactttcaatgactttcaatacttcccctgaaggaagaatgataaggagaaatgtctgttttgaggaaagggctttgaattccccagatactgaacaatttgtgtttgtgactgatggagaatttcaggaatgaatgagaaagcctttgcgaaactatgcaacagtttacatcagtcatgtgaagtatttgtctaaaacagagcaaactgaagaccaaattattctcctgttgaggtccgtggatggcagatttaaagggaagaaccacaaaggcttgcaaagataggagaggctccatctctaatgcatgtagaagctccttacgggtgcccatcaagagcatagcttggaagccaccatgctgtgcggaactgcgtcagggcaaatgtcacagcaggatttccccaacccagctccatcatcacagacacagagagctgcaggggaggcctgcccactgttttgtcgactctgccctcctctggcagcatagatccttaggtgctcaataaaggtgtgctgtattgaactgaagaagtgagaa

SEQ ID NO: 3560 - DNA, 2630 bp, Homo sapiens
  source 1..2630: mol_type = genomic DNA
ggaagcaacgcaggtggagggcagggaggctgccagggccttacctgtgatagtgaaagtgtcggcaccctggacatcctggaccagacgcaggcctgtcccgtgagtctcgcctcctcctcagcccgacccccatgccccccaccagggccatgtgcagaaccatccgggtgcattgcgatggcagtctggtctcctctggttatgcctggccggcgagaagggtgctgtcacactcctgttacaaatgaggaaacagaggccagggaagccaaaggccagaagctgaggccctgccacaccctaggagtacatgtgtgtctttccctttttaggtcggagctcttaggcctgctgaaaacctacaactgctaccatgagggcaagagcttccagctgagacaccgtgaggaagaagggactctgatcatcgaggggctcctcaacattgcctgggggctgaggcggcccatccggctgcagatgcaggatgaccgggagcaggtgcacctcccctccacctcatggatgcccagacggcctagctgccctctaaaggagccatcgccccagaacgggaacatcacagcccaggggccaagcattcagccagtgcacaaggctgagagttccacagacagctcggggcccctggaggaggcagaggaggccccccagctgatgcggaccaagagcgacgccagttgcatgagccagaggaggcccaagtgccgcgcccccggtgaggcccagcgcatccggcgacaccggttctctatcaacggccacttctacaatcataagacctccgtgtttactccagcctatggatccgtgaccaatgtgagggtcaacagcaccatgacaaccctgcaggtgctcaccctgctgctgaacaaatttagggtggaagatggccccagtgagttcgcactctacatcgttcacgagtctggggagcggacaaaattaaaagactgcgagtacccgctgatttccagaatcctgcatgggccatgtgagaagatcgccaggatcttcctgatggaagctgacttgggcgtggaagtcccccatgaagtcgctcagtacattaagtttgaaatgccggtgctggacagttttgttgaaaaattaaaagaagaggaagaaagagaaataatcaaactgaccatgaagttccaagccctgcgtctgacgatgctgcagcgcctggagcagctggtggaggccaagtaactggccaacacctgcctcttccaaagtccccagcagtggcaggtgtacactgagccctggttgctggccccggccggtcacattgactgatggccaccgcctgacgaatcgagtgcctgtgtgtctacctctctgaagcctgagcaccatgattcccacagccagctcttggctccaagatgagcacccacaggaagccgacccaggcctgaggggccaggaacttgctgggtcagatctgtgtggccagccctgtccacaccatgcctctcctgcactggagagcagtgctggcccagcccctgcggcttaggcttcatctgcttgcacattgcctgtcccagagcccctgtgggtccacaagcccctgtcctcttccttcatatgagattcttgtctgccctcatatcacgctgccccacaggaatgctgctgggaaaagcagggcctgccagcaggtatgagatctagcctgctttcagccatcaccttgccacagtgtccccggcttctaagcctccaatatcaccctgtgagcctcgcacagctcagccccaacacagaggtgagaccaggaataaggccacaagtatctcactttctctgcagaaatcaatctttacttcatcagagagacctaaagcgattcttacaaggagcttgctgcaagaaacacggtcattcaatcacattgaggagggtccacatggcattgagagggtgctgcccgctcaatgcccagcagcagctctggaaggcagtgctcagccccatcaccactgtcccgtggatgcctgtgtacctcttgccttttctgggcttgcgtttctctcctctagtgggtggggatgactttcaatgactttcaatacttcccctgaaggaagaatgataaggagaaatgtctgttttgaggaaagggctttgaattccccagatactgaacaatttgtgtttgtgactgatggagaatttcaggaatgaatgagaaagcctttgcgaaactatgcaacagtttacatcagtcatgtgaagtatttgtctaaaacagagcaaactgaagaccaaattattctcctgttgaggtccgtggatggcagatttaaagggaagaaccacaaaggcttgcaaagataggagaggctccatctctaatgcatgtagaagctccttacgggtgcccatcaagagcatagcttggaagccaccatgctgtgcggaactgcgtcagggcaaatgtcacagcaggatttccccaacccagctccatcatcacagacacagagagctgcaggggaggcctgcccactgttttgtcgactctgccctcctctggcagcatagatccttaggtgctcaataaaggtgtgctgtattgaactgaagaagtg

SEQ ID NO: 3561 - DNA, 527 bp, Homo sapiens
  source 1..527: mol_type = genomic DNA
ctgaagcctggggtcagcaggcgctgcgggcgcagctccggtgcaagcgaggacacgacacatgcagtggcttctggactgcgcgatgactggacgcaagtaacttctaggtctgcagacaagaggaagagaagatgaaggaagactgtctgccgagttctcacgtgcccatcagtgacagcaagtccattcagaagtcggagctcttaggcctgctgaaaacctacaactgctaccatgagggcaagagcttccagctgagacaccgtgaggaagaagggactctgatcatcgaggggctcctcaacattgcctgggggctgaggcggcccatccggctgcagatgcaggatgaccgggagcaggtgcacctcccctccacctcatggatgcccagacggcctagctgccctctccaccttgctggcaagaagggacgactacagccaggggggctcccaacacctatgcaagccgaacatgtctcgccatctcttgttctatctttaaaattcacacgaatttag

SEQ ID NO: 3562 - DNA, 2399 bp, Homo sapiens
  source 1..2399: mol_type = genomic DNA
ctgaagcctggggtcagcaggcgctgcgggcgcagctccggtgcaagcgaggacacgacacatgcagtggcttctggactgcgcgatgactggacgcaagtaacttctaggtctgcagacaagaggaagagaagatgaaggaagactgtctgccgagttctcacgtgcccatcagtgacagcaagtccattcagaagtcggagctcttaggcctgctgaaaacctacaactgctaccatgagggcaagagcttccagctgagacaccgtgaggaagaagggactctgatcatcgaggggctcctcaacattgcctgggggctgaggcggcccatccggctgcagatgcaggatgaccgggagcaggtgcacctcccctccacctcatggatgcccagacggcctagctgccctctggcccctggaggaggcagaggaggccccccagctgatgcggaccaagagcgacgccagttgcatgagccagaggaggcccaagtgccgcgcccccggtgaggcccagcgcatccggcgacaccggttctctatcaacggccacttctacaatcataagacctccgtgtttactccagcctatggatccgtgaccaatgtgagggtcaacagcaccatgacaaccctgcaggtgctcaccctgctgctgaacaaatttagggtggaagatggccccagtgagttcgcactctacatcgttcacgagtctggggagcggacaaaattaaaagactgcgagtacccgctgatttccagaatcctgcatgggccatgtgagaagatcgccaggatcttcctgatggaagctgacttgggcgtggaagtcccccatgaagtcgctcagtacattaagtttgaaatgccggtgctggacagttttgttgaaaaattaaaagaagaggaagaaagagaaataatcaaactgaccatgaagttccaagccctgcgtctgacgatgctgcagcgcctggagcagctggtggaggccaagtaactggccaacacctgcctcttccaaagtccccagcagtggcaggtgtacactgagccctggttgctggccccggccggtcacattgactgatggccaccgcctgacgaatcgagtgcctgtgtgtctacctctctgaagcctgagcaccatgattcccacagccagctcttggctccaagatgagcacccacaggaagccgacccaggcctgaggggccaggaacttgctgggtcagatctgtgtggccagccctgtccacaccatgcctctcctgcactggagagcagtgctggcccagcccctgcggcttaggcttcatctgcttgcacattgcctgtcccagagcccctgtgggtccacaagcccctgtcctcttccttcatatgagattcttgtctgccctcatatcacgctgccccacaggaatgctgctgggaaaagcagggcctgccagcaggtatgagatctagcctgctttcagccatcaccttgccacagtgtccccggcttctaagcctccaatatcaccctgtgagcctcgcacagctcagccccaacacagaggtgagaccaggaataaggccacaagtatctcactttctctgcagaaatcaatctttacttcatcagagagacctaaagcgattcttacaaggagcttgctgcaagaaacacggtcattcaatcacattgaggagggtccacatggcattgagagggtgctgcccgctcaatgcccagcagcagctctggaaggcagtgctcagccccatcaccactgtcccgtggatgcctgtgtacctcttgccttttctgggcttgcgtttctctcctctagtgggtggggatgactttcaatgactttcaatacttcccctgaaggaagaatgataaggagaaatgtctgttttgaggaaagggctttgaattccccagatactgaacaatttgtgtttgtgactgatggagaatttcaggaatgaatgagaaagcctttgcgaaactatgcaacagtttacatcagtcatgtgaagtatttgtctaaaacagagcaaactgaagaccaaattattctcctgttgaggtccgtggatggcagatttaaagggaagaaccacaaaggcttgcaaagataggagaggctccatctctaatgcatgtagaagctccttacgggtgcccatcaagagcatagcttggaagccaccatgctgtgcggaactgcgtcagggcaaatgtcacagcaggatttccccaacccagctccatcatcacagacacagagagctgcaggggaggcctgcccactgttttgtcgactctgccctcctctggcagcatagatccttaggtgctcaataaaggtgtgctgtattgaactgaagaagtg

SEQ ID NO: 3563 - DNA, 528 bp, Homo sapiens
  source 1..528: mol_type = genomic DNA
catgcagtggcttctggactgcgcgatgactggacgcaagtaacttctaggtctgcagacaagaggaagagaagatgaaggaagactgtctgccgagttctcacgtgcccatcagtgacagcaagtccattcagaagtcggagctcttaggcctgctgaaaacctacaactgctaccatgagggcaagagcttccagctgagacaccgtgaggaagaagggactctgatcatcgaggggctcctcaacattgcctgggggctgaggcggcccatccggctgcagatgcaggatgaccgggagcaggtgcacctcccctccacctcatggatgcccagacggcctagctgccctctgggctgctggtctcttctccttggcctgagctccctttctctgccggcagccatctcagccctgcagttgtctgttttcagaaaggagccatcgccccagaacgggaacatcacagcccaggggccaagcattcagccagtgcacaaggctgagagttccacagacagctcgg

SEQ ID NO: 3564 - DNA, 435 bp, Homo sapiens
  source 1..435: mol_type = genomic DNA
agttctcacgtgcccatcagtgacagcaagtccattcagaagtcggagctcttaggcctgctgaaaacctacaactgctaccatgagggcaagagcttccagctgagacaccgtgaggaagaagggactctgatcatcgaggggctcctcaacattgcctgggggctgaggcggcccatccggctgcagatgcaggatgaccgggagcaggtgcacctcccctccacctcatggatgcccagacggcctagctgccctctccaccttgctggcaagaagggacgactacagccaggggggctcccaacacctatgcaagccgaacatgtctcgccatctcttgttctatctttaaaattcacacgaatttagcctcttactactctgttttcattttaatgtcaaaattttaaaaataaatttatcagaatttca

SEQ ID NO: 3565 - DNA, 3496 bp, Homo sapiens
  source 1..3496: mol_type = genomic DNA
gaactgctttacgcgaggggcaggaaaggcgcgggaggcgggggaggtgcggagatggcgctctgcacggcggcggagggagggcgctggcgccggggacacgaaaccgcagagcccggacgagtcagggagtgaggcgcgagccgggcgcccggggctctgcaggcgcaggcggcgcggggacaggagcaggttaccgggccgcccgagcgctcgcaccccgctgaaagaaacgcaggcggcccgccggctctgcctggtccgctacccgaccagctcccggctcggggctcagagctaggggcttacgccaagcggagcccggggaggggtgcccacctccctccgccgcatcccaagcccggcccccttgatgcgctggcggcctcggccgggaactccggggtagatgaccgtggacagcagcatgagcagtgggtactgcagcctggacgaggaactggaagactgcttcttcactgctaagactacctttttcagaaatgcgcagagcaaacatctttcaaagaatgtctgtaaacctgtggaggagacacagcgcccgcccacactgcaggagatcaagcagaagatcgacagctacaacacgcgagagaagaactgcctgggcatgaaactgagtgaagacggcacctacacgggtttcatcaaagtgcatctgaaactccggcggcctgtgacggtgcctgctgggatccggccccagtccatctatgatgccatcaaggaggtgaacctggcggctaccacggacaagcggacatccttctacctgcccctagatgccatcaagcagctgcacatcagcagcaccaccaccgtcagtgaggtcatccaggggctgctcaagaagttcatggttgtggacaatccccagaagtttgcactttttaagcggatacacaaggacggacaagtgctcttccagaaactctccattgctgaccgccccctctacctgcgcctgcttgctgggcctgacacggaggtcctcagctttgtgctaaaggagaatgaaactggagaggtagagtgggatgccttctccatccctgaacttcagaacttcctaacaatcctggaaaaagaggagcaggacaaaatccaacaagtgcaaaagaagtatgacaagtttaggcagaaactggaggaggccttaagagaatcccagggcaaacctgggtaaccggtcctgcttcctctcctcctggtgcattcagatttatttgtattattaattattattttgcaacagacactttttctcaggacatctctggcaggtgcatttgtgcctgcccagcagttccagctgtggcaaaagtctcttccatggacaagtgtttgcatgggggttcagctgtgcccgcccccaggctgtgccccaccacagattctgccaaggatcagaactcatgtgaaacaaacagctgacgtcctctctcgatctgcaagcctttcaccaaccaaatagttgcctctctcgtcaccaaactggaacctcacaccagccggcaaaggaaggaagaaaggttttagagctgtgtgttctttctctggctttgattcttctttgagttctcttacttgccacgtacaggaccattatttatgagtgaaaagttgtagcacattccttttgcaggtctgagctaagcccctgaaagcagggtaatgctcataaaaggactgttcccgcggccccaaggtgcctgttgttcacacttaagggaagtttataaagctactggccccagatgctcagggtaaggagcaccaaagctgaggctggctcagagatctccagagaagctgcagcctgccctggccctggctctggccctggcccacattgcacatggaaacccaaaggcatatatctgcgtatgtgtggtacttagtcacatctttgtcaacaaactgttcgtttttaagttacaaatttgaatttaatgttgtcatcatcgtcatgtgtttccccaaagggaagccagtcattgaccatttaaaaagtctcctgctaagtatggaaatcagacagtaagagaaagccaaaaagcaatgcagagaaaggtgtccaagctgtcttcagccttccccagctaaagagcagaggagggcctgggctacttgggttccccatcggcctccagcactgcctccctcctcccactgcgactctgggatctccaggtgctgcccaaggagttgccttgattacagagaggggagcctccaattcggccaacttggagtcctttctgttttgaagcatgggccagacccggcactgcgctcggagagccggtgggcctggcctccccgtcgacctcagtgcctttttgttttcagagagaaataggagtagggcgagtttgcctgaagctctgctgctggcttctcctgccaggaagtgaacaatggcggcggtgtgggagacaaggccaggagagcccgcgttcagtatgggttgagggtcacagacctccctcccatctgggtgcctgagttttgactccaatcagtgataccagaccacattgacagggaggatcaaattcctgacttacatttgcactggcttcttgtttaggctgaatcctaaaataaattagtcaaaaaattccaacaagtagccaggactgcagagacactccagtgcagagggagaaggacttgtaattttcaaagcagggctggttttccaacccagcctctgagaaaccatttctttgctatcctctgccttcccaagtccctcttgggtcggttcaagcccaagcttgttcgtgtagcttcagaagttccctctctgacccaggctgagtccatactgcccctgatcccagaaggaatgctgacccctcgtcgtatgaactgtgcatagtctccagagcttcaaaggcaacacaagctcgcaactctaagatttttttaaaccacaaaaaccctggttagccatctcatgctcagccttatcacttccctccctttagaaactctctccctgctgtatattaaagggagcaggtggagagtcattttccttcgtcctgcatgtctctaacattaatagaaggcatggctcctgctgcaaccgctgtgaatgctgctgagaacctccctctatggggatggctattttatttttgagaaggaaaaaaaaagtcatgtatatatacacataaaggcatatagctatatataaagagataagggtgtttatgaaatgagaaaattattggacaattcagactttactaaagcacagttagacccaaggcctatgctgaggtctaaacctctgaaaaaagtatagtatcgagtacccgttccctcccagaggtgggagtaactgctggtagtgccttctttggttgtgttgctcagtgtgtaagtgtttgtttccaggatattttctttttaaatgtctttcttatatgggttttaaaaaaaagtaataaaagcctgttgc

SEQ ID NO: 3566 - DNA, 3481 bp, Homo sapiens
  source 1..3481: mol_type = genomic DNA
cgggagtagcgcagtcgccaaagccgccgctgccaaagctgccgccactagccgggcatggccatggcgtccccggccatcgggcagcgcccgtacccgctactattggaccccgagccgccgcgctatctacagagcctgagcggccccgagctaccgccgccgccccccgaccggtcctcgcgcctctgtgtcccggcgcccctctccactgcgcccggggcgcgcgaggggcgcagcgcccggagggctgcccgggggaacctggagcccccgccccgggcctcccgacccgctcgcccgctccggcctggtctgcagcagagactgcggcggcggcctggagcgccccgaccccgcgacgtgcggagcatcttcgagcagccgcaggatcccagagtcccggcggagcgaggcgaggggcactgcttcgccgagttggtgctgccgggcggccccggctggtgtgacctgtgcggacgagaggtgctgcggcaggcgctgcgctgcactaactgtaaattcacctgtcacccagaatgccgcagcctgatccagttggactgcagtcagcaggagggtttatcccgggacagaccctctccagaaagcaccctcaccgtgaccttcagccagaatgtctgtaaacctgtggaggagacacagcgcccgcccacactgcaggagatcaagcagaagatcgacagctacaacacgcgagagaagaactgcctgggcatgaaactgagtgaagacggcacctacacgggtttcatcaaagtgcatctgaaactccggcggcctgtgacggtgcctgctgggatccggccccagtccatctatgatgccatcaaggaggtgaacctggcggctaccacggacaagcggacatccttctacctgcccctagatgccatcaagcagctgcacatcagcagcaccaccaccgtcagtgaggtcatccaggggctgctcaagaagttcatggttgtggacaatccccagaagtttgcactttttaagcggatacacaaggacggacaagtgctcttccagaaactctccattgctgaccgccccctctacctgcgcctgcttgctgggcctgacacggaggtcctcagctttgtgctaaaggagaatgaaactggagaggtagagtgggatgccttctccatccctgaacttcagaacttcctctcctcctggtgcattcagatttatttgtattattaattattattttgcaacagacactttttctcaggacatctctggcaggtgcatttgtgcctgcccagcagttccagctgtggcaaaagtctcttccatggacaagtgtttgcatgggggttcagctgtgcccgcccccaggctgtgccccaccacagattctgccaaggatcagaactcatgtgaaacaaacagctgacgtcctctctcgatctgcaagcctttcaccaaccaaatagttgcctctctcgtcaccaaactggaacctcacaccagccggcaaaggaaggaagaaaggttttagagctgtgtgttctttctctggctttgattcttctttgagttctcttacttgccacgtacaggaccattatttatgagtgaaaagttgtagcacattccttttgcaggtctgagctaagcccctgaaagcagggtaatgctcataaaaggactgttcccgcggccccaaggtgcctgttgttcacacttaagggaagtttataaagctactggccccagatgctcagggtaaggagcaccaaagctgaggctggctcagagatctccagagaagctgcagcctgccctggccctggctctggccctggcccacattgcacatggaaacccaaaggcatatatctgcgtatgtgtggtacttagtcacatctttgtcaacaaactgttcgtttttaagttacaaatttgaatttaatgttgtcatcatcgtcatgtgtttccccaaagggaagccagtcattgaccatttaaaaagtctcctgctaagtatggaaatcagacagtaagagaaagccaaaaagcaatgcagagaaaggtgtccaagctgtcttcagccttccccagctaaagagcagaggagggcctgggctacttgggttccccatcggcctccagcactgcctccctcctcccactgcgactctgggatctccaggtgctgcccaaggagttgccttgattacagagaggggagcctccaattcggccaacttggagtcctttctgttttgaagcatgggccagacccggcactgcgctcggagagccggtgggcctggcctccccgtcgacctcagtgcctttttgttttcagagagaaataggagtagggcgagtttgcctgaagctctgctgctggcttctcctgccaggaagtgaacaatggcggcggtgtgggagacaaggccaggagagcccgcgttcagtatgggttgagggtcacagacctccctcccatctgggtgcctgagttttgactccaatcagtgataccagaccacattgacagggaggatcaaattcctgacttacatttgcactggcttcttgtttaggctgaatcctaaaataaattagtcaaaaaattccaacaagtagccaggactgcagagacactccagtgcagagggagaaggacttgtaattttcaaagcagggctggttttccaacccagcctctgagaaaccatttctttgctatcctctgccttcccaagtccctcttgggtcggttcaagcccaagcttgttcgtgtagcttcagaagttccctctctgacccaggctgagtccatactgcccctgatcccagaaggaatgctgacccctcgtcgtatgaactgtgcatagtctccagagcttcaaaggcaacacaagctcgcaactctaagatttttttaaaccacaaaaaccctggttagccatctcatgctcagccttatcacttccctccctttagaaactctctccctgctgtatattaaagggagcaggtggagagtcattttccttcgtcctgcatgtctctaacattaatagaaggcatggctcctgctgcaaccgctgtgaatgctgctgagaacctccctctatggggatggctattttatttttgagaaggaaaaaaaaagtcatgtatatatacacataaaggcatatagctatatataaagagataagggtgtttatgaaatgagaaaattattggacaattcagactttactaaagcacagttagacccaaggcctatgctgaggtctaaacctctgaaaaaagtatagtatcgagtacccgttccctcccagaggtgggagtaactgctggtagtgccttctttggttgtgttgctcagtgtgtaagtgtttgtttccaggatattttctttttaaatgtctttcttatatgggttttaaaaaaaagtaataaaagcctgttgcaaaaatga

SEQ ID NO: 3567 - DNA, 2048 bp, Homo sapiens
  source 1..2048: mol_type = genomic DNA
cgggagtagcgcagtcgccaaagccgccgctgccaaagctgccgccactagccgggcatggccatggcgtccccggccatcgggcagcgcccgtacccgctactattggaccccgagccgccgcgctatctacagagcctgagcggccccgagctaccgccgccgccccccgaccggtcctcgcgcctctgtgtcccggcgcccctctccactgcgcccggggcgcgcgaggggcgcagcgcccggagggctgcccgggggaacctggagcccccgccccgggcctcccgacccgctcgcccgctccggcctggtctgcagcagagactgcggcggcggcctggagcgccccgaccccgcgacgtgcggagcatcttcgagcagccgcaggatcccagagtcccggcggagcgaggcgaggggcactgcttcgccgagttggtgctgccgggcggccccggctggtgtgacctgtgcggacgagaggtgctgcggcaggcgctgcgctgcactaactgtaaattcacctgtcacccagaatgccgcagcctgatccagttggactgcagtcagcaggagggtttatcccgggacagaccctctccagaaagcaccctcaccgtgaccttcagccagaatgtctgtaaacctgtggaggagacacagcgcccgcccacactgcaggagatcaagcagaagatcgacagctacaacacgcgagagaagaactgcctgggcatgaaactgagtgaagacggcacctacacgggtttcatcaaagtgcatctgaaactccggcggcctgtgacggtgcctgctgggatccggccccagtccatctatgatgccatcaaggaggtgaacctggcggctaccacggacaagcggacatccttctacctgcccctagatgccatcaagcagctgcacatcagcagcaccaccaccgtcagtgaggtcatccaggggctgctcaagaagttcatggttgtggacaatccccagaagtttgcactttttaagcggatacacaaggacggacaagtgctcttccagaaactctccattgctgaccgccccctctacctgcgcctgcttgctgggcctgacacggaggtcctcagctttgtgctaaaggagaatgaaactggagaggtagagtgggatgccttctccatccctgaacttcagaacttcctaacaatcctggaaaaagaggagcaggacaaaatccaacaagtgcaaaagaagtatgacaagtttaggcagaaactggaggaggccttaagagaatcccagggcaaacctgggtaaccggtcctgcttcctctcctcctggtgcattcagatttatttgtattattaattattattttgcaacagacactttttctcaggacatctctggcaggtgcatttgtgcctgcccagcagttccagctgtggcaaaagtctcttccatggacaagtgtttgcatgggggttcagctgtgcccgcccccaggctgtgccccaccacagattctgccaaggatcagaactcatgtgaaacaaacagctgacgtcctctctcgatctgcaagcctttcaccaaccaaatagttgcctctctcgtcaccaaactggaacctcacaccagccggcaaaggaaggaagaaaggttttagagctgtgtgttctttctctggctttgattcttctttgagttctcttacttgccacgtacaggaccattatttatgagtgaaaagttgtagcacattccttttgcaggtctgagctaagcccctgaaagcagggtaatgctcataaaaggactgttcccgcggccccaaggtgcctgttgttcacacttaagggaagtttataaagctactggccccagatgctcagggtaaggagcaccaaagctgaggctggctcagagatctccagagaagctgcagcctgccctggccctggctctggccctggcccacattgcacatggaaacccaaaggcatatatctgcgtatgtgtggtacttagtcacatctttgtcaacaaa

SEQ ID NO: 3568 - DNA, 1932 bp, Homo sapiens
  source 1..1932: mol_type = genomic DNA
cgggagtagcgcagtcgccaaagccgccgctgccaaagctgccgccactagccgggcatggccatggcgtccccggccatcgggcagcgcccgtacccgctactattggaccccgagccgccgcgctatctacagagcctgagcggccccgagctaccgccgccgccccccgaccggtcctcgcgcctctgtgtcccggcgcccctctccactgcgcccggggcgcgcgaggggcgcagcgcccggagggctgcccgggggaacctggagcccccgccccgggcctcccgacccgctcgcccgctccggcctggtctgcagcagagactgcggcggcggcctggagcgccccgaccccgcgacgtgcggagcatcttcgagcagccgcaggatcccagagtcccggcggagcgaggcgaggggcactgcttcgccgagttggtgctgccgggcggccccggctggtgtgacctgtgcggacgagaggtgctgcggcaggcgctgcgctgcactaactgtaaattcacctgtcacccagaatgccgcagcctgatccagttggactgcagtcagcaggagggtttatcccgggacagaccctctccagaaagcaccctcaccgtgaccttcagccagaatgtctgtaaacctgtggaggagacacagcgcccgcccacactgcaggagatcaagcagaagatcgacagctacaacacgcgagagaagaactgcctgggcatgaaactgagtgaagacggcacctacacgggtttcatcaaagtgcatctgaaactccggcggcctgtgacggtgcctgctgggatccggccccagtccatctatgatgccatcaaggaggtgaacctggcggctaccacggacaagcggacatccttctacctgcccctagatgccatcaagcagctgcacatcagcagcaccaccaccgtcagtgaggtcatccaggggctgctcaagaagttcatggttgtggacaatccccagaagtttgcactttttaagcggatacacaaggacggacaagtgggatgccttctccatccctgaacttcagaacttcctaacaatcctggaaaaagaggagcaggacaaaatccaacaagtgcaaaagaagtatgacaagtttaggcagaaactggaggaggccttaagagaatcccagggcaaacctgggtaaccggtcctgcttcctctcctcctggtgcattcagatttatttgtattattaattattattttgcaacagacactttttctcaggacatctctggcaggtgcatttgtgcctgcccagcagttccagctgtggcaaaagtctcttccatggacaagtgtttgcatgggggttcagctgtgcccgcccccaggctgtgccccaccacagattctgccaaggatcagaactcatgtgaaacaaacagctgacgtcctctctcgatctgcaagcctttcaccaaccaaatagttgcctctctcgtcaccaaactggaacctcacaccagccggcaaaggaaggaagaaaggttttagagctgtgtgttctttctctggctttgattcttctttgagttctcttacttgccacgtacaggaccattatttatgagtgaaaagttgtagcacattccttttgcaggtctgagctaagcccctgaaagcagggtaatgctcataaaaggactgttcccgcggccccaaggtgcctgttgttcacacttaagggaagtttataaagctactggccccagatgctcagggtaaggagcaccaaagctgaggctggctcagagatctccagagaagctgcagcctgccctggccctggctctggccctggcccacattgcacatggaaacccaaaggcatatatctgcgtatgtgtggtacttagtcacatctttgtcaacaaa

SEQ ID NO: 3569 - DNA, 1239 bp, Homo sapiens
  source 1..1239: mol_type = genomic DNA
cgggagtagcgcagtcgccaaagccgccgctgccaaagctgccgccactagccgggcatggccatggcgtccccggccatcgggcagcgcccgtacccgctactattggaccccgagccgccgcgctatctacagagcctgagcggccccgagctaccgccgccgccccccgaccggtcctcgcgcctctgtgtcccggcgcccctctccactgcgcccggggcgcgcgaggggcgcagcgcccggagggctgcccgggggaacctggagcccccgccccgggcctcccgacccgctcgcccgctccggcctggtctgcagcagagactgcggcggcggcctggagcgccccgaccccgcgacgtgcggagcatcttcgagcagccgcaggatcccagagtcccggcggagcgaggcgaggggcactgcttcgccgagttggtgctgccgggcggccccggctggtgtgacctgtgcggacgagaggtgctgcggcaggcgctgcgctgcactaactgtaaattcacctgtcacccagaatgccgcagcctgatccagttggactgcagtcagcaggagggtttatcccgggacagaccctctccagaaagcaccctcaccgtgaccttcagccagaatgtctgtaaacctgtggaggagacacagcgcccgcccacactgcaggagatcaagcagaagatcgacagctacaacacgcgagagaagaactgcctgggcatgaaactgagtgaagacggcacctacacgggtttcatcaaagtgcatctgaaactccggcggcctgtgacggtgcctgctgggatccggccccagtccatctatgatgccatcaaggaggtgaacctggcggctaccacggacaagcggacatccttctacctgcccctagatgccatcaagcagctgcacatcagcagcaccaccaccgtcagtgaggtcatccaggggctgctcaagaagttcatggttgtggacaatccccagaagtttgcactttttaagcggatacacaaggacggacaagtgctcttccagaaactctccattgctgaccgccccctctacctgcgcctgcttgctgggcctgacacggaggtcctcagctttgtgctaaaggagaatgaaactggagaggtagagtgggatgccttctccatccctgaacttcagaacttcttcctctcctcctggtgcattcagatttatttgtattattaa

SEQ ID NO: 3570 - DNA, 2075 bp, Homo sapiens
  source 1..2075: mol_type = genomic DNA
ggcgtaattaaaaagcggcggaagaaggtgggagggtcatgacgcagcgagtttcagtcgtgacttttctgggggcatcgcggcgtcccctttttttgcctttaaagtaaaacgtcgccccgacgcaccccccgcgtatttcggggggcggaggcggcgggccacggcgcgaagaggggcggtgctgacgccggccggtcacgtgggcgtgttgtgggggggaggggcgccgccgcgcggtcggttccgggcggttgggagcgcgcgagctagcgagcgagaggcagccgcgcccgccgccgcccctgctctgtatgccgctctctcccggcgcggccgccgccgatcacagcagcaggagccaccgccgccgcggttgatgtggttgggccggggctgaggaggccgccaagatgccgcagtccaagtcccggaagatcgcgatcctgggctaccggtctgtggggaaatcctcattgacgattcaatttgttgaaggccaatttgtggactcctacgatccaaccatagaaaacacttttacaaagttgatcacagtaaatggacaagaatatcatcttcaacttgtagacacagccgggcaagatgaatattctatctttcctcagacatactccatagatattaatggctatattcttgtgtattctgttacatcaatcaaaagttttgaagtgattaaagttatccatggcaaattgttggatatggtggggaaagtacaaatacctattatgttggttgggaataagaaagacctgcatatggaaagggtgatcagttatgaagaagggaaagctttggcagaatcttggaatgcagcttttttggaatcttctgctaaagaaaatcagactgctgtggatgtttttcgaaggataattttggaggcagaaaaaatggacggggcagcttcacaaggcaagtcttcatgctcggtgatgtgattctgctgcaaagcctgaggacactgggaatatattctacctgaagaagcaaactgcccgttctccttgaagataaactatgcttcttttttcttctgttaacctgaaagatatcatttgggtcagagctcccctcccttcagattatgttaactctgagtctgtccaaatgagttcacttccattttcaaattttaagcaatcatattttcaatttatatattgtatttcttaatattatgaccaagaattttatcggcattaatttttcagtgtagtttgttgtttaaaataatgtaatcatcaaaatgatgcatattgttacactactattaactaggcttcagtatatcagtgtttatttcattgtgttaaatgtatacttgtaaataaaatagctgcaaacctcagtcctttgtgctacttgatgtggctttcaaagaagagaagccttgtcctgagtttctcacttggcttcaggaaggccccaggttggattccagaaaccagtgaagatgtggccacaggaggaggtgtgctgaggtggctgctgaccgtggactccctgcgcagtggcctgcagatgttggggctgggttacagctgattgaagctgagtggccctggggggtctgtgaggggagttcctccccagtgatgaaattctctccttccaccctcaaatccctagaccttgactgaaatgctccgtggtcgggagcctggtcaaggaggaggagctgctgagaggcattgttcgcccttgctcatagcttagctcgatgtccgtgtcagacaggagatgattgagaacagccttgcctgtcactgtcctagaacaccctggagtttagtgttctgtgtcagagtcttgggagcctccttcagacccagatgacgggcctccctctgtccaaggagcagctgtaaaggagaagagggatttcatttgtttggtggctgttaccttgtctgtaagtcaaacttggagttgagcagtgctttttaaacgattcccttttgcagctaaaatttcacagggctatttctaatacgtaagcaaatgttaccattgactttattaataaaatatagttttgctttgca

SEQ ID NO: 3571 - DNA, 2031 bp, Homo sapiens
  source 1..2031: mol_type = genomic DNA
aatagcaaccaggtcttttatagccccggagttcccgtgatgccccacgcggctgcaatgattggttaagggttttgcttttagggcgtggacgggctcctgagcaatagtggatgagctgtgagtgcgcgcgcgtgcgcggggccgcgacctgtgccggctcgagcccgctgggcactcggaggcgcgcacgtcgttccccgccctcccgccgccgcccgccctcgctctctcgcgctaccctcccgccgcccgcggtcctccgtcggttctctcgttagtccacggtctggtcttcagctacccgccttcgtctccgagtttgcgactcgcggaccggcgtccccggcgcgaagaggctggactcggattcgttgcctgagcaatggctgccatccggaagaaactggtgattgttggtgatggagcctgtggaaagacatgcttgctcatagtcttcagcaaggaccagttcccagaggtgtatgtgcccacagtgtttgagaactatgtggcagatatcgaggtggatggaaagcaggtagagttggctttgtgggacacagctgggcaggaagattatgatcgcctgaggcccctctcctacccagataccgatgttatactgatgtgtttttccatcgacagccctgatagtttagaaaacatcccagaaaagtggaccccagaagtcaagcatttctgtcccaacgtgcccatcatcctggttgggaataagaaggatcttcggaatgatgagcacacaaggcgggagctagccaagatgaagcaggagccggtgaaacctgaagaaggcagagatatggcaaacaggattggcgcttttgggtacatggagtgttcagcaaagaccaaagatggagtgagagaggtttttgaaatggctacgagagctgctctgcaagctagacgtgggaagaaaaaatctgggtgccttgtcttgtgaaaccttgctgcaagcacagcccttatgcggttaattttgaagtgctgtttattaatcttagtgtatgattactggcctttttcatttatctataatttacctaagattacaaatcagaagtcatcttgctaccagtatttagaagccaactatgattattaacgatgtccaacccgtctggcccaccagggtccttttgacactgctctaacagccctcctctgcactcccacctgacacaccaggcgctaattcaaggaatttcttaacttcttgcttctttctagaaagagaaacagttggtaacttttgtgaattaggctgtaactactttataactaacatgtcctgcctattatctgtcagctgcaaggtactctggtgagtcaccacttcagggctttactccgtaacagattttgttggcatagctctggggtgggcagttttttgaaaatgggctcaaccagaaaagcccaagttcatgcagctgtggcagagttacagttctgtggtttcatgttagttaccttatagttactgtgtaattagtgccacttaatgtatgttaccaaaaataaatatatctaccccagactagatgtagtattttttgtataattggatttcctaatactgtcatcctcaaagaaagtgtattggttttttaaaaaagaaagtgtatttggaaataaagtcagatggaaaattcattttttaaattcccgttttgtcactttttctgataaaagatggccatattaccccttttcggccccatgtatctcagtaccccatggagctgggctaagtaaataggaattggtttcacgcctgaggcaattagacactttggaagatggcataacctgtctcacctggacttaagcatctggctctaattcacagtgctcttttctcctcactgtatccaggttccctcccagaggagccaccagttctcatgggtggcactcagtctctcttctctccagctgactaaactttttttctgtaccagttaatttttccaactactaatagaataaaggcagttttctaaa

SEQ ID NO: 3572 - DNA, 2366 bp, Homo sapiens
  source 1..2366: mol_type = genomic DNA
atctgccaccgcagtctggttggagctgttgtcttgtatgctcagcgaggcccggagagacccgggagagagctaggccgagtccaccgcccgagtctgctgcccgagcccgcgttacgcacaaagccgccgatccccggcctggggtgagcagagcgaccaccgcccgggagcagcgcggcgagacgcacggtgcgccctatgcccccgcgcccccaccgcccccgccgcggcagccgaagcgcagcgagagaacgcgccaccgcggggcccgggtgcagctagcgaccctctcgccacctgcgcgcagcccgaggtgagcagtgagcggcgagcgggagggcagcgaggcgttcgcgggccccctcctgctgcccgggcccggcccgctcatggcggccatccgcaagaagctggtggtggtgggcgacggcgcgtgtggcaagacgtgcctgctgatcgtgttcagtaaggacgagttccccgaggtgtacgtgcccaccgtcttcgagaactatgtggccgacattgaggtggacggcaagcaggtggagctggcgctgtgggacacggcgggccaggaggactacgaccgcctgcggccgctctcctacccggacaccgacgtcattctcatgtgcttctcggtggacagcccggactcgctggagaacatccccgagaagtgggtccccgaggtgaagcacttctgtcccaatgtgcccatcatcctggtggccaacaaaaaagacctgcgcagcgacgagcatgtccgcacagagctggcccgcatgaagcaggaacccgtgcgcacggatgacggccgcgccatggccgtgcgcatccaagcctacgactacctcgagtgctctgccaagaccaaggaaggcgtgcgcgaggtcttcgagacggccacgcgcgccgcgctgcagaagcgctacggctcccagaacggctgcatcaactgctgcaaggtgctatgagggccgcgcccgtcgcgcctgcccctgccggcacggctccccctcctggaccagtcccccgcgagcccggagaaggggagacccgtgtcccacaaggaccccaccggcctgcctggcatctgtctgctgacgcctctggcttgcgccaggacttggcgtgggcaccgggcgcccccatcccagtgtctgtgtgcgtccagctgtgttgcacaggcctgggctccccactgagtgccaagggtcccctgagcatgcttttctgaagagccgggcctcagagtgtgtggctgtgtgtctgttcgactcccctcgccccattttcaccccacccccgcctctgatccccgggggcgagattggcgcgggagtgtggccgcgccccatcagatgttcgcccttcaccagcgggagcttgatatcccttgtctgtaacatagaccccgggtactgcgggaggggagggctgctggggaggatggggggatgttatataaatatagatataattttattttcggagctaagatggtgttatttaagggtggtgatgggtgagcgctctggcccaggctgggccagactcccgcccaagcatgaacaggacttgaccatctttccaacccctggggaagacatttgcaactgacttggggaggacacagcttcagcacagcctctcctgcgggccagcccgctgcgaaccctccaccagctaccggagggaggagggaggatgcgctgtggggttgtttttgccataagcgaactttgtgcctgtcctagaagtgaaaattgttcagtccaagaaactgatgttatttgatttatttaaaggctaaaatttgtttttttattctttgcacaattgtttcattgtttgacacttaatgcactcgtcatttgcatacgacagtagcattctgaccacacttgtacgctgtaacctcatctacttctgatgtttttaaaaaatgacttttaacaaggagagggaaaagaaacccactaaattttgctttgtttccttgaagaatgtggcaacactgttttgtgattttatttgtgcaggtcatgcacacagttttgataaagggcagtaacaagtattggggcctattttttttttttccacaaggcattctctaaagctatgtgaaattttctctgcacctctgtacagagaatacacctgcccctgtatatccttttttcccctcccctccctcccagtggtacttctactaaattgttgtcttgttttttattttttaaataaactgacaaatgacaaaatggtgagcttatgatgtttacataaaagttctataagctgtgtatacagttttttatgtaaaatattaaaagactatgatgatgacattt

SEQ ID NO: 3573 - DNA, 2199 bp, Homo sapiens
  source 1..2199: mol_type = genomic DNA
agtctgagcctccggcaccggccgcgcagctggaggcggcggagcggaaggtgtagggtgggccggcaaagtcaaccggccgctctggatcatctgggaattcaagagagcgattggagagaggtctgatgtagccacactgtcttgtcttggggaaggccccagaagttccaggctccattccaggccctgtgtggggctcagttgcccctcttaaggggtcagtgggacagtccctctggggctgcctctcacagggagttgtccatgccatcttggccttgggcctagtgtcctggcctgggctgcctgctgttctggcccaatcatagcctggagggaaagtcttctaattgggctggaggctccaggtcccttaacgcatgcctcaaccccgggtttctgtcctctgcctcccaccactctggtgccgtctgaattaccctgctggggggacagcagtggcatactcatgcctaagtgactggctttcaccccagtagtgattgccctccatcaacactgcccaccccaggttggggctaccccagcccatctttacaaaacagggcaaggtgaactaatggagtgggtggaggagttggaagaaatcccagcgtcagtcaccgggatagaattcccaaggaaccctctttttggaggatggtttccatttctggaggcgatctgccgacagggtgaatgccttcttgcttgtcttctggggaatcagagagagtccgttttgtggtgggaagagtgtggctgtgtactttgaactcctgtaaattctctgactcatgtccacaaaaccaacagttttgtgaatgtgtctggaggcaagggaagggccactcaggatctatgttgaagggaagaggcctggggctggagtattcgcttcctaaagggcagtgtgaggtggtggtggggtgtggggagtagaggcgttcagtcagcccagtttgacaggatgtgggactgagagaaaaagctaggtttgaggctgagatcaggttaccgtcgctttcttaactgctccctgcctggttggtgctgggactggccctcatttgtctcttcttttggggctcctcccagcccagactctagccccctcccccttcccaacagccttgacttcatctcagctccagagcccgccctctcttcctgcagcctgggaacttcagccggctggagccccaccatggctgcaatccgaaagaagctggtgatcgttggggatggtgcctgtgggaagacctgcctcctcatcgtcttcagcaaggatcagtttccggaggtctacgtccctactgtctttgagaactatattgcggacattgaggtggacggcaagcaggtggagctggctctgtgggacacagcagggcaggaagactatgatcgactgcggcctctctcctacccggacactgatgtcatcctcatgtgcttctccatcgacagccctgacagcctggaaaacattcctgagaagtggaccccagaggtgaagcacttctgccccaacgtgcccatcatcctggtggggaataagaaggacctgaggcaagacgagcacaccaggagagagctggccaagatgaagcaggagcccgttcggtctgaggaaggccgggacatggcgaaccggatcagtgcctttggctaccttgagtgctcagccaagaccaaggagggagtgcgggaggtgtttgagatggccactcgggctggcctccaggtccgcaagaacaagcgtcggaggggctgtcccattctctgagatccccaaggcctttcctacatgccccctcccttcacaggggtacagaaattatccccctacaaccccagcctcctgagggctccatgctgaaggctcccattttcagttccctcctgcccaggactgcattgttttctagccccgaggtggtggcacgggccctccctcccagcgctctgggagccacgcctatgccctgcccttcctcagggcccctggggatcttgccccctttgaccttccccaaaggatggtcacacaccagcactttatacacttctggctcacaggaaagtgtctgcagtaggggacccagagtcccaggcccctggagttgttttcggcaggggccttgtctctcactgcatttggtcaggggggcatgaataaaggctacaggctcc

SEQ ID NO: 3574 - DNA, 1418 bp, Homo sapiens
  source 1..1418: mol_type = genomic DNA
attgaaggctgggcagagtctgagtccacccgggtcgtgctccccccgctcgcccggctcctccgcagtccaggaatctccccgtggctctccccgacctggaggggtggacgcccctggcccccagtccccggcctgcggagggggccggtggctgcggccctgcgcggggccggggcgggccgagccaagggccgcccccggccgaccctccccctgccgggcccgccctccccgccgcggcgctggaggagggcggggcggggccctggggtcagtctgagcctccggcaccggccgcgcagctggaggcggcggagcggaagccttgacttcatctcagctccagagcccgccctctcttcctgcagcctgggaacttcagccggctggagccccaccatggctgcaatccgaaagaagctggtgatcgttggggatggtgcctgtgggaagacctgcctcctcatcgtcttcagcaaggatcagtttccggaggtctacgtccctactgtctttgagaactatattgcggacattgaggtggacggcaagcaggtggagctggctctgtgggacacagcagggcaggaagactatgatcgactgcggcctctctcctacccggacactgatgtcatcctcatgtgcttctccatcgacagccctgacagcctggaaaacattcctgagaagtggaccccagaggtgaagcacttctgccccaacgtgcccatcatcctggtggggaataagaaggacctgaggcaagacgagcacaccaggagagagctggccaagatgaagcaggagcccgttcggtctgaggaaggccgggacatggcgaaccggatcagtgcctttggctaccttgagtgctcagccaagaccaaggagggagtgcgggaggtgtttgagatggccactcgggctggcctccaggtccgcaagaacaagcgtcggaggggctgtcccattctctgagatccccaaggcctttcctacatgccccctcccttcacaggggtacagaaattatccccctacaaccccagcctcctgagggctccatgctgaaggctcccattttcagttccctcctgcccaggactgcattgttttctagccccgaggtggtggcacgggccctccctcccagcgctctgggagccacgcctatgccctgcccttcctcagggcccctggggatcttgccccctttgaccttccccaaaggatggtcacacaccagcactttatacacttctggctcacaggaaagtgtctgcagtaggggacccagagtcccaggcccctggagttgttttcggcaggggccttgtctctcactgcatttggtcaggggggcatgaataaaggctacaggctccaacgtgtgtggcagctttcggtctttc

SEQ ID NO: 3575 - DNA, 1026 bp, Homo sapiens
  source 1..1026: mol_type = genomic DNA
aggtaccctgggccggggctgcgggcggtggggcgtcttgggaactcgtccccaggagagcactttcccttcctcgctggcccggagatcggggcccgtgcgaggaggggcttcggcctgggcgtggaccccgttccctccaagcggagtcggcatccgggctgggcggtggtcggaccgcgtcggcccctccccgggctgcagcgagggggcccggacctgccggcaggggctctggcctcctgaggtccgagtcggagccccttcccttctcctcccagcttcccggaacctgccccgccgggcgaggggcgagggaacttcaactcagacgccccagcccccaggccttgacttcatctcagctccagagcccgccctctcttcctgcagcctgggaacttcagccggctggagccccaccatggctgcaatccgaaagaagctggtgatcgttggggatggtgcctgtgggaagacctgcctcctcatcgtcttcagcaaggatcagtttccggaggtctacgtccctactgtctttgagaactatattgcggacattgaggtggacggcaagcaggtggagctggctctgtgggacacagcagggcaggaagactatgatcgactgcggcctctctcctacccggacactgatgtcatcctcatgtgcttctccatcgacagccctgacagcctggaaaacattcctgagaagtggaccccagaggtgaagcacttctgccccaacgtgcccatcatcctggtggggaataagaaggacctgaggcaagacgagcacaccaggagagagctggccaagatgaagcaggagcccgttcggtctgaggaaggccgggacatggcgaaccggatcagtgcctttggctaccttgagtgctcagccaagaccaaggagggagtgcgggaggtgtttgagatggccactcgggctggcctccaggtccgcaagaacaagcgtcggaggggctgtcccattctctgagatccccaaggcctttccta

SEQ ID NO: 3576 - DNA, 1295 bp, Homo sapiens
  source 1..1295: mol_type = genomic DNA
ggcggtggggcgtcttgggaactcgtccccaggagagcactttcccttcctcgctggcccggagatcggggcccgtgcgaggaggggcttcggcctgggcgtggaccccgttccctccaagcggagtcggcatccgggctgggcggtggtcggaccgcgtcggcccctccccgggctgcagcgagggggcccggacctgccggcaggggctctggcctcctgagccttgacttcatctcagctccagagcccgccctctcttcctgcagcctgggaacttcagccggctggagccccaccatggctgcaatccgaaagaagctggtgatcgttggggatggtgcctgtgggaagacctgcctcctcatcgtcttcagcaaggatcagtttccggaggtctacgtccctactgtctttgagaactatattgcggacattgaggtggacggcaagcaggtggagctggctctgtgggacacagcagggcaggaagactatgatcgactgcggcctctctcctacccggacactgatgtcatcctcatgtgcttctccatcgacagccctgacagcctggaaaacattcctgagaagtggaccccagaggtgaagcacttctgccccaacgtgcccatcatcctggtggggaataagaaggacctgaggcaagacgagcacaccaggagagagctggccaagatgaagcaggagcccgttcggtctgaggaaggccgggacatggcgaaccggatcagtgcctttggctaccttgagtgctcagccaagaccaaggagggagtgcgggaggtgtttgagatggccactcgggctggcctccaggtccgcaagaacaagcgtcggaggggctgtcccattctctgagatccccaaggcctttcctacatgccccctcccttcacaggggtacagaaattatccccctacaaccccagcctcctgagggctccatgctgaaggctcccattttcagttccctcctgcccaggactgcattgttttctagccccgaggtggtggcacgggccctccctcccagcgctctgggagccacgcctatgccctgcccttcctcagggcccctggggatcttgccccctttgaccttccccaaaggatggtcacacaccagcactttatacacttctggctcacaggaaagtgtctgcagtaggggacccagagtcccaggcccctggagttgttttcggcaggggccttgtctctcactgcatttggtcaggggggcatgaataaaggctacaggctccaacgtg

SEQ ID NO: 3577 - DNA, 786 bp, Homo sapiens
  source 1..786: mol_type = genomic DNA
gcctccggcaccggccgcgcagctggaggcggcggagcggaagccccaccatggctgcaatccgaaagaagctggtgatcgttggggatggtgcctgtgggaagacctgcctcctcatcgtcttcagcaaggatcagtttccggaggtctacgtccctactgtctttgagaactatattgcggacattgaggtggacggcaagcaggtggagctggctctgtgggacacagcagggcaggaagactatgatcgactgcggcctctctcctacccggacactgatgtcatcctcatgtgcttctccatcgacagccctgacagcctggaaaacattcctgagaagtggaccccagaggtgaagcacttctgccccaacgtgcccatcatcctggtggggaataagaaggacctgaggaaggccgggacatggcgaaccggatcagtgcctttggctaccttgagtgctcagccaagaccaaggagggagtgcgggaggtgtttgagatggccactcgggctggcctccaggtccgcaagaacaagcgtcggaggggctgtcccattctctgagatccccaaggcctttcctacatgccccctcccttcacaggggtacagaaattatccccctacaaccccagcctcctgagggctccatgctgaaggctcccattttcagttccctcctgcccaggactgcattgttttctagccccgaggtggtggcacgggccctccctcccagcgctctgggagccacgcctatgccctgcccttcctcaggg

SEQ ID NO: 3578 - DNA, 888 bp, Homo sapiens
  source 1..888: mol_type = genomic DNA
tctgagcctccggcaccggccgcgcagctggaggcggcggagcggaagcctgggaacttcagccggctggagccccaccatggctgcaatccgaaagaagctggtgatcgttggggatggtgcctgtgggaagacctgcctcctcatcgtcttcagcaaggatcagtttccggaggtctacgtccctactgtctttgagaactatattgcggacattgaggtggacggcaagcaggtggagctggctctgtgggacacagcagggcaggaagactatgatcgactgcggcctctctcctacccggacactgatgtcatcctcatgtgcttctccatcgacagccctgacagcctggaaaacattcctgagaagtggaccccagaggtgaagcacttctgccccaacgtgcccatcatcctggtggggaataagaaggacctgaggcaagacgagcacaccaggagagagctggccaagatgaagcaggagcccgttcggtctgaggaaggccgggacatggcgaaccggatcagtgcctttggctaccttgagtgctcagccaagaccaaggagggagtgcgggaggtgtttgagatggccactcgggctggcctccaggtccgcaagaacaagcgtcggaggggctgtcccattctctgagatccccaaggcctttcctacatgccccctcccttcacaggggtacagaaattatccccctacaaccccagcctcctgagggctccatgctgaaggctcccattttcagttccctcctgcccaggactgcattgttttctagccccgaggtggtggcacgggccctccctcccagcgctctgggagccacgcctatgccctgcccttcctcagggcccctggggatc

SEQ ID NO: 3579 - DNA, 1028 bp, Homo sapiens
  source 1..1028: mol_type = genomic DNA
ctggggtcagtctgagcctccggcaccggccgcgcagctggaggcggcggagcggaagccttgacttcatctcagctccagagcccgccctctcttcctgcagcctgggaacttcagccggctggaggtcagttcccctccccagggaaggaggaagtgagggaagctgcgaagccccaccatggctgcaatccgaaagaagctggtgatcgttggggatggtgcctgtgggaagacctgcctcctcatcgtcttcagcaaggatcagtttccggaggtctacgtccctactgtctttgagaactatattgcggacattgaggtggacggcaagcaggtggagctggctctgtgggacacagcagggcaggaagactatgatcgactgcggcctctctcctacccggacactgatgtcatcctcatgtgcttctccatcgacagccctgacagcctggaaaacattcctgagaagtggaccccagaggtgaagcacttctgccccaacgtgcccatcatcctggtggggaataagaaggacctgaggcaagacgagcacaccaggagagagctggccaagatgaagcaggagcccgttcggtctgaggaaggccgggacatggcgaaccggatcagtgcctttggctaccttgagtgctcagccaagaccaaggagggagtgcgggaggtgtttgagatggccactcgggctggcctccaggtccgcaagaacaagcgtcggaggggctgtcccattctctgagatccccaaggcctttcctacatgccccctcccttcacaggggtacagaaattatccccctacaaccccagcctcctgagggctccatgctgaaggctcccattttcagttccctcctgcccaggactgcattgttttctagccccgaggtggtggcacgggccctccctcccagcgctctgggagccacgcctatgccctgcccttcctcagggcccctggggatcttgccccctttgaccttccccaaaggatggtcacacac

SEQ ID NO: 3580 - DNA, 1355 bp, Homo sapiens
  source 1..1355: mol_type = genomic DNA
aactttcccgacgccggtcctcccctaggggattgaaggctgggcagagtctgagtccacccgggtcgtgctccccccgctcgcccggctcctccgcagtccaggaatctccccgtggctctccccgacctggaggggtggacgcccctggcccccagtccccggcctgcggagggggccggtggctgcggccctgcgcggggccggggcgggccgagccaagggccgcccccggccgaccctccccctgccgggcccgccctccccgccgcggcgctggaggagggcggggcggggccctggggtcagtctgagcctccggcaccggccgcgcagctggaggcggcggagcggaagccccaccatggctgcaatccgaaagaagctggtgatcgttggggatggtgcctgtgggaagacctgcctcctcatcgtcttcagcaaggatcagtttccggaggtctacgtccctactgtctttgagaactatattgcggacattgaggtggacggcaagcaggtggagctggctctgtgggacacagcagggcaggaagactatgatcgactgcggcctctctcctacccggacactgatgtcatcctcatgtgcttctccatcgacagccctgacagcctggaaaacattcctgagaagtggaccccagaggtgaagcacttctgccccaacgtgcccatcatcctggtggggaataagaaggacctgaggcaagacgagcacaccaggagagagctggccaagatgaagcaggagcccgttcggtctgaggaaggccgggacatggcgaaccggatcagtgcctttggctaccttgagtgctcagccaagaccaaggagggagtgcgggaggtgtttgagatggccactcgggctggcctccaggtccgcaagaacaagcgtcggaggggctgtcccattctctgagatccccaaggcctttcctacatgccccctcccttcacaggggtacagaaattatccccctacaaccccagcctcctgagggctccatgctgaaggctcccattttcagttccctcctgcccaggactgcattgttttctagccccgaggtggtggcacgggccctccctcccagcgctctgggagccacgcctatgccctgcccttcctcagggcccctggggatcttgccccctttgaccttccccaaaggatggtcacacaccagcactttatacacttctggctcacaggaaagtgtctgcagtaggggacccagagtcccaggcccctggagttgttttcggcaggggccttgtctctcactgcatttggtcaggggggcatgaataaaggctacaggctccaa

SEQ ID NO: 3581 - DNA, 470 bp, Homo sapiens
  source 1..470: mol_type = genomic DNA
aggaaggggctgttccagagtgggtggaggcatctgggtaccgaaggagataattcctgccaaaatgcccgacagagtgcctggcacctaggggctctataactattcttcctttacccacctaccacctggtagctggttctgctactctggtcctagagagggactcctcatttgtgactggacagccccaccatggctgcaatccgaaagaagctggtgatcgttggggatggtgcctgtgggaagacctgcctcctcatcgtcttcagcaaggatcagtttccggaggtctacgtccctactgtctttgagaactatattgcggacattgaggtggacggcaagcaggtggagctggctctgtgggacacagcagggcaggaagactatgatcgactgcggcctctctcctacccggacactgatgtcatcctcatgtgcttctccatcgacagccctgacagcct

SEQ ID NO: 3582 - DNA, 866 bp, Homo sapiens
  source 1..866: mol_type = genomic DNA
ggcggtggggcgtcttgggaactcgtccccaggagagcactttcccttcctcgctggcccggagatcggggcccgtgcgaggaggggcttcggcctgggcgtggaccccgttccctccaagcggagtcggcatccgggctgggcggtggtcggaccgcgtcggcccctccccgggctgcagcgagggggcccggacctgccggcaggggctctggcctcctgagccttgacttcatctcagctccagagcccgccctctcttcctgcagcctgggaacttcagccggctggagccccaccatggctgcaatccgaaagaagctggtgatcgttggggatggtgcctgtgggaagacctgcctcctcatcgtcttcagcaaggatcagtttccggaggtctacgtccctactgtctttgagaactatattgcggacattgaggtggacggcaagcaggtggagctggctctgtgggacacagcagggcaggaagactatgatcgactgcggcctctctcctacccggacactgatgtcatcctcatgtgcttctccatcgacagccctgacagcctggaaaacattcctgagaagtggaccccagaggtgaagcacttctgccccaacgtgcccatcatcctggtggggaataagaaggacctgaggcaagacgagcacaccaggagagagctggccaagatgaagcaggagcccgttcggtctgaggaaggccgggacatggcgaaccggatcagtgcctttggctaccttgagtgctcagccaagaccaaggagggagtgcgggaggtgtttgagatggccactcgggctggcctccaggtccgcaagaacaagcgtcggagggg

SEQ ID NO: 3583 - DNA, 517 bp, Homo sapiens
  source 1..517: mol_type = genomic DNA
gcagctggaggcggcggagcggaagcccagactctagccccctcccccttcccaacagccttgacttcatctcagctccagagcccgccctctcttcctgcagcctgggaacttcagccggctggagccccaccatggctgcaatccgaaagaagctggtgatcgttggggatggtgcctgtgggaagacctgcctcctcatcgtcttcagcaaggatcagtttccggaggtctacgtccctactgtctttgagaactatattgcggacattgaggtggacggcaagcaggtggagctggctctgtgggacacagcagggcaggaagactatgatcgactgcggcctctctcctacccggacactgatgtcatcctcatgtgcttctccatcgacagccctgacagcctggaaaacattcctgagaagtggaccccagaggtgaagcacttctgccccaacgtgcccatcatcctggtggggaataagaaggacctgaggcaagacgagcacaccag

SEQ ID NO: 3584 - DNA, 820 bp, Homo sapiens
  source 1..820: mol_type = genomic DNA
ccggcaccggccgcgcagctggaggcggcggagcggaagggcaaggtgaactaatggagtgggtggaggagttggaagaaatcccagcgtcagtcaccgggatagaattcccaaggaaccctctttttggaggatggtttccatttctggaggcgatctgccgacaggccttgacttcatctcagctccagagcccgccctctcttcctgcagcctgggaacttcagccggctggagccccaccatggctgcaatccgaaagaagctggtgatcgttggggatggtgcctgtgggaagacctgcctcctcatcgtcttcagcaaggatcagtttccggaggtctacgtccctactgtctttgagaactatattgcggacattgaggtggacggcaagcaggtggagctggctctgtgggacacagcagggcaggaagactatgatcgactgcggcctctctcctacccggacactgatgtcatcctcatgtgcttctccatcgacagccctgacagcctggaaaacattcctgagaagtggaccccagaggtgaagcacttctgccccaacgtgcccatcatcctggtggggaataagaaggacctgaggcaagacgagcacaccaggagagagctggccaagatgaagcaggagcccgttcggtctgaggaaggccgggacatggcgaaccggatcagtgcctttggctaccttgagtgctcagccaagaccaaggagggagtgcgggaggtgtttgagatggccactcgggctggcctccaggtccgcaagaacaagcgtcggaggggctgtcccatt

SEQ ID NO: 3585 - DNA, 574 bp, Homo sapiens
  source 1..574: mol_type = genomic DNA
aagcccgggaagctgactccttgccctgagtcacagggaggggtgggcagggcatgcggccccaccatggctgcaatccgaaagaagctggtgatcgttggggatggtgcctgtgggaagacctgcctcctcatcgtcttcagcaaggatcagtttccggaggtctacgtccctactgtctttgagaactatattgcggacattgaggtggacggcaagcaggtggagctggctctgtgggacacagcagggcaggaagactatgatcgactgcggcctctctcctacccggacactgatgtcatcctcatgtgcttctccatcgacagccctgacagcctggaaaacattcctgagaagtggaccccagaggtgaagcacttctgccccaacgtgcccatcatcctggtggggaataagaaggacctgaggcaagacgagcacaccaggagagagctggccaagatgaagcaggagcccgttcggtctgaggaaggccgggacatggcgaaccggatcagtgcctttggctaccttgagtgctcagccaagaccaaggagggagtgcgggagg

SEQ ID NO: 3586 - DNA, 3752 bp, Homo sapiens
  source 1..3752: mol_type = genomic DNA
ctgagagctccaggtagtgagcagttcagtcgatttcctcgttaccccgcccccctttctcttgcccccccacccctctcatctgcctggtggaggatgaagcggctgcagtggccccagcctcagcagcggcaccggcggtggctgcggtgtgggtggccggaactggggtggtgaagaagcggtggtggcggctgaaggagcggtagcagcctcagcctctttccctgtgcttcctttcctctttagtgcagcgaggaagttttcgcttctgtacatgtgtttgtgtgcgtgagtgtgggtgtgtgcggtgaggtttgggtggcgtttgtgcaggcgttgggttttttgcccacttggcttcccgtaacccaggcagctggggagcctgggctgtggccctaggagggggcgcggcggcgggctctctccttttgttgttgtttcctcagcctggggagctgaaggggagacgcgtctgggtggggctgctcggagcccgggcctggtggcccctggggctcccgggcgggcagggtagggcagagtagagcgggcttcaacatgatggcggccgaggccggcagtgaggagggcggcccggtaacagccggagctggaggaggcggcgcggcagcgggctccagtgcctatcccgcagtgtgtcgggtgaagatacccgcggccctgcctgtggcagccgccccctatcctgggctggtggagaccggagtggctggaactctgggtggcggagccgctttggggtcagagttcctaggagccgggtctgtggcaggggcactggggggagctggactgacagggggaggtactgctgctggcgtagctggtgctgctgctggcgtggccggtgctgctgttgctggacctagtggagacatggctctcaccaaactgcccacttcgttgcttgctgagactctcgggccaggcggcggttttccccctctgccccctcccccttacctgccccctttgggggcgggcctcgggacagtggacgaaggtgactctctggatggaccagaatacgaggaggaagaggtggccataccgttgaccgctcctccaactaaccagtggtatcacggaaaacttgacagaacgatagcagaagaacgcctcaggcaggcagggaagtctggcagttatcttataagagagagtgatcggaggccagggtcctttgtactttcatttcttagccagatgaatgttgtcaaccattttaggattattgctatgtgtggagattactacattggtggaagacgtttttcttcactgtcagacctaataggttattacagtcatgtttcttgtttgcttaaaggagaaaaattactttacccagttgcaccaccagagccagtagaagatagaaggcgtgtacgagctattctaccttacacaaaagtaccagacactgatgaaataagtttcttaaaaggagatatgttcattgttcataatgaattagaagatggatggatgtgggttacaaatttaagaacagatgaacaaggccttattgttgaagacctagtagaagaggtgggccgggaagaagatccacatgaaggaaaaatatggttccatgggaagatttccaaacaggaagcttataatttactaatgacagttggtcaagtctgcagttttcttgtgaggccctcagataatactcctggcgattattcactttatttccggaccaatgaaaatattcagcgatttaaaatatgtccaacgccaaacaatcagtttatgatgggaggccggtattataacagcattggggacatcatagatcactatcgaaaagaacagattgttgaaggatattatcttaaggaacctgtaccaatgcaggatcaagaacaagtactcaatgacacagtggatggcaaggaaatctataataccatccgtcgtaaaacaaaggatgccttttataaaaacattgttaagaaaggttatcttctgaaaaagggcaaaggaaaacgttggaaaaatttatattttatcttagagggtagtgatgcccaacttatttattttgaaagcgaaaaacgagctaccaaaccaaaaggattaatagatctcagtgtatgttctgtctatgtcgttcatgatagtctctttggcaggccaaactgttttcagatagtagttcagcactttagtgaagaacattacatcttttactttgcaggagaaactccagaacaagcagaggattggatgaaaggtctgcaggcattttgcaatttacggaaaagtagtccagggacatccaataaacgccttcgtcaggtcagcagccttgttttacatattgaagaagcccataaactcccagtaaaacattttactaatccatattgtaacatctacctgaatagtgtccaagtagcaaaaactcatgcaagggaagggcaaaacccagtatggtcagaagagtttgtctttgatgatcttcctcctgacatcaatagatttgaaataactcttagtaataaaacaaagaaaagcaaagatcctgatatcttatttatgcgctgccagttgagccgattacagaaagggcatgccacagatgaatggtttctgctcagctcccatataccattaaaaggtattgaaccagggtccctgcgtgttcgagcacgatactctatggaaaaaatcatgccagaagaagagtacagtgaatttaaagagcttatactgcaaaaggaacttcatgtagtctatgctttatcacatgtatgtggacaagaccgaacactactggccagcatcctactgaggatttttcttcacgaaaagcttgaatcgttgttgttatgcacactaaatgacagagaaataagcatggaagatgaagccactaccctatttcgagccacaacacttgcaagcaccttgatggagcagtatatgaaagccactgctacacagtttgttcatcatgctttgaaagactctattttaaagataatggaaagcaagcagtcttgtgagttaagtccatcaaagttagaaaaaaatgaagatgtgaacactaatttaacacacctattgaacatactttcagagcttgtggagaaaatattcatggcttcagaaatacttccaccgacattgagatatatttatgggtgtttacagaaatctgttcagcataagtggcctacaaataccaccatgagaacaagagttgttagtggttttgtttttcttcgactcatctgtcctgccatcctgaatccacggatgttcaatatcatctcagattctccatctcctattgctgcaagaacactgatattagtggctaaatctgtgcagaacttagcaaatcttgtggaatttggagctaaggagccctacatggaaggtgtcaatccattcatcaaaagcaacaaacatcgtatgatcatgtttttagatgaacttgggaatgtacctgaacttccggacactacagagcattctagaacggacctgtcccgtgatttagcagcattgcatgagatttgcgtggctcattcagatgaacttcgaacgctcagtaatgagcgtggtgcacagcagcacgtattgaaaaagcttctggctataacagaactgcttcaacaaaaacaaaaccagtatacaaaaaccaatgatgtcaggtagcagccttcgccccagtgttctgcatggattcagcatgtccaaca

SEQ ID NO: 3587 - DNA, 3776 bp, Homo sapiens
  source 1..3776: mol_type = genomic DNA
gaccagaatacgaggaggaagaggtggccataccgttgaccgctcctccaactaaccagtaagttaagactgctgttcaggaatttgggaagctggctccagaaaagaagtggaaatgaaggggtggtatcacggaaaacttgacagaacgatagcagaagaacgcctcaggcaggcagggaagtctggcagttatcttataagagagagtgatcggaggccagggtcctttgtactttcatttcttagccagatgaatgttgtcaaccattttaggattattgctatgtgtggagattactacattggtggaagacgtttttcttcactgtcagacctaataggttattacagtcatgtttcttgtttgcttaaaggagaaaaattactttacccagttgcaccaccagagccagtagaagatagaaggcgtgtacgagctattctaccttacacaaaagtaccagacactgatgaaataagtttcttaaaaggagatatgttcattgttcataatgaattagaagatggatggatgtgggttacaaatttaagaacagatgaacaaggccttattgttgaagacctagtagaagaggtgggccgggaagaagatccacatgaaggaaaaatatggttccatgggaagatttccaaacaggaagcttataatttactaatgacagttggtcaagtctgcagttttcttgtgaggccctcagataatactcctggcgattattcactttatttccggaccaatgaaaatattcagcgatttaaaatatgtccaacgccaaacaatcagtttatgatgggaggccggtattataacagcattggggacatcatagatcactatcgaaaagaacagattgttgaaggatattatcttaaggaacctgtaccaatgcaggatcaagaacaagtactcaatgacacagtggatggcaaggaaatctataataccatccgtcgtaaaacaaaggatgccttttataaaaacattgttaagaaaggttatcttctgaaaaagggcaaaggaaaacgttggaaaaatttatattttatcttagagggtagtgatgcccaacttatttattttgaaagcgaaaaacgagctaccaaaccaaaaggattaatagatctcagtgtatgttctgtctatgtcgttcatgatagtctctttggcaggccaaactgttttcagatagtagttcagcactttagtgaagaacattacatcttttactttgcaggagaaactccagaacaagcagaggattggatgaaaggtctgcaggcattttgcaatttacggaaaagtagtccagggacatccaataaacgccttcgtcaggtcagcagccttgttttacatattgaagaagcccataaactcccagtaaaacattttactaatccatattgtaacatctacctgaatagtgtccaagtagcaaaaactcatgcaagggaagggcaaaacccagtatggtcagaagagtttgtctttgatgatcttcctcctgacatcaatagatttgaaataactcttagtaataaaacaaagaaaagcaaagatcctgatatcttatttatgcgctgccagttgagccgattacagaaagggcatgccacagatgaatggtttctgctcagctcccatataccattaaaaggtattgaaccagggtccctgcgtgttcgagcacgatactctatggaaaaaatcatgccagaagaagagtacagtgaatttaaagagcttatactgcaaaaggaacttcatgtagtctatgctttatcacatgtatgtggacaagaccgaacactactggccagcatcctactgaggatttttcttcacgaaaagcttgaatcgttgttgttatgcacactaaatgacagagaaataagcatggaagatgaagccactaccctatttcgagccacaacacttgcaagcaccttgatggagcagtatatgaaagccactgctacacagtttgttcatcatgctttgaaagactctattttaaagataatggaaagcaagcagtcttgtgagttaagtccatcaaagttagaaaaaaatgaagatgtgaacactaatttaacacacctattgaacatactttcagagcttgtggagaaaatattcatggcttcagaaatacttccaccgacattgagatatatttatgggtgtttacagaaatctgttcagcataagtggcctacaaataccaccatgagaacaagagttgttagtggttttgtttttcttcgactcatctgtcctgccatcctgaatccacggatgttcaatatcatctcagattctccatctcctattgctgcaagaacactgatattagtggctaaatctgtgcagaacttagcaaatcttgtggaatttggagctaaggagccctacatggaaggtgtcaatccattcatcaaaagcaacaaacatcgtatgatcatgtttttagatgaacttgggaatgtacctgaacttccggacactacagagcattctagaacggacctgtcccgtgatttagcagcattgcatgagatttgcgtggctcattcagatgaacttcgaacgctcagtaatgagcgtggtgcacagcagcacgtattgaaaaagcttctggctataacagaactgcttcaacaaaaacaaaaccagtatacaaaaaccaatgatgtcaggtagcagccttcgccccagtgttctgcatggattcagcatgtccaacatggtaattcacttcagtttaatgtctcctttgctcttgccaaaaaatagcacacttttccacattccagtgatgtgtgagctatgcaaacaaaatccaagattctgctggtgaataactatgccagcaaccttgtaagctatctgtgcaggatatttgcactatttccacatggaatcaatctttaacaacctctgagccttggtgtacagaccacctttcacaaaacgaaatgctatgactgtatcttgatatctcgaactttcaaaatatattttcagtacacccagttgccaaagttttgctgtctcttagagaaagaactatgaaatcaactgacaagaaacacattcttattgacaattgtgtataactggattgcagactgttcttactgtaactacttcctgattaggaatatgaccatttgactgttcaatgattatttgtatttacagtttccagagtttgtcattataataggaacaatctttgctgtatacttttaaaaaatactctgctatttctcttgctggaactgttgaaagaaaatatatagaatgatctattgctcatcagctttattttttaaacatacgacttattttgttgaaattgtcaaagactgtatttagatctcataatgctttgttaaatgtttacaagtaaatagtttgaattcagtaaatattattggttgttgtattgatcaatgcatgttacccattcaaccattttatagactaccaatttcttttatgttaactagaatgcttttgttaaaagttatttgttcattatttgtgctacccctttgattatgcagacaacctcatcagctgcctaacttatccatctttgaacttctgactacttgttgtatctgctggatatttagttcaactgtatagttttatttacttctgtatgtgtatttttgtgaagtattcacaaaggttaagttaaaataaaaccaagggatatcttgcataattgattacttct

SEQ ID NO: 3588 - DNA, 3009 bp, Homo sapiens
  source 1..3009: mol_type = genomic DNA
gaggaggaagaggtggccataccgttgaccgctcctccaactaaccagtaagttaagactgctgttcaggaatttgggaagctggctccagaaaagaagtggaaatgaaggggttccatgtgccttgtgaagtcatggttcctcagtataagatcgaggtggtatcacggaaaacttgacagaacgatagcagaagaacgcctcaggcaggcagggaagtctggcagttatcttataagagagagtgatcggaggccagggtcctttgtactttcatttcttagccagatgaatgttgtcaaccattttaggattattgctatgtgtggagattactacattggtggaagacgtttttcttcactgtcagacctaataggttattacagtcatgtttcttgtttgcttaaaggagaaaaattactttacccagttgcaccaccagagccagtagaagatagaaggcgtgtacgagctattctaccttacacaaaagtaccagacactgatgaaataagtttcttaaaaggagatatgttcattgttcataatgaattagaagatggatggatgtgggttacaaatttaagaacagatgaacaaggccttattgttgaagacctagtagaagaggtgggccgggaagaagatccacatgaaggaaaaatatggttccatgggaagatttccaaacaggaagcttataatttactaatgacagttggtcaagtctgcagttttcttgtgaggccctcagataatactcctggcgattattcactttatttccggaccaatgaaaatattcagcgatttaaaatatgtccaacgccaaacaatcagtttatgatgggaggccggtattataacagcattggggacatcatagatcactatcgaaaagaacagattgttgaaggatattatcttaaggaacctgtaccaatgcaggatcaagaacaagtactcaatgacacagtggatggcaaggaaatctataataccatccgtcgtaaaacaaaggatgccttttataaaaacattgttaagaaaggttatcttctgaaaaagggcaaaggaaaacgttggaaaaatttatattttatcttagagggtagtgatgcccaacttatttattttgaaagcgaaaaacgagctaccaaaccaaaaggattaatagatctcagtgtatgttctgtctatgtcgttcatgatagtctctttggcaggccaaactgttttcagatagtagttcagcactttagtgaagaacattacatcttttactttgcaggagaaactccagaacaagcagaggattggatgaaaggtctgcaggcattttgcaatttacggaaaagtagtccagggacatccaataaacgccttcgtcaggtcagcagccttgttttacatattgaagaagcccataaactcccagtaaaacattttactaatccatattgtaacatctacctgaatagtgtccaagtagcaaaaactcatgcaagggaagggcaaaacccagtatggtcagaagagtttgtctttgatgatcttcctcctgacatcaatagatttgaaataactcttagtaataaaacaaagaaaagcaaagatcctgatatcttatttatgcgctgccagttgagccgattacagaaagggcatgccacagatgaatggtttctgctcagctcccatataccattaaaaggtattgaaccagggtccctgcgtgttcgagcacgatactctatggaaaaaatcatgccagaagaagagtacagtgaatttaaagagcttatactgcaaaaggaacttcatgtagtctatgctttatcacatgtatgtggacaagaccgaacactactggccagcatcctactgaggatttttcttcacgaaaagcttgaatcgttgttgttatgcacactaaatgacagagaaataagcatggaagatgaagccactaccctatttcgagccacaacacttgcaagcaccttgatggagcagtatatgaaagccactgctacacagtttgttcatcatgctttgaaagactctattttaaagataatggaaagcaagcagtcttgtgagttaagtccatcaaagttagaaaaaaatgaagatgtgaacactaatttaacacacctattgaacatactttcagagcttgtggagaaaatattcatggcttcagaaatacttccaccgacattgagatatatttatgggtgtttacagaaatctgttcagcataagtggcctacaaataccaccatgagaacaagagttgttagtggttttgtttttcttcgactcatctgtcctgccatcctgaatccacggatgttcaatatcatctcagattctccatctcctattgctgcaagaacactgatattagtggctaaatctgtgcagaacttagcaaatcttgtggaatttggagctaaggagccctacatggaaggtgtcaatccattcatcaaaagcaacaaacatcgtatgatcatgtttttagatgaacttgggaatgtacctgaacttccggacactacagagcattctagaacggacctgtcccgtgatttagcagcattgcatgagatttgcgtggctcattcagatgaacttcgaacgctcagtaatgagcgtggtgcacagcagcacgtattgaaaaagcttctggctataacagaactgcttcaacaaaaacaaaaccagtatacaaaaaccaatgatgtcaggtagcagccttcgccccagtgttctgcatggattcagcatgtccaacatggtaattcacttcagtttaatgtctcctttgctcttgccaaaaaatagcacacttttccacattccagtgatgtgtgagctatgcaaacaaaatccaagattctgctggtgaataactatgccagcaaccttgtaagctatctgtgcaggatatttgcactatttccacatggaatcaatctttaacaacctctgagcctt

SEQ ID NO: 3589 - DNA, 3060 bp, Homo sapiens
  source 1..3060: mol_type = genomic DNA
gaggaggaagaggtggccataccgttgaccgctcctccaactaaccagtaagttaagactgctgttcaggaatttgggaagctggctccagaaaagaagtggaaatgaaggggcatactacctggcgtcttcctacatttattgctcctctgggaaagtgtaaagtctttaagatggaaagcatgagaaaatgtgtatctaatgagaaccggatatagttctgtcccttccaagttgaggtggtatcacggaaaacttgacagaacgatagcagaagaacgcctcaggcaggcagggaagtctggcagttatcttataagagagagtgatcggaggccagggtcctttgtactttcatttcttagccagatgaatgttgtcaaccattttaggattattgctatgtgtggagattactacattggtggaagacgtttttcttcactgtcagacctaataggttattacagtcatgtttcttgtttgcttaaaggagaaaaattactttacccagttgcaccaccagagccagtagaagatagaaggcgtgtacgagctattctaccttacacaaaagtaccagacactgatgaaataagtttcttaaaaggagatatgttcattgttcataatgaattagaagatggatggatgtgggttacaaatttaagaacagatgaacaaggccttattgttgaagacctagtagaagaggtgggccgggaagaagatccacatgaaggaaaaatatggttccatgggaagatttccaaacaggaagcttataatttactaatgacagttggtcaagtctgcagttttcttgtgaggccctcagataatactcctggcgattattcactttatttccggaccaatgaaaatattcagcgatttaaaatatgtccaacgccaaacaatcagtttatgatgggaggccggtattataacagcattggggacatcatagatcactatcgaaaagaacagattgttgaaggatattatcttaaggaacctgtaccaatgcaggatcaagaacaagtactcaatgacacagtggatggcaaggaaatctataataccatccgtcgtaaaacaaaggatgccttttataaaaacattgttaagaaaggttatcttctgaaaaagggcaaaggaaaacgttggaaaaatttatattttatcttagagggtagtgatgcccaacttatttattttgaaagcgaaaaacgagctaccaaaccaaaaggattaatagatctcagtgtatgttctgtctatgtcgttcatgatagtctctttggcaggccaaactgttttcagatagtagttcagcactttagtgaagaacattacatcttttactttgcaggagaaactccagaacaagcagaggattggatgaaaggtctgcaggcattttgcaatttacggaaaagtagtccagggacatccaataaacgccttcgtcaggtcagcagccttgttttacatattgaagaagcccataaactcccagtaaaacattttactaatccatattgtaacatctacctgaatagtgtccaagtagcaaaaactcatgcaagggaagggcaaaacccagtatggtcagaagagtttgtctttgatgatcttcctcctgacatcaatagatttgaaataactcttagtaataaaacaaagaaaagcaaagatcctgatatcttatttatgcgctgccagttgagccgattacagaaagggcatgccacagatgaatggtttctgctcagctcccatataccattaaaaggtattgaaccagggtccctgcgtgttcgagcacgatactctatggaaaaaatcatgccagaagaagagtacagtgaatttaaagagcttatactgcaaaaggaacttcatgtagtctatgctttatcacatgtatgtggacaagaccgaacactactggccagcatcctactgaggatttttcttcacgaaaagcttgaatcgttgttgttatgcacactaaatgacagagaaataagcatggaagatgaagccactaccctatttcgagccacaacacttgcaagcaccttgatggagcagtatatgaaagccactgctacacagtttgttcatcatgctttgaaagactctattttaaagataatggaaagcaagcagtcttgtgagttaagtccatcaaagttagaaaaaaatgaagatgtgaacactaatttaacacacctattgaacatactttcagagcttgtggagaaaatattcatggcttcagaaatacttccaccgacattgagatatatttatgggtgtttacagaaatctgttcagcataagtggcctacaaataccaccatgagaacaagagttgttagtggttttgtttttcttcgactcatctgtcctgccatcctgaatccacggatgttcaatatcatctcagattctccatctcctattgctgcaagaacactgatattagtggctaaatctgtgcagaacttagcaaatcttgtggaatttggagctaaggagccctacatggaaggtgtcaatccattcatcaaaagcaacaaacatcgtatgatcatgtttttagatgaacttgggaatgtacctgaacttccggacactacagagcattctagaacggacctgtcccgtgatttagcagcattgcatgagatttgcgtggctcattcagatgaacttcgaacgctcagtaatgagcgtggtgcacagcagcacgtattgaaaaagcttctggctataacagaactgcttcaacaaaaacaaaaccagtatacaaaaaccaatgatgtcaggtagcagccttcgccccagtgttctgcatggattcagcatgtccaacatggtaattcacttcagtttaatgtctcctttgctcttgccaaaaaatagcacacttttccacattccagtgatgtgtgagctatgcaaacaaaatccaagattctgctggtgaataactatgccagcaaccttgtaagctatctgtgcaggatatttgcactatttccacat

SEQ ID NO: 3590 - DNA, 2701 bp, Homo sapiens
  source 1..2701: mol_type = genomic DNA
agctggggagcctgggctgtggccctaggagggggcgcggcggcgggctctctccttttgttgttgtttcctcagcctggggagctgaaggggagacgcgtctgggtggggctgctcggagcccgggcctggtggcccctggggctcccgggcgggcagggtagggcagagtagagcgggcttcaacatgatggcggccgaggccggcagtgaggagggcggcccggtaacagccggagctggaggaggcggcgcggcagcgggctccagtgcctatcccgcagtgtgtcgggtgaagatacccgcggccctgcctgtggcagccgccccctatcctgggctggtggagaccggagtggctggaactctgggtggcggagccgctttggggtcagagttcctaggagccgggtctgtggcaggggcactggggggagctggactgacagggggaggtactgctgctggcgtagctggtgctgctgctggcgtggccggtgctgctgttgctggacctagtggagacatggctctcaccaaactgcccacttcgttgcttgctgagactctcgggccaggcggcggttttccccctctgccccctcccccttacctgccccctttgggggcgggcctcgggacagtggacgaaggtgactctctggatggaccagaatacgaggaggaagaggtggccataccgttgaccgctcctccaactaaccagtggtatcacggaaaacttgacagaacgatagcagaagaacgcctcaggcaggcagggaagtctggcagttatcttataagagagagtgatcggaggccagggtcctttgtactttcatttcttagccagatgaatgttgtcaaccattttaggattattgctatgtgtggagattactacattggtggaagacgtttttcttcactgtcagacctaataggttattacagtcatgtttcttgtttgcttaaaggagaaaaattactttacccagttgcaccaccagagccagtagaagatagaaggcgtgtacgagctattctaccttacacaaaagtaccagacactgatgaaataagtttcttaaaaggagatatgttcattgttcataatgaattagaagatggatggatgtgggttacaaatttaagaacagatgaacaaggccttattgttgaagacctagtagaagaggtgggccgggaagaagatccacatgaaggaaaaatatggttccatgggaagatttccaaacaggaagcttataatttactaatgacagttggtcaagtctgcagttttcttgtgaggccctcagataatactcctggcgattattcactttatttccggaccaatgaaaatattcagcgatttaaaatatgtccaacgccaaacaatcagtttatgatgggaggccggtattataacagcattggggacatcatagatcactatcgaaaagaacagattgttgaaggatattatcttaaggaacctgtaccaatgcaggatcaagaacaagtactcaatgacacagtggatggcaaggaaatctataataccatccgtcgtaaaacaaaggatgccttttataaaaacattgttaagaaaggttatcttctgaaaaagggcaaaggaaaacgttggaaaaatttatattttatcttagagggtagtgatgcccaacttatttattttgaaagcgaaaaacgagctaccaaaccaaaaggattaatagatctcagtgtatgttctgtctatgtcgttcatgatagtctctttggcaggccaaactgttttcagatagtagttcagcactttagtgaagaacattacatcttttactttgcaggagaaactccagaacaagcagaggattggatgaaaggtctgcaggcattttgcaatttacggaaaagtagtccagggacatccaataaacgccttcgtcaggtcagcagccttgttttacatattgaagaagcccataaactcccagtaaaacattttactaatccatattgtaacatctacctgaatagtgtccaagtagcaaaaactcatgcaagggaagggcaaaacccagtatggtcagaagagtttgtctttgatgatcttcctcctgacatcaatagatttgaaataactcttagtaataaaacaaagaaaagcaaagatcctgatatcttatttatgcgctgccagttgagccgattacagaaagggcatgccacagatgaatggtttctgctcagctcccatataccattaaaaggtattgaaccagggtccctgcgtgttcgagcacgatactctatggaaaaaatcatgccagaagaagagtacagtgaatttaaagagcttatactgcaaaaggaacttcatgtagtctatgctttatcacatgtatgtggacaagaccgaacactactggccagcatcctactgaggatttttcttcacgaaaagcttgaatcgttgttgttatgcacactaaatgacagagaaataagcatggaagatgaagccactaccctatttcgagccacaacacttgcaagcaccttgatggagcagtatatgaaagccactgctacacagtttgttcatcatgctttgaaagactctattttaaagataatggaaagcaagcagtcttgtgagcttagtagttccaagctacaaaaggca

SEQ ID NO: 3591 - DNA, 1490 bp, Homo sapiens
  source 1..1490: mol_type = genomic DNA
ggttacctcatcgccgcctccgggaggccccgctcgctcgcgccggcggctggggcggcgactccaggcgcggaagcgagagaaggatagaggcacagaggctccgggaggcagcgctgccccccgcgccccgcaccgctgcgggacccgcgccgcgagaggggcggacttcggcgcctcgcgcgtccgccggcgcctgggttggcgctgcggggcggaggcggtgtctgagcgccgctccggctctgctctctctcgagcttcggcacccgcccgagccgctcgcgcgcccgccacctgtctgcccactcggctgtctgtctgccctcccgccgccagctcctgcctcgggcctgccctctccggtctcggtgctccgaggggcgacgagaagcgcgacggggccgtggcgcaccgggcagggcgcgcggggcgcacggcctgggggcgcacggtgcggcgccggcccatgaggctttccagcgcggggagcgacagcgccggccggccatggggggtagcctgcgggtggccgttctaggcgccccgggcgtgggcaagacggccatcatccgccagttcctgttcggtgactaccccgagcgccaccggcccacggacgggccgcgcctctaccgacccgcggtgctgctcgacggcgccgtctacgacttgagcatccgcgacggcgacgtcgctggccccggctcgagccccgggggtccggaggagtggccagacgctaaggactggagcttgcaggacacggacgccttcgtgctcgtctacgacatctgcagcccggacagtttcgactacgtgaaggccctgcggcagcgcatcgcggagaccaggccggcgggcgcgcccgaagcgcccatcctcgtggtaggcaacaagcgggacaggcagcggctgcgcttcggaccgcggcgcgcgctggccgccctagtgcgcaggggctggcgctgcggctacctcgagtgctccgccaagtacaactggcacgtgctgcgtctcttccgcgagctgctgcgctgcgctctggtgcgcgcgcgccctgcacacccggccctgcgcctgcagggggcgctgcatcccgcgcgctgcagcctcatgtgacccgatcggacagtgccatccatgggccccaccttgtgactgggacaatcagggacctggattggacgggatcgcccaacttcactgggactggacagggaagtctccgccctgattggatgaggaaagctccaacccagtctcctaagcgactggcccccttttgaacctcattggacccaaccaggtcccaagctccattggagatgaccagtcctttctgggacctcaatgggtcacaatcccattggatggaaaggacttggctatgaacttgactggaaacacgcagcctgctcctggagcttcactggacatattctttatgccacacctaccacgggataataaaagggaaaataatttga

SEQ ID NO: 3592 - DNA, 1720 bp, Homo sapiens
  source 1..1720: mol_type = genomic DNA
caggcgcggaagcgagagaaggatagaggcacagaggctccgggaggcagcgctgccccccgcgccccgcaccgctgcgggacccgcgccgcgagaggggcggacttcggcgcctcgcgcgtccgccggcgcctgggttggcgctgcggggcggaggcggtgtctgagcgccgctccggctctgctctctctcgagcttcggcacccgcccgagccgctcgcgcgcccgccacctgtctgcccactcggctgtctgtctgccctcccgccgccagctcctgcctcgggcctgccctctccggtctcggtgctccgaggggcgacgagaagcgcgacggggccgtggcgcaccgggcagggcgcgcggggcgcacggcctgggggcgcacggtgcggcgccggcccatgaggctttccagcgcggggagcgacagcgccggccggccatggggggtagcctgcgggtggccgttctaggcgccccgggcgtgggcaagacggccatcatccgccagttcctgttcggtgactaccccgagcgccaccggcccacggacgggccgcgcctctaccgacccgcggtgctgctcgacggcgccgtctacgacttgagcatccgcgacggcgacgtcgctggccccggctcgagccccgggggtccggaggagtggccagacgctaaggactggagcttgcaggacacggacgccttcgtgctcgtctacgacatctgcagcccggacagtttcgactacgtgaaggccctgcggcagcgcatcgcggagaccaggtaggggcccggcagttctggcggtggggagctaggacaggtctggcagggcctttgcctgaggagagtgtgtagggtctcccaacgtcgtgggccgggtcttaggccttcgcccgtgggaaggtcttaagctgtatgtgctctttggcccacatgggcctggggtttcgttggggcggcggggggggcggtgtctctggccgtaggaagggaatgcgcctgcgtgtgtatacccactgggggaattctccggccgtggggtccccgcgtctctcatctccattcggcccccaggccggcgggcgcgcccgaagcgcccatcctcgtggtaggcaacaagcgggacaggcagcggctgcgcttcggaccgcggcgcgcgctggccgccctagtgcgcaggggctggcgctgcggctacctcgagtgctccgccaagtacaactggcacgtgctgcgtctcttccgcgagctgctgcgctgcgctctggtgcgcgcgcgccctgcacacccggccctgcgcctgcagggggcgctgcatcccgcgcgctgcagcctcatgtgacccgatcggacagtgccatccatgggccccaccttgtgactgggacaatcagggacctggattggacgggatcgcccaacttcactgggactggacagggaagtctccgccctgattggatgaggaaagctccaacccagtctcctaagcgactggcccccttttgaacctcattggacccaaccaggtcccaagctccattggagatgaccagtcctttctgggacctcaatgggtcacaatcccattggatggaaaggacttggctatgaacttgactggaaacacgcagcctgctcctggagcttcactggacatattctttatgccacacctaccacgggataataaaagggaaaataatttga

SEQ ID NO: 3593 - DNA, 2323 bp, Homo sapiens
  source 1..2323: mol_type = genomic DNA
tttcctgtttctctgcagttttcctcagctttgggtggtggccgctgccgggcatcggcttccagtccgcggagggcgaggcggcgtggacagcggccccggcacccagcgccccgccgcccgcaagccgcgcgcccgtccgccgcgccccgagcccgccgcttcctatctcagcgccctgccgccgccgccgcggcccagcgagcggccctgatgcaggccatcaagtgtgtggtggtgggagacggagctgtaggtaaaacttgcctactgatcagttacacaaccaatgcatttcctggagaatatatccctactgtctttgacaattattctgccaatgttatggtagatggaaaaccggtgaatctgggcttatgggatacagctggacaagaagattatgacagattacgccccctatcctatccgcaaacagatgtgttcttaatttgcttttcccttgtgagtcctgcatcatttgaaaatgtccgtgcaaagtggtatcctgaggtgcggcaccactgtcccaacactcccatcatcctagtgggaactaaacttgatcttagggatgataaagacacgatcgagaaactgaaggagaagaagctgactcccatcacctatccgcagggtctagccatggctaaggagattggtgctgtaaaatacctggagtgctcggcgctcacacagcgaggcctcaagacagtgtttgacgaagcgatccgagcagtcctctgcccgcctcccgtgaagaagaggaagagaaaatgcctgctgttgtaaatgtctcagcccctcgttcttggtcctgtcccttggaacctttgtacgctttgctcaaaaaaaaacaaaaaaaaaaaacaaaaaaaaaaaacaacggtggagccttcgcactcaatgccaactttttgttacagattaatttttccataaaaccattttttgaaccaatcagtaattttaaggttttgtttgttctaaatgtaagagttcagactcacattctattaaaatttagccctaaaatgacaagccttcttaaagccttatttttcaaaagcgccccccccattcttgttcagattaagagttgccaaaataccttctgaactacactgcattgttgtgccgagaacaccgagcactgaactttgcaaagaccttcgtctttgagaagacggtagcttctgcagttaggaggtgcagacacttgctctcctatgtagttctcagatgcgtaaagcagaacagcctcccgaatgaagcgttgccattgaactcaccagtgagttagcagcacgtgttcccgacataacattgtactgtaatggagtgagcgtagcagctcagctctttggatcagtctttgtgatttcatagcgagttttctgaccagcttttgcggagattttgaacagaactgctatttcctctaatgaagaattctgtttagctgtgggtgtgccgggtggggtgtgtgtgatcaaaggacaaagacagtattttgacaaaatacgaagtggagatttacactacattgtacaaggaatgaaagtgtcacgggtaaaaactctaaaaggttaatttctgtcaaatgcagtagatgatgaaagaaaggttggtattatcaggaaatgttttcttaagcttttcctttctcttacacctgccatgcctccccaaattgggcatttaattcatctttaaactggttgttctgttagtcgctaacttagtaagtgcttttcttatagaaccccttctgactgagcaatatgcctccttgtattataaaatctttctgataatgcattagaaggtttttttgtcgattagtaaaagtgctttccatgttactttattcagagctaataagtgctttccttagttttctagtaactaggtgtaaaaatcatgtgttgcagctttatagtttttaaaatattttagataattcttaaactatgaaccttcttaacatcactgtcttgccagattaccgacactgtcacttgaccaatactgaccctctttacctcgcccacgcggacacacgcctcctgtagtcgctttgcctattgatgttcctttgggtctgtgaggttctgtaaactgtgctagtgctgacgatgttctgtacaacttaactcactggcgagaatacagcgtgggacccttcagccactacaacagaattttttaaattgacagttgcagaattgtggagtgtttttacattgatcttttgctaatgcaattagcattatgttttgcatgtatgacttaataaatccttgaatcatacgactggtaa

SEQ ID NO: 3594 - DNA, 907 bp, Homo sapiens
  source 1..907: mol_type = genomic DNA
agttttcctcagctttgggtggtggccgctgccgggcatcggcttccagtccgcggagggcgaggcggcgtggacagcggccccggcacccagcgccccgccgcccgcaagccgcgcgcccgtccgccgcgccccgagcccgccgcttcctatctcagcgccctgccgccgccgccgcggcccagcgagcggccctgatgcaggccatcaagtgtgtggtggtgggagacggagctgtaggtaaaacttgcctactgatcagttacacaaccaatgcatttcctggagaatatatccctactgtctttgacaattattctgccaatgttatggtagatggaaaaccggtgaatctgggcttatgggatacagctggacaagaagattatgacagattacgccccctatcctatccgcaaacagttggagaaacgtacggtaaggatataacctcccggggcaaagacaagccgattgccgatgtgttcttaatttgcttttcccttgtgagtcctgcatcatttgaaaatgtccgtgcaaagtggtatcctgaggtgcggcaccactgtcccaacactcccatcatcctagtgggaactaaacttgatcttagggatgataaagacacgatcgagaaactgaaggagaagaagctgactcccatcacctatccgcagggtctagccatggctaaggagattggtgctgtaaaatacctggagtgctcggcgctcacacagcgaggcctcaagacagtgtttgacgaagcgatccgagcagtcctctgcccgcctcccgtgaagaagaggaagagaaaatgcctgctgttgtaaatgtctcagcccctcgttcttggtcctgtcccttggaacctttgtacgctttgctcaaaaaaaaacaaaaaaaa

SEQ ID NO: 3595 - DNA, 1482 bp, Homo sapiens
  source 1..1482: mol_type = genomic DNA
cctcctgccccaccaccgctgctcctcagcaggcgcctcaccagcctccacaccccttgcgcccgcagaaacgcgcctggccctgagctgtcaccaccgacactctccaggctccggacacgatgcaggccatcaagtgtgtggtggtgggagatggggccgtgggcaagacctgccttctcatcagctacaccaccaacgcctttcccggagagtacatccccaccgtgtttgacaactattcagccaatgtgatggtggacagcaagccagtgaacctggggctgtgggacactgctgggcaggaggactacgaccgtctccggccgctctcctatccacagacggacgtcttcctcatctgcttctccctcgtcagcccagcctcttatgagaacgtccgcgccaagtggttcccagaagtgcggcaccactgccccagcacacccatcatcctggtgggcaccaagctggacctgcgggacgacaaggacaccatcgagaaactgaaggagaagaagctggctcccatcacctacccgcagggcctggcactggccaaggagattgactcggtgaaatacctggagtgctcagctctcacccagagaggcctgaaaaccgtgttcgacgaggccatccgggccgtgctgtgccctcagcccacgcggcagcagaagcgcgcctgcagcctcctctaggggttgcaccccagcgctcccacctagatgggtctgatcctccaggatccccacccaaagcctgatggcaccccggctggccatgctgtcccctccctgtggcgtttcttagcagatggctgcagagcttcgttgatggtcttttctgtactggaggcctcctgaggccaggaacgtgcaaatttgcaggtgctgcatcccaagcccctcatgctcctgccttcctgagggccagaggggagccccaggacccattaagccacccccgtgttcctgccgtcagtgccaactgccgcatgtggaagcatctacccgttcactccagtcccaccccacgcctgactcccctctggaaactgcaggccagatggttgctgccacaacttgtgtaccttcagggatggggctcttactccctcctgaggccagctgctctaatatcgatggtcctgcttgccagagagttcctctacccagcaaaaatgagtgtctcagaagtgtgctcctctggcctcagttctcctcttttggaacaacataaaacaaatttaattttctacgcctctggggatatctgctcagccaatggaaaatctgggttcaaccagcccctgccatttcttaagactttctgctgcactcacaggatcctgagctgcacttacctgtgagagtcttcaaacttttaaaccttgccagtcaggacttttgctattgcaaatagaaaacccaactcaacctgcttaagcagaaaataaatttattgattcaagtttggaga

SEQ ID NO: 3596 - DNA, 569 bp, Homo sapiens
  source 1..569: mol_type = genomic DNA
tcctcagcaggcgcctcaccagcctccacaccccttgcgcccgcagaaacgcgcctggccctgagctgtcaccaccgacactctccaggctccggacacgatgcaggccatcaagtgtgtggtggtgggagatggggccgtgggcaagacctgccttctcatcagctacaccaccaacgcctttcccggagagtacatccccaccgtgcctgggaggccctgcgctctattgcaggatgcggaggcagggctgtcatcggacgtggagggagcgtgttggtgtcagactcaggagggaaggatgactggggaggcaccagcccctccctggccagccctcaggggtccccatcactcctaggacatttccccgactccctagcatggcactcaaggctcctgatggccttcactcaacctcccacctggccttattacccattactttgcttcacactctgcctcctccggaccctactgttcgccacaagctccctgcacatttctaccccagggcctttgctcaagctgttctctctccccatagtgctttttctccccacatccac

SEQ ID NO: 3597 - DNA, 842 bp, Homo sapiens
  source 1..842: mol_type = genomic DNA
caggtctcctgctggagcctccacgcagggggcctgtggggatggccagggctcagcccagcacctgagcgcccctcccaccagctgctctgccagaccgcatgctccgccccctgcaaacgaccgtggggagagcagcttgagtaagttccccttccgtttcctcctgccccaccaccgctgctcctcagcaggcgcctcaccagcctccacaccccttgcgcccgcagaaacgcgcctggccctgagctgtcaccaccgacactctccaggctccggacacgatgcaggccatcaaggccgtgggcaagacctgccttctcatcagctacaccaccaacgcctttcccggagagtacatccccaccgtgtttgacaactattcagccaatgtgatggtggacagcaagccagtgaacctggggctgtgggacactgctgggcaggaggactacgaccgtctccggccgctctcctatccacagacggacgtcttcctcatctgcttctccctcgtcagcccagcctcttatgagaacgtccgcgccaagtggttcccagaagtgcggcaccactgccccagcacacccatcatcctggtgggcaccaagctggacctgcgggacgacaaggacaccatcgagaaactgaaggagaagaagctggctcccatcacctacccgcagggcctggcactggccaaggagattgactcggtgaaatacctggagtgctcagctctcacccagagaggcctgaaaaccgtgttcgacgaggccatccgggccgtgctgtgccctcagcccacgcggcagcagaagcgcgcctgcagcctcctctag

SEQ ID NO: 3598 - DNA, 893 bp, Homo sapiens
  source 1..893: mol_type = genomic DNA
cagcacagagggcccccaggtctcctgctggagcctccacgcagggggcctgtggggatggccagggctcagcccagcacctgagcgcccctcccaccagctgctctgccagaccgcatgctccgccccctgcaaacgaccgtggggagagcagcttgaggccgtgggcaagacctgccttctcatcagctacaccaccaacgcctttcccggagagtacatccccaccgtgtttgacaactattcagccaatgtgatggtggacagcaagccagtgaacctggggctgtgggacactgctgggcaggaggactacgaccgtctccggccgctctcctatccacagacggacgtcttcctcatctgcttctccctcgtcagcccagcctcttatgagaacgtccgcgccaagtggttcccagaagtgcggcaccactgccccagcacacccatcatcctggtgggcaccaagctggacctgcgggacgacaaggacaccatcgagaaactgaaggagaagaagctggctcccatcacctacccgcagggcctggcactggccaaggagattgactcggtgaaatacctggagtgctcagctctcacccagagaggcctgaaaaccgtgttcgacgaggccatccgggccgtgctgtgccctcagcccacgcggcagcagaagcgcgcctgcagcctcctctaggggttgcaccccagcgctcccacctagatgggtctgatcctccaggatccccacccaaagcctgatggcaccccggctggccatgctgtcccctccctgtggcgtttcttagcagatggctgcagagcttcgttgatggtcttttctgtactggaggcctcctgaggccaggaacgtgcaaatttgcagg

SEQ ID NO: 3599 - DNA, 705 bp, Homo sapiens
  source 1..705: mol_type = genomic DNA
gagggcccccaggtctcctgctggagcctccacgcagggggcctgtggggatggccagggctcagcccagcacctgagcgcccctcccaccagctgctctgccagaccgcatgctccgccccctgcaaacgaccgtggggagagcagcttgaaaacgcgcctggccctgagctgtcaccaccgacactctccaggctccggacacgatgcaggccatcaagtgtgtggtggtgggagatggggccgtgggcaagacctgccttctcatcagctacaccaccaacgcctttcccggagagtacatccccaccgtgtttgacaactattcagccaatgtgatggtggacagcaagccagtgaacctggggctgtgggacactgctgggcaggaggactacgaccgtctccggccgctctcctatccacagacggacgtcttcctcatctgcttctccctcgtcagcccagcctcttatgagaacgtccgcgccaagtggttcccagaagtgcggcaccactgccccagcacacccatcatcctggtgggcaccaagctggacctgcgggacgacaaggacaccatcgagaaactgaaggagaagaagctggctcccatcacctacccgcagggcctggcactggccaaggagattgactcggtgaaatacctggagtgctcagctctcacccagagaggcctgaaaa

SEQ ID NO: 3600 - DNA, 6635 bp, Homo sapiens
  source 1..6635: mol_type = genomic DNA
gtcgacaataacaaaccaagccgcggcggtgtccgcggccctgccgagccctcggcgttgcctcagaatcccccagtcgcctgggcccctcggctctgacaggccgcggccttctgtcccccggccccagacccagagccgaggggcctgctcgcgtccttgtccgcccggacccctccctgcctcctagagttcggggccgcggcgggcgggcgcccgggacgccggcggttgtgtcggcttagcggtgccgaatgggcggttggtaaccgctgccgaggactaggcggcggcggaagatggtgccgggggtcgctggctctgctgctgccgccggcgaaggaggaggcgttgccggttttctgagtttaaccagtaatgccattcagttgccaatctcaagcaaagcaaacataagccagttttaatctactttttaagaaaagtggtagtccttttcacagtgcctgacgtaactgtatcagagggtgaggtataagctcacagaattcagataaatcatcatgaagttatatgtatttctggttaacactggaactactctaacatttgacactgaacttacagtgcaaactgtggcagaccttaagcatgccattcaaagcaaatacaagattgctattcaacaccaggtgctggtggtcaatggaggagaatgcatggctgcagatcgaagagtgtgtacctacagtgctgggacggatacaaatccaatttttctttttaacaaagaaatgatcttatgtgatcgtccacctgctattcctaaaactaccttttcgacagaaaatgacatggaaataaaagttgaagaatctcttatgatgcctgcagtttttcatactgttgcttcaaggacacagcttgcattggaaatgtatgaagttgccaagaaactttgttctttttgtgaaggtcttgtacatgatgaacatcttcaacaccaaggctgggctgcaatcatggccaacctggaggactgttcaaattcataccaaaagctacttttcaagtttgaaagtatttattcaaattatctgcagtccatagaagacatcaagttaaaacttactcatttaggaactgcagtttcagtaatggccaagattccactgttggagtgcctaaccagacatagttacagagaatgtttgggaagactggattctttacctgaacatgaagactcagaaaaagctgagatgaaaagatccactgaactggtgctctctcctgatatgcctagaacaactaacgaatctttgttaacctcatttcccaagtcagtggaacatgtgtccccagataccgcagatgctgaaagtggcaaagaaattagggaatcttgtcaaagtactgttcatcagcaagatgaaactacgattgacactaaagatggtgatctgcccttttttaatgtctctttgttagactggataaatgttcaagatagacctaatgatgtggaatctttggtcaggaagtgctttgattctatgagcaggcttgatccaaggattattcgaccatttatagcagaatgccgtcaaactattgccaaacttgataatcagaatatgaaagccattaaaggacttgaagatcggctctacgccctggaccagatgattgctagctgtggccgactggtgaatgaacagaaagagcttgctcagggatttttagctaatcagaagagagctgaaaacttaaaggatgcatctgtattacctgatttatgcctgagtcacgcaaatcagttgatgattatgttgcaaaatcatagaaaactgttagatattaagcagaagtgtaccactgccaaacaagaactagcaaataacctacatgtcagactgaagtggtgttgctttgtaatgcttcatgctgatcaagatggagagaagttacaagctttgctccgcctcgtaatagagctgttagaaagagtcaaaattgttgaagctcttagtacagttcctcagatgtactgcttagctgttgttgaggttgtaagaagaaaaatgttcataaaacactacagggagtgggctggtgctttagtcaaagatggaaagagattatatgaagcagaaaaatcaaaaagggaatcctttgggaaattatttaggaagtcttttttaagaaatcgtctgtttaggggactggactcctggcccccttccttttgtactcaaaagcctcgaaagtttgactgtgaacttccagatatttcattaaaagatttacagtttctgcaatcattttgtccttcggaagttcagccattcctcagggttcccttactttgtgactttgaacctctacaccagcatgtacttgctctacataatttggtaaaagcagcacaaagtttggatgaaatgtcacagaccattacagatctactgagtgaacaaaaggcatctgtgagtcagacatccccacagtctgcttcttcaccaaggatggaaagtacagcaggaattacaactactacctcaccgagaactcctccaccactgactgttcaggatcccttatgtcctgcagtttgtcccttagaagaattatctccagatagtattgatgcacatacgtttgattttgaaactattccccatccaaacatagaacagactattcaccaagtttctttagacttggattcattagcagaaagtcctgaatcagattttatgtctgctgtgaatgagtttgtaatagaagaaaatttgtcgtctcctaatcctataagtgatccacaaagcccagaaatgatggtggaatcactttattcatcagttatcaatgcgatagacagtagacgaatgcaggatacaaatgtatgtggtaaggaggattttggagatcatacttctctgaatgtccagttggaaagatgtagagttgttgcccaagactctcacttcagtatacaaaccattaaggaagacctttgccactttagaacatttgtacaaaaagaacagtgtgacttctcaaattcattaaaatgtacagcagtagaaataagaaacattattgaaaaagtaaaatgttctctggaaataacactaaaagaaaaacatcaaaaagaactactgtctttaaaaaatgaatatgaaggtaaacttgacggactaataaaggaaactgaagagaatgaaaacaaaattaaaaaattgaagggagagttagtatgccttgaggaggttttacaaaataaagataatgaatttgctttggttaaacatgaaaaagaagctgtaatctgcctgcagaatgaaaaggatcagaagttgttagagatggaaaatataatgcactctcaaaattgtgaaattaaagaactgaagcagtcacgagaaatagtgttagaagacttaaaaaagctccatgttgaaaatgatgagaagttacagttattgagggcagaacttcagtccttggagcaaagtcatctaaaggaattagaggacacacttcaggttaggcacatacaagagtttgagaaggttatgacagaccacagagtttctttggaggaattaaaaaaggaaaaccaacaaataattaatcaaatacaagaatctcatgctgaaattatccaggaaaaagaaaaacagttacaggaattaaaactcaaggtttctgatttgtcagacacgagatgcaagttagaggttgaacttgcgttgaaggaagcagaaactgatgaaataaaaattttgctggaagaaagcagagcccagcagaaggagaccttgaaatctcttcttgaacaagagacagaaaatttgagaacagaaattagtaaactcaaccaaaagattcaggataataatgaaaattatcaggtgggcttagcagagctaagaactttaatgacaattgaaaaagatcagtgtatttccgagttaattagtagacatgaagaagaatctaatatacttaaagctgaattaaacaaagtaacatctttgcataaccaagcatttgaaatagaaaaaaacctaaaagaacaaataattgaactgcagagtaaattggattcagaattgagtgctcttgaaagacaaaaagatgaaaaaattacccaacaagaagagaaatacgaagctattatccagaaccttgagaaagacagacaaaaattggtcagcagccaggagcaagacagagaacagttaattcagaagcttaattgtgaaaaagatgaagctattcagactgccctaaaagaatttaaattggagagagaagttgttgagaaagagttattagaaaaagttaaacatcttgagaatcaaatagcaaaaagtcctgccattgactctaccagaggagattcttcaagcttagttgctgaacttcaagaaaagcttcaggaagaaaaagctaagtttctagaacaacttgaagagcaagaaaaaagaaagaatgaagaaatgcaaaatgttcgaacatctttgattgcggaacaacagaccaattttaacactgttttaacaagagagaaaatgagaaaagaaaacataataaatgatcttagtgataagttgaaaagtacaatgcagcaacaagaacgggataaagatttgatagagtcactttctgaagatcgagctcgtttgcttgaggaaaagaaaaagcttgaagaagaagtcagtaagttgcgtagtagcagttttgttccttcaccatatgtagctacagccccagaactttatggagcttgtgcacctgaactcccaggtgaatcagatagatccgctgtggaaacagcagatgaaggaagagtggattcagcaatggagacaagcatgatgtctgtacaagaaaatattcatatgttgtctgaagaaaaacagcggataatgctgttagaacgaacattgcaattgaaagaagaagaaaataaacggttaaatcaaagactgatgtctcagagcatgtcttcagtatcttcaaggcattctgaaaagatagctattagagattttcaggtgggagatttggtactcatcatcctagacgaacgccatgacaattatgtgttatttactgttagtcctactttatattttctacattcagagtctctacctgccctggatctcaaaccaggtgagggtgcttcaggtgcatctagaagaccctgggtacttggaaaagtaatggaaaaagaatactgtcaagccaaaaaggcacaaaacagatttaaagttcctttggggacaaagttttacagagtgaaagccgtatcatggaataagaaagtataacttatggacaaaattaatacattctatgacatttttttctgatttgtcctgcagtgctcattcatcactccaaaaacagcaggccatctttttatgcaaaagtcagcgtgacaatatacttcactggtgtacatcgtttactttttaactggcttcattttaggaataataaattcatcagaatccttggctgaattaaaatggtttttgttttttggtttttttttttacccagacaactctagaaatgcggaccaaactacttcattttctcaaagggcataccttgtgcattgtggcttatgatgagccatattaattgcctgttaaatatacactagcttgaacttagatgttaaatgttattattaccagcatttgtccttttgtgaaatcagtatcagaatacttgcactctttaacacattctttataaaatgtataaattattcagaactatttaaaataaagaggagtgttattgcatgctgataatcattttgagtttgcctcagtagatactaaagcaaattgtttcagtttttttaaatgccctttgatgtttcaaaaaaaaaaaggaactgtaatttgattgactgattttaagatcagccataagtaatcagcaatcttcaaaagcactttcagtggattggtcatctgggttctaaagggaagagtctgtgctactaaccatttcaaatgcagactcaaaccttcccaacatctttatgactctagaataatcatattgatgaaatcgtaattcatggttgagtttcagaacaaaagatattcattgcacattaaccatttagaggtcatttaaataacaaaatattgtattgtaaaagaactgtacaattttaaaacaataaagatttgaacctgtaaatgtgtgtgccttttaaagaaggatacatttttaatatatttgagtgattgctgggaagtgtgaaaatattgttatgtatcatatcaaagagaaacatgtttattacaaaaatgttctttaactatatactatgtaacagggtaaacagtgttatgtagaatagaattgtgtaaactagatctttagagaagttgccattgagcaaagttatttaaatgagttagttgagttggatgagaattgtttgaggtttgttgctagagaacaataataaaataattctttttcagaaaatatttaatttcttcataaaaataagttaaatatttttttaaatatgtatatctaatagtacaaaatggaataaacatcatagtgtatagaaaactgaatttgacaagttaatgaataaatgaacaaatgatttcaca

SEQ ID NO: 3601 - DNA, 6614 bp, Homo sapiens
  source 1..6614: mol_type = genomic DNA
aacaaaccaagccgcggcggtgtccgcggccctgccgagccctcggcgttgcctcagaatcccccagtcgcctgggcccctcggctctgacaggccgcggccttctgtcccccggccccagacccagagccgaggggcctgctcgcgtccttgtccgcccggacccctccctgcctcctagagttcggggccgcggcgggcgggcgcccgggacgccggcggttgtgtcggcttagcggtgccgaatgggcggttggtaaccgctgccgaggactaggcggcggcggaagatggtgccgggggtcgctggctctgctgctgccgccggcgaaggaggaggcgttgccggttttctgagtttaaccagtaatgccattcagttgccaatctcaagcaaagcaaacataagccagttttaatctactttttaagaaaagtggtagtccttttcacagtgcctgacgtaactgtatcagagggtgaggtataagctcacagaattcagataaatcatcatgaagttatatgtatttctggttaacactggaactactctaacatttgacactgaacttacagtgcaaactgtggcagaccttaagcatgccattcaaagcaaatacaagattgctattcaacaccaggtgctggtggtcaatggaggagaatgcatggctgcagatcgaagagtgtgtacctacagtgctgggacggatacaaatccaatttttctttttaacaaagaaatgatcttatgtgatcgtccacctgctattcctaaaactaccttttcgacagaaaatgacatggaaataaaagttgaagaatctcttatgatgcctgcagtttttcatactgttgcttcaaggacacagcttgcattggaaatgtatgaagttgccaagaaactttgttctttttgtgaaggtcttgtacatgatgaacatcttcaacaccaaggctgggctgcaatcatggccaacctggaggactgttcaaattcataccaaaagctacttttcaagtttgaaagtatttattcaaattatctgcagtccatagaagacatcaagttaaaacttactcatttaggaactgcagtttcagtaatggccaagattccactgttggagtgcctaaccagacatagttacagagaatgtttgggaagactggattctttacctgaacatgaagactcagaaaaagctgagatgaaaagatccactgaactggtgctctctcctgatatgcctagaacaactaacgaatctttgttaacctcatttcccaagtcagtggaacatgtgtccccagataccgcagatgctgaaagtggcaaagaaattagggaatcttgtcaaagtactgttcatcagcaagatgaaactacgattgacactaaagatggtgatctgcccttttttaatgtctctttgttagactggataaatgttcaagatagacctaatgatgtggaatctttggtcaggaagtgctttgattctatgagcaggcttgatccaaggattattcgaccatttatagcagaatgccgtcaaactattgccaaacttgataatcagaatatgaaagccattaaaggacttgaagatcggctctacgccctggaccagatgattgctagctgtggccgactggtgaatgaacagaaagagcttgctcagggatttttagctaatcagaagagagctgaaaacttaaaggatgcatctgtattacctgatttatgcctgagtcacgcaaatcagttgatgattatgttgcaaaatcatagaaaactgttagatattaagcagaagtgtaccactgccaaacaagaactagcaaataacctacatgtcagactgaagtggtgttgctttgtaatgcttcatgctgatcaagatggagagaagttacaagctttgctccgcctcgtaatagagctgttagaaagagtcaaaattgttgaagctcttagtacagttcctcagatgtactgcttagctgttgttgaggttgtaagaagaaaaatgttcataaaacactacagggagtgggctggtgctttagtcaaagatggaaagagattatatgaagcagaaaaatcaaaaagggaatcctttgggaaattatttaggaagtcttttttaagaaatcgtctgtttaggggactggactcctggcccccttccttttgtactcaaaagcctcgaaagtttgactgtgaacttccagatatttcattaaaagatttacagtttctgcaatcattttgtccttcggaagttcagccattcctcagggttcccttactttgtgactttgaacctctacaccagcatgtacttgctctacataatttggtaaaagcagcacaaagtttggatgaaatgtcacagaccattacagatctactgagtgaacaaaaggcatctgtgagtcagacatccccacagtctgcttcttcaccaaggatggaaagtacagcaggaattacaactactacctcaccgagaactcctccaccactgactgttcaggatcccttatgtcctgcagtttgtcccttagaagaattatctccagatagtattgatgcacatacgtttgattttgaaactattccccatccaaacatagaacagactattcaccaagtttctttagacttggattcattagcagaaagtcctgaatcagattttatgtctgctgtgaatgagtttgtaatagaagaaaatttgtcgtctcctaatcctataagtgatccacaaagcccagaaatgatggtggaatcactttattcatcagttatcaatgcgatagacagtagacgaatgcaggatacaaatgtatgtggtaaggaggattttggagatcatacttctctgaatgtccagttggaaagatgtagagttgttgcccaagactctcacttcagtatacaaaccattaaggaagacctttgccactttagaacatttgtacaaaaagaacagtgtgacttctcaaattcattaaaatgtacagcagtagaaataagaaacattattgaaaaagtaaaatgttctctggaaataacactaaaagaaaaacatcaaaaagaactactgtctttaaaaaatgaatatgaaggtaaacttgacggactaataaaggaaactgaagagaatgaaaacaaaattaaaaaattgaagggagagttagtatgccttgaggaggttttacaaaataaagataatgaatttgctttggttaaacatgaaaaagaagctgtaatctgcctgcagaatgaaaaggatcagaagttgttagagatggaaaatataatgcactctcaaaattgtgaaattaaagaactgaagcagtcacgagaaatagtgttagaagacttaaaaaagctccatgttgaaaatgatgagaagttacagttattgagggcagaacttcagtccttggagcaaagtcatctaaaggaattagaggacacacttcaggttaggcacatacaagagtttgagaaggttatgacagaccacagagtttctttggaggaattaaaaaaggaaaaccaacaaataattaatcaaatacaagaatctcatgctgaaattatccaggaaaaagaaaaacagttacaggaattaaaactcaaggtttctgatttgtcagacacgagatgcaagttagaggttgaacttgcgttgaaggaagcagaaactgatgaaataaaaattttgctggaagaaagcagagcccagcagaaggagaccttgaaatctcttcttgaacaagagacagaaaatttgagaacagaaattagtaaactcaaccaaaagattcaggataataatgaaaattatcaggtgggcttagcagagctaagaactttaatgacaattgaaaaagatcagtgtatttccgagttaattagtagacatgaagaagaatctaatatacttaaagctgaattaaacaaagtaacatctttgcataaccaagcatttgaaatagaaaaaaacctaaaagaacaaataattgaactgcagagtaaattggattcagaattgagtgctcttgaaagacaaaaagatgaaaaaattacccaacaagaagagaaatacgaagctattatccagaaccttgagaaagacagacaaaaattggtcagcagccaggagcaagacagagaacagttaattcagaagcttaattgtgaaaaagatgaagctattcagactgccctaaaagaatttaaattggagagagaagttgttgagaaagagttattagaaaaagttaaacatcttgagaatcaaatagcaaaaagtcctgccattgactctaccagaggagattcttcaagcttagttgctgaacttcaagaaaagcttcaggaagaaaaagctaagtttctagaacaacttgaagagcaagaaaaaagaaagaatgaagaaatgcaaaatgttcgaacatctttgattgcggaacaacagaccaattttaacactgttttaacaagagagaaaatgagaaaagaaaacataataaatgatcttagtgataagttgaaaagtacaatgcagcaacaagaacgggataaagatttgatagagtcactttctgaagatcgagctcgtttgcttgaggaaaagaaaaagcttgaagaagaagtcagtaagttgcgtagtagcagttttgttccttcaccatatgtagctacagccccagaactttatggagcttgtgcacctgaactcccaggtgaatcagatagatccgctgtggaaacagcagatgaaggaagagtggattcagcaatggagacaagcatgatgtctgtacaagaaaatattcatatgttgtctgaagaaaaacagcggataatgctgttagaacgaacattgcaattgaaagaagaagaaaataaacggttaaatcaaagactgatgtctcagagcatgtcttcagtatcttcaaggcattctgaaaagatagctattagagattttcaggtgggagatttggtactcatcatcctagacgaacgccatgacaattatgtgttatttactgttagtcctactttatattttctacattcagagtctctacctgccctggatctcaaaccagcttcaggtgcatctagaagaccctgggtacttggaaaagtaatggaaaaagaatactgtcaagccaaaaaggcacaaaacagatttaaagttcctttggggacaaagttttacagagtgaaagccgtatcatggaataagaaagtataacttatggacaaaattaatacattctatgacatttttttctgatttgtcctgcagtgctcattcatcactccaaaaacagcaggccatctttttatgcaaaagtcagcgtgacaatatacttcactggtgtacatcgtttactttttaactggcttcattttaggaataataaattcatcagaatccttggctgaattaaaatggtttttgttttttggtttttttttttacccagacaactctagaaatgcggaccaaactacttcattttctcaaagggcataccttgtgcattgtggcttatgatgagccatattaattgcctgttaaatatacactagcttgaacttagatgttaaatgttattattaccagcatttgtccttttgtgaaatcagtatcagaatacttgcactctttaacacattctttataaaatgtataaattattcagaactatttaaaataaagaggagtgttattgcatgctgataatcattttgagtttgcctcagtagatactaaagcaaattgtttcagtttttttaaatgccctttgatgtttcaaaaaaaaaaaggaactgtaatttgattgactgattttaagatcagccataagtaatcagcaatcttcaaaagcactttcagtggattggtcatctgggttctaaagggaagagtctgtgctactaaccatttcaaatgcagactcaaaccttcccaacatctttatgactctagaataatcatattgatgaaatcgtaattcatggttgagtttcagaacaaaagatattcattgcacattaaccatttagaggtcatttaaataacaaaatattgtattgtaaaagaactgtacaattttaaaacaataaagatttgaacctgtaaatgtgtgtgccttttaaagaaggatacatttttaatatatttgagtgattgctgggaagtgtgaaaatattgttatgtatcatatcaaagagaaacatgtttattacaaaaatgttctttaactatatactatgtaacagggtaaacagtgttatgtagaatagaattgtgtaaactagatctttagagaagttgccattgagcaaagttatttaaatgagttagttgagttggatgagaattgtttgaggtttgttgctagagaacaataataaaataattctttttcagaaaatatttaatttcttcataaaaataagttaaatatttttttaaatatgtatatctaatagtacaaaatggaataaacatcatagtgtatagaaaactgaatttgacaagttaatgaataaatgaacaaatgatttc

SEQ ID NO: 3602 - DNA, 551 bp, Homo sapiens
  source 1..551: mol_type = genomic DNA
gtttcccggcatgcgccgcggaggaagagacggagtcgacaataacaaaccaagccgcggcggtgtccgcggccctgccgagccctcggcgttgcctcagaatcccccagtcgcctgggcccctcggctctgacaggccgcggccttctgtcccccggccccagacccagagccgaggggcctgctcgcgtccttgtccgcccggacccctccctgcctcctagagttcggggccgcggcgggcgggcgcccgggacgccggcggttgtgtcggcttagcggtgccgaatgggcggttggtaaccgctgccgaggactaggcggcggcggaagatggtgccgggggtcgctggctctgctgctgccgccggcgaaggaggaggcgttgccggtgtggcagaccttaagcatgccattcaaagcaaatacaagattgctattcaacaccaggtgctggtggtcaatggaggagaatgcatggctgcagatcgaagagtgtgtacctacagtgctgggacggatacaaatccaatttttctttttaacaaaga

SEQ ID NO: 3603 - DNA, 507 bp, Homo sapiens
  source 1..507: mol_type = genomic DNA
agagagggagcttcgccatgtttctcaggctgatctcgaatttctgacctcaagtaatccgcccgcctcggcctcagaagtgctgagattaggggcttgagccaccgcacccgaccttcttttaaatttaaattagatggccagaggtggggcaaatgcataaataccctaaaaaggatttaaggaagagagttctgaggtgtttattctgaacttagaactaacgtttctacagcatttgctttcgtccgcctctacctccaccacggaaggataagaactagactttgacaagttttctgagtttaaccagtaatgccattcagttgccaatctcaagcaaagcaaacataagccagttttaatctactttttaagaaaagtggtagtccttttcacagtgcctgacgtaactgtatcagagggtgaggtataagctcacagaattcagataaatcatcatgaagttatatgtatttctggttaacactggaactactctaacat

SEQ ID NO: 3604 - DNA, 711 bp, Homo sapiens
  source 1..711: mol_type = genomic DNA
caataacaaaccaagccgcggcggtgtccgcggccctgccgagccctcggcgttgcctcagaatcccccagtcgcctgggcccctcggctctgacaggccgcggccttctgtcccccggccccagacccagagccgaggggcctgctcgcgtccttgtccgcccggacccctccctgcctcctagagttcggggccgcggcgggcgggcgcccgggacgccggcggttgtgtcggcttagcggtgccgaatgggcggttggtaaccgctgccgaggactaggcggcggcggaagatggtgccgggggtcgctggctctgctgctgccgccggcgaaggaggaggcgttgccggttttctgagtttaaccagtaatgccattcagttgccaatctcaagcaaagcaaacataagccagttttaatctactttttaagaaaagtggtagtccttttcacagtgcctgacgtgtggcagaccttaagcatgccattcaaagcaaatacaagattgctattcaacaccaggtgctggtggtcaatggaggagaatgcatggctgcagatcgaagagtgtgtacctacagtgctgggacggatacaaatccaatttttctttttaacaaagaaatgatcttatgtgatcgtccacctgctattcctaaaactaccttttcgacagaaaatgacatggaaataaaagttgaagaatc

SEQ ID NO: 3605 - DNA, 470 bp, Homo sapiens
  source 1..470: mol_type = genomic DNA
ggataatgctgttagaacgaacattgcaattgaaagaagaagaaaataaacggttaaatcaaagactgatgtctcagagcatgtcttcagtatcttcaaggcattctgaaaagatagctattagagattttcaggtgggagatttggtactcatcatcctagacgaacgccatgacaattatgtgttatttactgttagtcctactttatattttctacattcagagtctctacctgccctggatctcaaaccagcttcaggtgcatctagaagaccctgggtacttggaaaagtaatggaaaaagaatactgtcaagccaaaaagtgctcattcatcactccaaaaacagcaggccatctttttatgcaaaagtcagcgtgacaatatacttcactggtgtacatcgtttactttttaactggcttcattttaggaataataaattcatcagaatccttggctgaatta

SEQ ID NO: 3606 - DNA, 4776 bp, Homo sapiens
  source 1..4776: mol_type = genomic DNA
atgaagttatatgtatttctggttaacactggaactactctaacatttgacactgaacttacagtgcaaactgtggcagaccttaagcatgccattcaaagcaaatacaagattgctattcaacaccaggtgctggtggtcaatggaggagaatgcatggctgcagatcgaagagtgtgtacctacagtgctgggacggatacaaatccaatttttctttttaacaaagaaatgatcttatgtgatcgtccacctgctattcctaaaactaccttttcgacagaaaatgacatggaaataaaagttgaagaatctcttatgatgcctgcagtttttcatactgttgcttcaaggacacagcttgcattggaaatgtatgaagttgccaagaaactttgttctttttgtgaaggtcttgtacatgatgaacatcttcaacaccaaggctgggctgcaatcatggccaacctggaggactgttcaaattcataccaaaagctacttttcaagtttgaaagtatttattcaaattatctgcagtccatagaagacatcaagttaaaacttactcatttaggaactgcagtttcagtaatggccaagattccactgttggagtgcctaaccagacatagttacagagaatgtttgggaagactggattctttacctgaacatgaagactcagaaaaagctgagatgaaaagatccactgaactggtgctctctcctgatatgcctagaacaactaacgaatctttgttaacctcatttcccaagtcagtggaacatgtgtccccagataccgcagatgctgaaagtggcaaagaaattagggaatcttgtcaaagtactgttcatcagcaagatgaaactacgattgacactaaagatggtgatctgcccttttttaatgtctctttgttagactggataaatgttcaagatagacctaatgatgtggaatctttggtcaggaagtgctttgattctatgagcaggcttgatccaaggattattcgaccatttatagcagaatgccgtcaaactattgccaaacttgataatcagaatatgaaagccattaaaggacttgaagatcggctctacgccctggaccagatgattgctagctgtggccgactggtgaatgaacagaaagagcttgctcagggatttttagctaatcagaagagagctgaaaacttaaaggatgcatctgtattacctgatttatgcctgagtcacgcaaatcagttgatgattatgttgcaaaatcatagaaaactgttagatattaagcagaagtgtaccactgccaaacaagaactagcaaataacctacatgtcagactgaagtggtgttgctttgtaatgcttcatgctgatcaagatggagagaagttacaagctttgctccgcctcgtaatagagctgttagaaagagtcaaaattgttgaagctcttagtacagttcctcagatgtactgcttagctgttgttgaggttgtaagaagaaaaatgttcataaaacactacagggagtgggctggtgctttagtcaaagatggaaagagattatatgaagcagaaaaatcaaaaagggaatcctttgggaaattatttaggaagtcttttttaagaaatcgtctgtttaggggactggactcctggcccccttccttttgtactcaaaagcctcgaaagtttgactgtgaacttccagatatttcattaaaagatttacagtttctgcaatcattttgtccttcggaagttcagccattcctcagggttcccttactttgtgactttgaacctctacaccagcatgtacttgctctacataatttggtaaaagcagcacaaagtttggatgaaatgtcacagaccattacagatctactgagtgaacaaaaggcatctgtgagtcagacatccccacagtctgcttcttcaccaaggatggaaagtacagcaggaattacaactactacctcaccgagaactcctccaccactgactgttcaggatcccttatgtcctgcagtttgtcccttagaagaattatctccagatagtattgatgcacatacgtttgattttgaaactattccccatccaaacatagaacagactattcaccaagtttctttagacttggattcattagcagaaagtcctgaatcagattttatgtctgctgtgaatgagtttgtaatagaagaaaatttgtcgtctcctaatcctataagtgatccacaaagcccagaaatgatggtggaatcactttattcatcagttatcaatgcgatagacagtagacgaatgcaggatacaaatgtatgtggtaaggaggattttggagatcatacttctctgaatgtccagttggaaagatgtagagttgttgcccaagactctcacttcagtatacaaaccattaaggaagacctttgccactttagaacatttgtacaaaaagaacagtgtgacttctcaaattcattaaaatgtacagcagtagaaataagaaacattattgaaaaagtaaaatgttctctggaaataacactaaaagaaaaacatcaaaaagaactactgtctttaaaaaatgaatatgaaggtaaacttgacggactaataaaggaaactgaagagaatgaaaacaaaattaaaaaattgaagggagagttagtatgccttgaggaggttttacaaaataaagataatgaatttgctttggttaaacatgaaaaagaagctgtaatctgcctgcagaatgaaaaggatcagaagttgttagagatggaaaatataatgcactctcaaaattgtgaaattaaagaactgaagcagtcacgagaaatagtgttagaagacttaaaaaagctccatgttgaaaatgatgagaagttacagttattgagggcagaacttcagtccttggagcaaagtcatctaaaggaattagaggacacacttcaggttaggcacatacaagagtttgagaaggttatgacagaccacagagtttctttggaggaattaaaaaaggaaaaccaacaaataattaatcaaatacaagaatctcatgctgaaattatccaggaaaaagaaaaacagttacaggaattaaaactcaaggtttctgatttgtcagacacgagatgcaagttagaggttgaacttgcgttgaaggaagcagaaactgatgaaataaaaattttgctggaagaaagcagagcccagcagaaggagaccttgaaatctcttcttgaacaagagacagaaaatttgagaacagaaattagtaaactcaaccaaaagattcaggataataatgaaaattatcaggtgggcttagcagagctaagaactttaatgacaattgaaaaagatcagtgtatttccgagttaattagtagacatgaagaagaatctaatatacttaaagctgaattaaacaaagtaacatctttgcataaccaagcatttgaaatagaaaaaaacctaaaagaacaaataattgaactgcagagtaaattggattcagaattgagtgctcttgaaagacaaaaagatgaaaaaattacccaacaagaagagaaatacgaagctattatccagaaccttgagaaagacagacaaaaattggtcagcagccaggagcaagacagagaacagttaattcagaagcttaattgtgaaaaagatgaagctattcagactgccctaaaagaatttaaattggagagagaagttgttgagaaagagttattagaaaaagttaaacatcttgagaatcaaatagcaaaaagtcctgccattgactctaccagaggagattcttcaagcttagttgctgaacttcaagaaaagcttcaggaagaaaaagctaagtttctagaacaacttgaagagcaagaaaaaagaaagaatgaagaaatgcaaaatgttcgaacatctttgattgcggaacaacagaccaattttaacactgttttaacaagagagaaaatgagaaaagaaaacataataaatgatcttagtgataagttgaaaagtacaatgcagcaacaagaacgggataaagatttgatagagtcactttctgaagatcgagctcgtttgcttgaggaaaagaaaaagcttgaagaagaagtcagtaagttgcgtagtagcagttttgttccttcaccatatgtagctacagccccagaactttatggagcttgtgcacctgaactcccaggtgaatcagatagatccgctgtggaaacagcagatgaaggaagagtggattcagcaatggagacaagcatgatgtctgtacaagaaaatattcatatgttgtctgaagaaaaacagcggataatgctgttagaacgaacattgcaattgaaagaagaagaaaataaacggttaaatcaaagactgatgtctcagagcatgtcttcagtatcttcaaggcattctgaaaagatagctattagagattttcaggtgggagatttggtactcatcatcctagacgaacgccatgacaattatgtgttatttactgttagtcctactttatattttctacattcagagtctctacctgccctggatctcaaaccagcttcaggtgcatctagaagaccctgggtacttggaaaagtaatggaaaaagaatactgtcaagccaaaaaggcacaaaacagatttaaagttcctttggggacaaagttttacagagtgaaagccgtatcatggaataagaaagtataa

SEQ ID NO: 3607 - DNA, 2584 bp, Homo sapiens
  source 1..2584: mol_type = genomic DNA
gagctcgggcggccggagctggtcgctgcgcgcgccggggggagggccggggctgcgagagaggaagctctttcgcggcgctacggcgttggcaccagtctctagaaaagaagtcagctctggttcggagaagcagcggctggcgtgggccatccggggaatgggcgccctcgtgacctagtgttgcggggcaaaaagggtcttgccggcctcgctcgtgcaggggcgtatctgggcgcctgagcgcggcgtgggagccttgggagccgccgcagcagggggcacacccggaaccggcctgagcgcccgggaccatgaacggggaggccatctgcagcgccctgcccaccattccctaccacaaactcgccgacctgcgctacctgagccgcggcgcctctggcactgtgtcgtccgcccgccacgcagactggcgcgtccaggtggccgtgaagcacctgcacatccacactccgctgctcgacagtgaaagaaaggatgtcttaagagaagctgaaattttacacaaagctagatttagttacattcttccaattttgggaatttgcaatgagcctgaatttttgggaatagttactgaatacatgccaaatggatcattaaatgaactcctacataggaaaactgaatatcctgatgttgcttggccattgagatttcgcatcctgcatgaaattgcccttggtgtaaattacctgcacaatatgactcctcctttacttcatcatgacttgaagactcagaatatcttattggacaatgaatttcatgttaagattgcagattttggtttatcaaagtggcgcatgatgtccctctcacagtcacgaagtagcaaatctgcaccagaaggagggacaattatctatatgccacctgaaaactatgaacctggacaaaaatcaagggccagtatcaagcacgatatatatagctatgcagttatcacatgggaagtgttatccagaaaacagccttttgaagatgtcaccaatcctttgcagataatgtatagtgtgtcacaaggacatcgacctgttattaatgaagaaagtttgccatatgatatacctcaccgagcacgtatgatctctctaatagaaagtggatgggcacaaaatccagatgaaagaccatctttcttaaaatgtttaatagaacttgaaccagttttgagaacatttgaagagataacttttcttgaagctgttattcagctaaagaaaacaaagttacagagtgtttcaagtgccattcacctatgtgacaagaagaaaatggaattatctctgaacatacctgtaaatcatggtccacaagaggaatcatgtggatcctctcagctccatgaaaatagtggttctcctgaaacttcaaggtccctgccagctcctcaagacaatgattttttatctagaaaagctcaagactgttattttatgaagctgcatcactgtcctggaaatcacagttgggatagcaccatttctggatctcaaagggctgcattctgtgatcacaagaccactccatgctcttcagcaataataaatccactctcaactgcaggaaactcagaacgtctgcagcctggtatagcccagcagtggatccagagcaaaagggaagacattgtgaaccaaatgacagaagcctgccttaaccagtcgctagatgcccttctgtccagggacttgatcatgaaagaggactatgaacttgttagtaccaagcctacaaggacctcaaaagtcagacaattactagacactactgacatccaaggagaagaatttgccaaagttatagtacaaaaattgaaagataacaaacaaatgggtcttcagccttacccggaaatacttgtggtttctagatcaccatctttaaatttacttcaaaataaaagcatgtaagtgactgtttttcaagaagaaatgtgtttcataaaaggatatttatatctctgttgctttgactttttttatataaaatccgtgagtattaaagctttattgaaggttctttgggtaaatattagtctccctccatgacactgcagtattttttttaattaatacaagtaaaaagtttgaattttgctacatagttcaatttttatgtctcttttgttaacagaaaccacttttaaaggatagtaattattcttgtttataacagtgccttaaggtatgatgtatttctgatggaagccattttcacattcatgttcttcatggattatttgttacttgtctaagatgcaatttgattttatgaagtatataccctttacccaccagagacagtacagaatccctgccctaaaatcccaggcttaattgccctacaaagggttattaatttaaaactccattattaggattacattttaaagttttatttatgaattccctttaaaaatgatatttcaaaggtaaaacaatacaatataaagaaaaaaataaatatattaataccggcttcctgtccccatttttaacctcagccttccctactgtcaccaacaaccaagctaaataaagtcaacagcctgatgtgt

SEQ ID NO: 3608 - DNA, 1740 bp, Homo sapiens
  source 1..1740: mol_type = genomic DNA
gttggcaccagtctctagaaaagaagtcagctctggttcggagaagcagcggctggcgtgggccatccggggaatgggcgccctcgtgacctagtgttgcggggcaaaaagggtcttgccggcctcgctcgtgcaggggcgtatctgggcgcctgagcgcggcgtgggagccttgggagccgccgcagcagggggcacacccggaaccggcctgagcgcccgggaccatgaacggggaggccatctgcagcgccctgcccaccattccctaccacaaactcgccgacctgcgctacctgagccgcggcgcctctggcactgtgtcgtccgcccgccacgcagactggcgcgtccaggtggccgtgaagcacctgcacatccacactccgctgctcgacagaaaactgaatatcctgatgttgcttggccattgagatttcgcatcctgcatgaaattgcccttggtgtaaattacctgcacaatatgactcctcctttacttcatcatgacttgaagactcagaatatcttattggacaatgaatttcatgttaagattgcagattttggtttatcaaagtggcgcatgatgtccctctcacagtcacgaagtagcaaatctgcaccagaaggagggacaattatctatatgccacctgaaaactatgaacctggacaaaaatcaagggccagtatcaagcacgatatatatagctatgcagttatcacatgggaagtgttatccagaaaacagccttttgaagatgtcaccaatcctttgcagataatgtatagtgtgtcacaaggacatcgacctgttattaatgaagaaagtttgccatatgatatacctcaccgagcacgtatgatctctctaatagaaagtggatgggcacaaaatccagatgaaagaccatctttcttaaaatgtttaatagaacttgaaccagttttgagaacatttgaagagataacttttcttgaagctgttattcagctaaagaaaacaaagttacagagtgtttcaagtgccattcacctatgtgacaagaagaaaatggaattatctctgaacatacctgtaaatcatggtccacaagaggaatcatgtggatcctctcagctccatgaaaatagtggttctcctgaaacttcaaggtccctgccagctcctcaagacaatgattttttatctagaaaagctcaagactgttattttatgaagctgcatcactgtcctggaaatcacagttgggatagcaccatttctggatctcaaagggctgcattctgtgatcacaagaccactccatgctcttcagcaataataaatccactctcaactgcaggaaactcagaacgtctgcagcctggtatagcccagcagtggatccagagcaaaagggaagacattgtgaaccaaatgacagaagcctgccttaaccagtcgctagatgcccttctgtccagggacttgatcatgaaagaggactatgaacttgttagtaccaagcctacaaggacctcaaaagtcagacaattactagacactactgacatccaaggagaagaatttgccaaagttatagtacaaaaattgaaagataacaaacaaatgggtcttcagccttacccggaaatacttgtggtttctagatcaccatctttaaatttacttcaaaataaaagcatgtaagtgactgtttttcaagaagaaatgtgtttcataaaaggatattt

SEQ ID NO: 3609 - DNA, 11565 bp, Homo sapiens
  source 1..11565: mol_type = genomic DNA
ctcggcgggggcccgctcccaggcccgctcccgagcccgttccgctcccgtccgccttcttctcgccttctctccgcgtggctcctccgtcccggcgtctccaaaactgaatgagcgagcggcgcgtagggcgcgcggcggcggcggcggcggcggcggcatggagcgcagtggctgggcccggcagactttcctcctagcgctgttgctgggggcgacgctgagggcgcgcgcggcggctggctattacccccgcttttcgcccttctttttcctgtgcacccaccacggggagctggaaggggatggggagcagggcgaggtgctcatttccctgcatattgcgggcaaccccacctactacgttccgggacaagaataccatgtgacaatttcaacaagcaccttttttgacggcttgctggtgacaggactatacacatctacaagtgttcaggcatcacagagcattggaggttccagtgctttcggatttgggatcatgtctgaccaccagtttggtaaccagtttatgtgcagtgtggtagcctctcacgtgagtcacctgcccacaaccaacctcagtttcatctggattgctccacctgcgggcacaggctgtgtgaatttcatggctacagcaacacaccggggccaggttattttcaaagatgctttagcccagcagttgtgtgaacaaggagctccaacagatgtcactgtgcacccacatctagctgaaatacatagtgacagcattatcctgagagatgactttgactcctaccaccaactgcaattaaatccaaatatatgggttgaatgtaacaactgtgagactggagaacagtgtggcgcgattatgcatggcaatgccgtcaccttctgtgaaccatatggcccacgagaactgattaccacaggccttaatacaacaacagcttctgtcctccaattttccattgggtcaggttcatgtcgctttagttattcagaccccagcatcatcgtgttatatgccaagaataactctgcggactggattcagctagagaaaattagagccccttccaatgtcagcacaatcatccatatcctctaccttcctgaggacgccaaaggggagaatgtccaatttcagtggaagcaggaaaatcttcgtgtaggtgaagtgtatgaagcctgctgggccttagataacatcttgatcatcaattcagctcacagacaagtcgttttagaagatagtctcgacccagtggacacaggcaactggcttttcttcccaggagctacagttaagcatagctgtcagtcagatgggaactccatttatttccatggaaatgaaggcagcgagttcaattttgccaccaccagggatgtagatctttccacagaagatattcaagagcaatggtcagaagaatttgagagccagcctacaggatgggatgtcttgggagctgtcattggtacagaatgtggaacgatagaatcaggcttatcaatggtcttcctcaaagatggagagaggaaattatgcactccatccatggacactaccggttatgggaacctgaggttttactttgtgatgggaggaatttgtgaccctggaaattctcatgaaaatgacataatcctgtatgcaaaaattgaaggaagaaaagagcatataacactggataccctttcctattcctcatataaggttccgtctttggtttctgtggtcatcaatcctgaacttcagactcctgctaccaaattttgtctcaggcaaaagaaccatcaaggacataataggaatgtctgggctgtagactttttccatgtcttgcctgttctcccttctacaatgtctcacatgatacagttttccatcaatctgggatgtggaacgcatcagcctggtaacagtgtcagcttggaattttctaccaaccatgggcgctcctggtccctccttcacactgaatgcttacctgagatctgtgctggaccccacctcccccacagcactgtctactcctctgaaaactacagtgggtggaaccgaataacaattccccttcctaacgcagcactaacccggaacaccaggattcgctggagacaaacaggaccaatccttggaaacatgtgggcaattgataatgtttatattggcccgtcatgtctcaaattctgttctggcagaggacagtgcactagacatggttgcaagtgtgaccctggattttctggcccagcttgtgagatggcatcccagacattcccaatgtttatttctgaaagctttggcagttccaggctctcctcttaccataacttttactctatccgtggtgctgaagtcagctttggttgtggtgtcttggccagtggtaaggccctggttttcaacaaagatgggcggcgtcagctaattacatctttccttgacagctcacaatccaggtttctccagttcacactgagactggggagcaaatctgttctgagcacgtgcagagcccctgatcagcctggtgaaggagttttgttgcattattcttatgataatgggataacttggaaactcctggagcattattcatatctcagctatcatgagcccagaataatctccgtagaactaccaggtgatgcaaagcagtttggaattcagttcagatggtggcaaccgtatcattcttcccagagagaagatgtatgggctattgatgagattatcatgacatctgtgcttttcaacagcattagtcttgactttaccaatcttgtggaggtcactcagtctctgggattctaccttggaaatgttcagccatactgtggccacgactggaccctttgttttacaggagattctaaacttgcctcaagtatgcgctatgtggaaacacaatcaatgcagataggagcatcctatatgattcagttcagtttggtgatgggatgtggccagaaatacaccccacacatggacaaccaggtgaagctggagtactcaaccaaccacggccttacctggcacctcgtccaagaagaatgccttccaagtatgccaagttgtcaggaatttacatcagcaagtatttaccatgccagtgagtttacacagtggaggagagtcatagtgcttcttccccagaaaacttggtccagtgctacccgtttccgctggagccagagctattacacagctcaagacgagtgggctttggacagcatttacattgggcagcagtgccccaacatgtgcagtgggcatggctcatgcgatcatggcatatgcaggtgtgaccaggggtaccaaggcactgaatgccacccagaagctgcccttccgtccacaattatgtcagattttgagaaccagaatggctgggagtctgactggcaagaagttattgggggagaaattgtaaaaccagaacaagggtgtggtgtcatctcttctggatcatctctgtacttcagcaaggctgggaaaagacagctggtgagttgggacctggatacttcttgggtggactttgtccagttctacatccagataggcggagagagtgcttcatgcaacaagcctgacagcagagaggagggcgtcctccttcagtacagcaacaatgggggcatccagtggcacctgctagcagagatgtacttttcagacttcagcaaacccagatttgtctatctggagcttccagctgctgccaagaccccttgcaccaggttccgctggtggcagcccgtgttctcaggggaggactatgaccagtgggcagtcgatgacatcatcattctgtccgagaagcagaagcagatcatcccagttatcaatccaactttacctcagaacttttatgagaagccagcttttgattaccctatgaatcagatgagtgtgtggttgatgttggctaatgaaggaatggttaaaaatgaaaccttctgtgctgccacaccatcagcaatgatatttggaaaatcagatggagatcgatttgcagtaactcgagatttgaccctgaaacctggatatgtgctacagttcaagctaaacataggttgtgccaatcaattcagcagtactgctccagttcttcttcagtactctcatgatgctggtatgtcctggtttctggtgaaagaaggctgttacccggcttctgcaggcaaaggatgcgaaggaaactccagagaactaagtgagcccaccatgtatcacacaggggactttgaagaatggacaagaatcaccattgttattccaaggtctcttgcatccagcaagaccagattccgatggatccaggagagcagctcacagaaaaacgtgcctccatttggtttagatggagtgtacatatccgagccttgtcccagttactgcagtggccatggggactgcatttcaggagtgtgtttctgtgacctgggatatactgctgcacaaggaacctgtgtgtcaaatgtccccaatcacaatgagatgttcgataggtttgaggggaagctcagccctctgtggtacaagataacaggtgcccaggttggaactggctgtggaacacttaacgatggcaaatctctctacttcaatggccctgggaaaagggaagcccggacggtccctctggacaccaggaatatcagacttgttcaattttatatacaaattggaagcaaaacttcaggcattacctgcatcaaaccaagaactagaaatgaagggcttattgttcagtattcaaatgacaatgggatactctggcatttgcttcgagagttggacttcatgtccttcctggaaccacagatcatttccattgacctgccacaggacgcgaagacacctgcaacggcatttcgatggtggcaaccgcaacatgggaagcattcagcccagtgggctttggatgatgttcttataggaatgaatgacagctctcaaactggatttcaagacaaatttgatggctctatagatttgcaagccaactggtatcgaatccaaggaggtcaagttgatattgactgtctctctatggatactgctctgatattcactgaaaacataggaaaacctcgttatgctgagacctgggattttcatgtgtcagcatctacctttttgcagtttgaaatgagcatgggctgtagcaagcccttcagcaactcccacagtgtacagctccagtattctctgaacaatggcaaggactggcatcttgtcaccgaagagtgtgttcctccaaccattggctgtctgcattacacggaaagttcaatttacacctcggaaagattccagaattggaagcggatcactgtctaccttccactctccaccatttctcccaggacccggttcagatggattcaggccaactacactgtgggggctgattcctgggcgattgataatgttgtactggcctcagggtgcccttggatgtgctcaggacgagggatttgtgatgctggacgctgtgtgtgtgaccggggctttggtggaccctattgtgttcctgttgttcctctgccctcgattcttaaagacgatttcaatgggaatttacatcctgacctttggcctgaagtgtatggtgcagagagggggaatctgaatggtgaaaccatcaaatctggaacatctctaatttttaaaggggaaggactaaggatgcttatttcaagagatctagattgtacaaatacaatgtatgtccagttttcacttagatttatagcaaaaagtaccccagagagatctcactctattctgttacaattctccatcagtggaggaatcacttggcacctgatggatgaattttactttcctcaaacaacgaatatacttttcatcaatgttcccttgccatacactgcccaaaccaatgctacaagattcagactctggcaaccttataataacggtaagaaagaagaaatctggattgttgatgacttcattatcgatggaaataatgtaaacaaccctgtgatgctcttggatacatttgattttgggcccagagaagacaattggtttttctatcctggtggtaacatcggtctttattgtccatattcttcaaagggggcacctgaagaagattcagctatggtgtttgtttcaaatgaagttggtgagcattccattaccacccgtgacctaaatgtgaatgagaacaccatcatacaatttgagatcaacgttggctgttcgactgatagctcatccgcggatccagtgagactggaattttcaagggacttcggggcgacctggcaccttctgctgcccctctgctaccacagcagcagccacgtcagctctttatgctccaccgagcaccaccccagcagcacctactacgcaggaaccatgcagggctggaggagggaggtcgtgcactttgggaagctgcacctttgtggatctgtccgtttcagatggtaccagggattttaccctgccggctctcagccagtgacatgggccattgataatgtctacatcggtccccagtgtgaggagatgtgtaatggacaggggagctgtatcaatggaaccaaatgtatatgtgaccctggctactcaggtccaacctgtaaaataagcaccaaaaatcctgattttctcaaagatgatttcgaaggtcagctagaatctgatagattcttattaatgagtggtgggaaaccatctcgaaagtgtggaatcctttctagtggaaacaacctctttttcaatgaagatggcttgcgcatgttgatgacacgagacctggatttatcacatgctagatttgtgcagttcttcatgagactgggatgtggtaaaggcgttcctgaccccaggagtcaacccgtgctcctacagtattctctcaacggtggcctctcgtggagtcttcttcaggagttccttttcagcaattccagcaatgtgggcaggtacattgccctggagatacccttgaaagcccgttctggttctactcgccttcgctggtggcaaccgtctgagaatgggcacttctacagcccctgggttatcgatcagattcttattggaggaaatatttctggtaatacggtcttggaagatgatttcacaacccttgatagtaggaaatggctgcttcacccaggaggcaccaagatgcccgtgtgtggctctactggtgatgccctggtcttcattgaaaaggccagcacccgttacgtggtcagcacagacgttgccgtgaatgaggattccttcctacagatagacttcgctgcctcctgctcagtcacagactcttgttatgcgattgaattggaatactcagtagatcttggattgtcatggcacccattggtaagggactgtctgcctaccaatgtggaatgcagtcgctatcatctgcaacggatcctggtgtcagacactttcaacaagtggactagaatcactctgcctctccctccttataccaggtcccaagccactcgtttccgttggcatcaaccagctccttttgacaagcagcagacatgggcaatagataatgtctatatcggggatggctgcatagacatgtgcagtggccatgggagatgcatccagggaaactgcgtctgtgatgaacagtggggtggcctgtactgtgatgaccccgagacctctcttccaacccaactcaaagacaacttcaatcgagctccatccagtcagaactggctgactgtgaacggagggaaattgagtacagtgtgtggagccgtggcgtcgggaatggctctccatttcagtgggggttgtagtcgattattagtcactgtggatctaaacctcactaatgctgagttcatccaattttacttcatgtatgggtgcctgattacaccaaacaaccgtaaccaaggtgttctcttggaatattctgtcaatggaggcattacctggaacctgctcatggagattttctatgaccagtacagtaagcccggatttgtgaatatccttctccctcctgatgctaaagagattgccactcgcttccgctggtggcagccaagacatgacggcctggatcagaacgactgggccattgacaatgtcctcatctcaggctctgctgaccaaaggaccgttatgctggacaccttcagcagcgccccagtaccccagcatgagcgctcccctgcagatgccggccctgtcgggaggatcgcctttgacatgtttatggaagacaaaacttcagtgaatgagcactggctattccatgatgattgtacagtagaaagattctgtgactcccctgatggtgtgatgctctgtggcagtcatgatggacgggaggtgtatgcagtgacccatgacctgactcccactgaaggctggattatgcaattcaagatctcagttggatgtaaggtgtctgaaaaaattgcccagaatcaaattcatgtgcagtattctactgacttcggtgtgagttggaattatctggtccctcagtgcttgcctgctgacccaaaatgctctggaagtgtttctcagccatctgtattctttccaactaaagggtggaaaaggatcacctacccacttcctgaaagcttagtgggaaatccggtaaggtttaggttctatcagaagtactcagacatgcagtgggcaatcgataatttctacctgggccctggatgcttggacaactgcaggggccatggagattgcttaagggaacagtgcatctgtgatccgggatactcagggccaaactgctacttgacccacactctgaagactttcctgaaggaacgctttgacagtgaagaaatcaaacctgacttatggatgtccttagaaggtggaagtacttgcactgagtgtggaattcttgccgaggacactgcactctattttgggggatccactgtgagacaagcggttacacaagatttggatcttcgaggtgcaaagttcctgcaatactgggggcgcatcggtagtgagaacaacatgacctcttgccatcgtcccatctgccggaaggaaggcgtgctgttggactactctaccgatggaggaattacctggactttgctccatgagatggattaccagaaatacatttctgttagacacgactacatacttcttcctgaagatgccctcaccaacacaactcgacttcgctggtggcagccttttgtgatcagcaatggaattgtggtctctggggtggagcgtgctcagtgggcactggacaacattttgattggtggagcagaaatcaatcccagccaattggtggacacttttgatgatgaaggcacttcccatgaagaaaactggagtttttaccctaatgctgtaaggacagcaggattttgtggcaatccatcctttcacctctattggccaaataaaaagaaggacaagactcacaatgctctctcctcccgagaactcattatacagccaggatacatgatgcagtttaaaattgtggtgggttgtgaagccacttcttgtggtgaccttcattccgtaatgctggaatacactaaggatgcaagatcggattcctggcagctcgtacagacccagtgccttccttcctcttctaacagcattggctgctcccctttccagttccatgaagccaccatctacaactctgtcaacagctcaagctggaaaagaatcaccatccagctgcctgaccatgtctcctctagtgcaacacagttccgctggatccagaagggagaagaaactgagaagcaaagctgggcaattgaccacgtgtacattggagaggcttgccccaagctctgcagcgggcacggatactgcacgaccggtgccatctgcatctgcgacgagagcttccaaggtgatgactgctctgttttcagtcacgaccttcccagttatattaaagataattttgagtccgcaagagtcaccgaggcaaactgggagaccattcaaggtggagtcataggaagtggctgtgggcagctggccccctacgcccatggagactcactgtactttaatggctgtcagatcaggcaagcagctaccaagcctctggatctcactcgagcaagcaaaatcatgtttgttttgcaaattgggagcatgtcgcagacggacagctgcaacagtgacctgagtggcccccacgctgtggacaaggcagtgctgctgcaatacagcgtcaacaacgggatcacctggcatgtcatcgcccagcaccagccaaaggacttcacacaagctcagagagtgtcttacaatgtccccctggaggcacggatgaaaggagtcttactgcgctggtggcaaccacgccacaatggaacaggtcatgatcaatgggctttggaccatgtggaggtcgtcctcactcgcaaacaaaattacatgatgaatttttcacgacaacatgggctcagacatttctacaacagaagacgaaggtcacttaggcgatacccatgaagaatcaaaaagtttattttttttcttccaacatgtgatgtgttgctctccattcttttaaatctcgcactacatctgatatcaggaaatatctgtgaaggacttggtgattacctgaaagcccttctcaagaccgagtgtacaccactttcccacactgtgaactaatgacaagtgacttatttgctcataagtaaatgtcttcatgttgatgtgtccgtgaaagttgtgatctgttgtaatatcagttacagtggcagtattgacaataagaaacagtttaacagaaaaatgaaatttaagcacaaaaaatttaagagattttatgtttaaaatggcatttagcacagtatttaacattcttggtcacaaagctatttaagtggactgtatttcggctatgtctcatgttttatatgattaaattatcattgtttgtcctttatgtattctcttctacaatacaacacattgaaactgtatttacttgttatgttgtaatattttgctgctgaatttggggctacttatattctgcagaaaattaattgaaatacctattcaagaagatagttgtaaagatattgtatctcctttaatatactccttaaaaatgtatgttggtttagcgttgttttgtggataagaaaaatgcttgaccctgaaatattttctactttaaattgtggatgaagaccctatctcccacaaataagttcccatttccttgtctaaagatctttttttaagtgttctgtggctgatttactaacagtaactgccattttttgtctgtgataacagagtgatttgtaaaacagtggttgttttttcattgtgttttcttcgtggattgttttttctgcgggtcatattcataccttctgatgaagttgtacaacaccagcaacattataatggccctgtagctctgaatgctatttgtgtaactgaaaggttgcactctagggtgaaccaagctataaaagcccatgcttaaataaaaattatgtccaaaagccattgaa

SEQ ID NO: 3610 - DNA, 11571 bp, Homo sapiens
  source 1..11571: mol_type = genomic DNA
ctcggcgggggcccgctcccaggcccgctcccgagcccgttccgctcccgtccgccttcttctcgccttctctccgcgtggctcctccgtcccggcgtctccaaaactgaatgagcgagcggcgcgtagggcgcgcggcggcggcggcggcggcggcggcatggagcgcagtggctgggcccggcagactttcctcctagcgctgttgctgggggcgacgctgagggcgcgcgcggcggctggctattacccccgcttttcgcccttctttttcctgtgcacccaccacggggagctggaaggggatggggagcagggcgaggtgctcatttccctgcatattgcgggcaaccccacctactacgttccgggacaagaataccatgtgacaatttcaacaagcaccttttttgacggcttgctggtgacaggactatacacatctacaagtgttcaggcatcacagagcattggaggttccagtgctttcggatttgggatcatgtctgaccaccagtttggtaaccagtttatgtgcagtgtggtagcctctcacgtgagtcacctgcccacaaccaacctcagtttcatctggattgctccacctgcgggcacaggctgtgtgaatttcatggctacagcaacacaccggggccaggttattttcaaagatgctttagcccagcagttgtgtgaacaaggagctccaacagatgtcactgtgcacccacatctagctgaaatacatagtgacagcattatcctgagagatgactttgactcctaccaccaactgcaattaaatccaaatatatgggttgaatgtaacaactgtgagactggagaacagtgtggcgcgattatgcatggcaatgccgtcaccttctgtgaaccatatggcccacgagaactgattaccacaggccttaatacaacaacagcttctgtcctccaattttccattgggtcaggttcatgtcgctttagttattcagaccccagcatcatcgtgttatatgccaagaataactctgcggactggattcagctagagaaaattagagccccttccaatgtcagcacaatcatccatatcctctaccttcctgaggacgccaaaggggagaatgtccaatttcagtggaagcaggaaaatcttcgtgtaggtgaagtgtatgaagcctgctgggccttagataacatcttgatcatcaattcagctcacagacaagtcgttttagaagatagtctcgacccagtggacacaggcaactggcttttcttcccaggagctacagttaagcatagctgtcagtcagatgggaactccatttatttccatggaaatgaaggcagcgagttcaattttgccaccaccagggatgtagatctttccacagaagatattcaagagcaatggtcagaagaatttgagagccagcctacaggatgggatgtcttgggagctgtcattggtacagaatgtggaacgatagaatcaggcttatcaatggtcttcctcaaagatggagagaggaaattatgcactccatccatggacactaccggttatgggaacctgaggttttactttgtgatgggaggaatttgtgaccctggaaattctcatgaaaatgacataatcctgtatgcaaaaattgaaggaagaaaagagcatataacactggataccctttcctattcctcatataaggttccgtctttggtttctgtggtcatcaatcctgaacttcagactcctgctaccaaattttgtctcaggcaaaagaaccatcaaggacataataggaatgtctgggctgtagactttttccatgtcttgcctgttctcccttctacaatgtctcacatgatacagttttccatcaatctgggatgtggaacgcatcagcctggtaacagtgtcagcttggaattttctaccaaccatgggcgctcctggtccctccttcacactgaatgcttacctgagatctgtgctggaccccacctcccccacagcactgtctactcctctgaaaactacagtgggtggaaccgaataacaattccccttcctaacgcagcactaacccggaacaccaggattcgctggagacaaacaggaccaatccttggaaacatgtgggcaattgataatgtttatattggcccgtcatgtctcaaattctgttctggcagaggacagtgcactagacatggttgcaagtgtgaccctggattttctggcccagcttgtgagatggcatcccagacattcccaatgtttatttctgaaagctttggcagttccaggctctcctcttaccataacttttactctatccgtggtgctgaagtcagctttggttgtggtgtcttggccagtggtaaggccctggttttcaacaaagatgggcggcgtcagctaattacatctttccttgacagctcacaatccaggtttctccagttcacactgagactggggagcaaatctgttctgagcacgtgcagagcccctgatcagcctggtgaaggagttttgttgcattattcttatgataatgggataacttggaaactcctggagcattattcatatctcagctatcatgagcccagaataatctccgtagaactaccaggtgatgcaaagcagtttggaattcagttcagatggtggcaaccgtatcattcttcccagagagaagatgtatgggctattgatgagattatcatgacatctgtgcttttcaacagcattagtcttgactttaccaatcttgtggaggtcactcagtctctgggattctaccttggaaatgttcagccatactgtggccacgactggaccctttgttttacaggagattctaaacttgcctcaagtatgcgctatgtggaaacacaatcaatgcagataggagcatcctatatgattcagttcagtttggtgatgggatgtggccagaaatacaccccacacatggacaaccaggtgaagctggagtactcaaccaaccacggccttacctggcacctcgtccaagaagaatgccttccaagtatgccaagttgtcaggaatttacatcagcaagtatttaccatgccagtgagtttacacagtggaggagagtcatagtgcttcttccccagaaaacttggtccagtgctacccgtttccgctggagccagagctattacacagctcaagacgagtgggctttggacagcatttacattgggcagcagtgccccaacatgtgcagtgggcatggctcatgcgatcatggcatatgcaggtgtgaccaggggtaccaaggcactgaatgccacccagaagctgcccttccgtccacaattatgtcagattttgagaaccagaatggctgggagtctgactggcaagaagttattgggggagaaattgtaaaaccagaacaagggtgtggtgtcatctcttctggatcatctctgtacttcagcaaggctgggaaaagacagctggtgagttgggacctggatacttcttgggtggactttgtccagttctacatccagataggcggagagagtgcttcatgcaacaagcctgacagcagagaggagggcgtcctccttcagtacagcaacaatgggggcatccagtggcacctgctagcagagatgtacttttcagacttcagcaaacccagatttgtctatctggagcttccagctgctgccaagaccccttgcaccaggttccgctggtggcagcccgtgttctcaggggaggactatgaccagtgggcagtcgatgacatcatcattctgtccgagaagcagaagcagatcatcccagttatcaatccaactttacctcagaacttttatgagaagccagcttttgattaccctatgaatcagatgagtgtgtggttgatgttggctaatgaaggaatggttaaaaatgaaaccttctgtgctgccacaccatcagcaatgatatttggaaaatcagatggagatcgatttgcagtaactcgagatttgaccctgaaacctggatatgtgctacagttcaagctaaacataggttgtgccaatcaattcagcagtactgctccagttcttcttcagtactctcatgatgctggtatgtcctggtttctggtgaaagaaggctgttacccggcttctgcaggcaaaggatgcgaaggaaactccagagaactaagtgagcccaccatgtatcacacaggggactttgaagaatggacaagaatcaccattgttattccaaggtctcttgcatccagcaagaccagattccgatggatccaggagagcagctcacagaaaaacgtgcctccatttggtttagatggagtgtacatatccgagccttgtcccagttactgcagtggccatggggactgcatttcaggagtgtgtttctgtgacctgggatatactgctgcacaaggaacctgtgtgtcaaatgtccccaatcacaatgagatgttcgataggtttgaggggaagctcagccctctgtggtacaagataacaggtgcccaggttggaactggctgtggaacacttaacgatggcaaatctctctacttcaatggccctgggaaaagggaagcccggacggtccctctggacaccaggaatatcagacttgttcaattttatatacaaattggaagcaaaacttcaggcattacctgcatcaaaccaagaactagaaatgaagggcttattgttcagtattcaaatgacaatgggatactctggcatttgcttcgagagttggacttcatgtccttcctggaaccacagatcatttccattgacctgccacaggacgcgaagacacctgcaacggcatttcgatggtggcaaccgcaacatgggaagcattcagcccagtgggctttggatgatgttcttataggaatgaatgacagctctcaaactggatttcaagacaaatttgatggctctatagatttgcaagccaactggtatcgaatccaaggaggtcaagttgatattgactgtctctctatggatactgctctgatattcactgaaaacataggaaaacctcgttatgctgagacctgggattttcatgtgtcagcatctacctttttgcagtttgaaatgagcatgggctgtagcaagcccttcagcaactcccacagtgtacagctccagtattctctgaacaatggcaaggactggcatcttgtcaccgaagagtgtgttcctccaaccattggctgtctgcattacacggaaagttcaatttacacctcggaaagattccagaattggaagcggatcactgtctaccttccactctccaccatttctcccaggacccggttcagatggattcaggccaactacactgtgggggctgattcctgggcgattgataatgttgtactggcctcagggtgcccttggatgtgctcaggacgagggatttgtgatgctggacgctgtgtgtgtgaccggggctttggtggaccctattgtgttcctgttgttcctctgccctcgattcttaaagacgatttcaatgggaatttacatcctgacctttggcctgaagtgtatggtgcagagagggggaatctgaatggtgaaaccatcaaatctggaacatctctaatttttaaaggggaaggactaaggatgcttatttcaagagatctagattgtacaaatacaatgtatgtccagttttcacttagatttatagcaaaaagtaccccagagagatctcactctattctgttacaattctccatcagtggaggaatcacttggcacctgatggatgaattttactttcctcaaacaacgaatatacttttcatcaatgttcccttgccatacactgcccaaaccaatgctacaagattcagactctggcaaccttataataacggtaagaaagaagaaatctggattgttgatgacttcattatcgatggaaataatgtaaacaaccctgtgatgctcttggatacatttgattttgggcccagagaagacaattggtttttctatcctggtggtaacatcggtctttattgtccatattcttcaaagggggcacctgaagaagattcagctatggtgtttgtttcaaatgaagttggtgagcattccattaccacccgtgacctaaatgtgaatgagaacaccatcatacaatttgagatcaacgttggctgttcgactgatagctcatccgcggatccagtgagactggaattttcaagggacttcggggcgacctggcaccttctgctgcccctctgctaccacagcagcagccacgtcagctctttatgctccaccgagcaccaccccagcagcacctactacgcaggaaccatgcagggctggaggagggaggtcgtgcactttgggaagctgcacctttgtggatctgtccgtttcagatggtaccagggattttaccctgccggctctcagccagtgacatgggccattgataatgtctacatcggtccccagtgtgaggagatgtgtaatggacaggggagctgtatcaatggaaccaaatgtatatgtgaccctggctactcaggtccaacctgtaaaataagcaccaaaaatcctgattttctcaaagatgatttcgaaggtcagctagaatctgatagattcttattaatgagtggtgggaaaccatctcgaaagtgtggaatcctttctagtggaaacaacctctttttcaatgaagatggcttgcgcatgttgatgacacgagacctggatttatcacatgctagatttgtgcagttcttcatgagactgggatgtggtaaaggcgttcctgaccccaggagtcaacccgtgctcctacagtattctctcaacggtggcctctcgtggagtcttcttcaggagttccttttcagcaattccagcaatgtgggcaggtacattgccctggagatacccttgaaagcccgttctggttctactcgccttcgctggtggcaaccgtctgagaatgggcacttctacagcccctgggttatcgatcagattcttattggaggaaatatttctggtaatacggtcttggaagatgatttcacaacccttgatagtaggaaatggctgcttcacccaggaggcaccaagatgcccgtgtgtggctctactggtgatgccctggtcttcattgaaaaggccagcacccgttacgtggtcagcacagacgttgccgtgaatgaggattccttcctacagatagacttcgctgcctcctgctcagtcacagactcttgttatgcgattgaattggaatactcagtagatcttggattgtcatggcacccattggtaagggactgtctgcctaccaatgtggaatgcagtcgctatcatctgcaacggatcctggtgtcagacactttcaacaagtggactagaatcactctgcctctccctccttataccaggtcccaagccactcgtttccgttggcatcaaccagctccttttgacaagcagcagacatgggcaatagataatgtctatatcggggatggctgcatagacatgtgcagtggccatgggagatgcatccagggaaactgcgtctgtgatgaacagtggggtggcctgtactgtgatgaccccgagacctctcttccaacccaactcaaagacaacttcaatcgagctccatccagtcagaactggctgactgtgaacggagggaaattgagtacagtgtgtggagccgtggcgtcgggaatggctctccatttcagtgggggttgtagtcgattattagtcactgtggatctaaacctcactaatgctgagttcatccaattttacttcatgtatgggtgcctgattacaccaaacaaccgtaaccaaggtgttctcttggaatattctgtcaatggaggcattacctggaacctgctcatggagattttctatgaccagtacagtaagcccggatttgtgaatatccttctccctcctgatgctaaagagattgccactcgcttccgctggtggcagccaagacatgacggcctggatcagaacgactgggccattgacaatgtcctcatctcaggctctgctgaccaaaggaccgttatgctggacaccttcagcagcgccccagtaccccagcatgagcgctcccctgcagatgccggccctgtcgggaggatcgcctttgacatgtttatggaagacaaaacttcagtgaatgagcactggctattccatgatgattgtacagtagaaagattctgtgactcccctgatggtgtgatgctctgtggcagtcatgatggacgggaggtgtatgcagtgacccatgacctgactcccactgaaggctggattatgcaattcaagatctcagttggatgtaaggtgtctgaaaaaattgcccagaatcaaattcatgtgcagtattctactgacttcggtgtgagttggaattatctggtccctcagtgcttgcctgctgacccaaaatgctctggaagtgtttctcagccatctgtattctttccaactaaagggtggaaaaggatcacctacccacttcctgaaagcttagtgggaaatccggtaaggtttaggttctatcagaagtactcagacatgcagtgggcaatcgataatttctacctgggccctggatgcttggacaactgcaggggccatggagattgcttaagggaacagtgcatctgtgatccgggatactcagggccaaactgctacttgacccacactctgaagactttcctgaaggaacgctttgacagtgaagaaatcaaacctgacttatggatgtccttagaaggtggaagtacttgcactgagtgtggaattcttgccgaggacactgcactctattttgggggatccactgtgagacaagcggttacacaagatttggatcttcgaggtgcaaagttcctgcaatactgggggcgcatcggtagtgagaacaacatgacctcttgccatcgtcccatctgccggaaggaaggcgtgctgttggactactctaccgatggaggaattacctggactttgctccatgagatggattaccagaaatacatttctgttagacacgactacatacttcttcctgaagatgccctcaccaacacaactcgacttcgctggtggcagccttttgtgatcagcaatggaattgtggtctctggggtggagcgtgctcagtgggcactggacaacattttgattggtggagcagaaatcaatcccagccaattggtggacacttttgatgatgaaggcacttcccatgaagaaaactggagtttttaccctaatgctgtaaggacagcaggattttgtggcaatccatcctttcacctctattggccaaataaaaagaaggacaagactcacaatgctctctcctcccgagaactcattatacagccaggatacatgatgcagtttaaaattgtggtgggttgtgaagccacttcttgtggtgaccttcattccgtaatgctggaatacactaaggatgcaagatcggattcctggcagctcgtacagacccagtgccttccttcctcttctaacagcattggctgctcccctttccagttccatgaagccaccatctacaactctgtcaacagctcaagctggaaaagaatcaccatccagctgcctgaccatgtctcctctagtgcaacacagttccgctggatccagaagggagaagaaactgagaagcaaagctgggcaattgaccacgtgtacattggagaggcttgccccaagctctgcagcgggcacggatactgcacgaccggtgccatctgcatctgcgacgagagcttccaaggtgatgactgctctgttttcagtcacgaccttcccagttatattaaagataattttgagtccgcaagagtcaccgaggcaaactgggagaccattcaaggtggagtcataggaagtggctgtgggcagctggccccctacgcccatggagactcactgtactttaatggctgtcagatcaggcaagcagctaccaagcctctggatctcactcgagcaagcaaaatcatgtttgttttgcaaattgggagcatgtcgcagacggacagctgcaacagtgacctgagtggcccccacgctgtggacaaggcagtgctgctgcaatacagcgtcaacaacgggatcacctggcatgtcatcgcccagcaccagccaaaggacttcacacaagctcagagagtgtcttacaatgtccccctggaggcacggatgaaaggagtcttactgcgctggtggcaaccacgccacaatggaacaggtcatgatcaatgggctttggaccatgtggaggtcgtcctatttagcactcgcaaacaaaattacatgatgaatttttcacgacaacatgggctcagacatttctacaacagaagacgaaggtcacttaggcgatacccatgaagaatcaaaaagtttattttttttcttccaacatgtgatgtgttgctctccattcttttaaatctcgcactacatctgatatcaggaaatatctgtgaaggacttggtgattacctgaaagcccttctcaagaccgagtgtacaccactttcccacactgtgaactaatgacaagtgacttatttgctcataagtaaatgtcttcatgttgatgtgtccgtgaaagttgtgatctgttgtaatatcagttacagtggcagtattgacaataagaaacagtttaacagaaaaatgaaatttaagcacaaaaaatttaagagattttatgtttaaaatggcatttagcacagtatttaacattcttggtcacaaagctatttaagtggactgtatttcggctatgtctcatgttttatatgattaaattatcattgtttgtcctttatgtattctcttctacaatacaacacattgaaactgtatttacttgttatgttgtaatattttgctgctgaatttggggctacttatattctgcagaaaattaattgaaatacctattcaagaagatagttgtaaagatattgtatctcctttaatatactccttaaaaatgtatgttggtttagcgttgttttgtggataagaaaaatgcttgaccctgaaatattttctactttaaattgtggatgaagaccctatctcccacaaataagttcccatttccttgtctaaagatctttttttaagtgttctgtggctgatttactaacagtaactgccattttttgtctgtgataacagagtgatttgtaaaacagtggttgttttttcattgtgttttcttcgtggattgttttttctgcgggtcatattcataccttctgatgaagttgtacaacaccagcaacattataatggccctgtagctctgaatgctatttgtgtaactgaaaggttgcactctagggtgaaccaagctataaaagcccatgcttaaataaaaattatgtccaaaagccattgaa

SEQ ID NO: 3611 - DNA, 11571 bp, Homo sapiens
  source 1..11571: mol_type = genomic DNA
ctcggcgggggcccgctcccaggcccgctcccgagcccgttccgctcccgtccgccttcttctcgccttctctccgcgtggctcctccgtcccggcgtctccaaaactgaatgagcgagcggcgcgtagggcgcgcggcggcggcggcggcggcggcggcatggagcgcagtggctgggcccggcagactttcctcctagcgctgttgctgggggcgacgctgagggcgcgcgcggcggctggctattacccccgcttttcgcccttctttttcctgtgcacccaccacggggagctggaaggggatggggagcagggcgaggtgctcatttccctgcatattgcgggcaaccccacctactacgttccgggacaagaataccatgtgacaatttcaacaagcaccttttttgacggcttgctggtgacaggactatacacatctacaagtgttcaggcatcacagagcattggaggttccagtgctttcggatttgggatcatgtctgaccaccagtttggtaaccagtttatgtgcagtgtggtagcctctcacgtgagtcacctgcccacaaccaacctcagtttcatctggattgctccacctgcgggcacaggctgtgtgaatttcatggctacagcaacacaccggggccaggttattttcaaagatgctttagcccagcagttgtgtgaacaaggagctccaacagatgtcactgtgcacccacatctagctgaaatacatagtgacagcattatcctgagagatgactttgactcctaccaccaactgcaattaaatccaaatatatgggttgaatgtaacaactgtgagactggagaacagtgtggcgcgattatgcatggcaatgccgtcaccttctgtgaaccatatggcccacgagaactgattaccacaggccttaatacaacaacagcttctgtcctccaattttccattgggtcaggttcatgtcgctttagttattcagaccccagcatcatcgtgttatatgccaagaataactctgcggactggattcagctagagaaaattagagccccttccaatgtcagcacaatcatccatatcctctaccttcctgaggacgccaaaggggagaatgtccaatttcagtggaagcaggaaaatcttcgtgtaggtgaagtgtatgaagcctgctgggccttagataacatcttgatcatcaattcagctcacagacaagtcgttttagaagatagtctcgacccagtggacacaggcaactggcttttcttcccaggagctacagttaagcatagctgtcagtcagatgggaactccatttatttccatggaaatgaaggcagcgagttcaattttgccaccaccagggatgtagatctttccacagaagatattcaagagcaatggtcagaagaatttgagagccagcctacaggatgggatgtcttgggagctgtcattggtacagaatgtggaacgatagaatcaggcttatcaatggtcttcctcaaagatggagagaggaaattatgcactccatccatggacactaccggttatgggaacctgaggttttactttgtgatgggaggaatttgtgaccctggaaattctcatgaaaatgacataatcctgtatgcaaaaattgaaggaagaaaagagcatataacactggataccctttcctattcctcatataaggttccgtctttggtttctgtggtcatcaatcctgaacttcagactcctgctaccaaattttgtctcaggcaaaagaaccatcaaggacataataggaatgtctgggctgtagactttttccatgtcttgcctgttctcccttctacaatgtctcacatgatacagttttccatcaatctgggatgtggaacgcatcagcctggtaacagtgtcagcttggaattttctaccaaccatgggcgctcctggtccctccttcacactgaatgcttacctgagatctgtgctggaccccacctcccccacagcactgtctactcctctgaaaactacagtgggtggaaccgaataacaattccccttcctaacgcagcactaacccggaacaccaggattcgctggagacaaacaggaccaatccttggaaacatgtgggcaattgataatgtttatattggcccgtcatgtctcaaattctgttctggcagaggacagtgcactagacatggttgcaagtgtgaccctggattttctggcccagcttgtgagatggcatcccagacattcccaatgtttatttctgaaagctttggcagttccaggctctcctcttaccataacttttactctatccgtggtgctgaagtcagctttggttgtggtgtcttggccagtggtaaggccctggttttcaacaaagatgggcggcgtcagctaattacatctttccttgacagctcacaatccaggtttctccagttcacactgagactggggagcaaatctgttctgagcacgtgcagagcccctgatcagcctggtgaaggagttttgttgcattattcttatgataatgggataacttggaaactcctggagcattattcatatctcagctatcatgagcccagaataatctccgtagaactaccaggtgatgcaaagcagtttggaattcagttcagatggtggcaaccgtatcattcttcccagagagaagatgtatgggctattgatgagattatcatgacatctgtgcttttcaacagcattagtcttgactttaccaatcttgtggaggtcactcagtctctgggattctaccttggaaatgttcagccatactgtggccacgactggaccctttgttttacaggagattctaaacttgcctcaagtatgcgctatgtggaaacacaatcaatgcagataggagcatcctatatgattcagttcagtttggtgatgggatgtggccagaaatacaccccacacatggacaaccaggtgaagctggagtactcaaccaaccacggccttacctggcacctcgtccaagaagaatgccttccaagtatgccaagttgtcaggaatttacatcagcaagtatttaccatgccagtgagtttacacagtggaggagagtcatagtgcttcttccccagaaaacttggtccagtgctacccgtttccgctggagccagagctattacacagctcaagacgagtgggctttggacagcatttacattgggcagcagtgccccaacatgtgcagtgggcatggctcatgcgatcatggcatatgcaggtgtgaccaggggtaccaaggcactgaatgccacccagaagctgcccttccgtccacaattatgtcagattttgagaaccagaatggctgggagtctgactggcaagaagttattgggggagaaattgtaaaaccagaacaagggtgtggtgtcatctcttctggatcatctctgtacttcagcaaggctgggaaaagacagctggtgagttgggacctggatacttcttgggtggactttgtccagttctacatccagataggcggagagagtgcttcatgcaacaagcctgacagcagagaggagggcgtcctccttcagtacagcaacaatgggggcatccagtggcacctgctagcagagatgtacttttcagacttcagcaaacccagatttgtctatctggagcttccagctgctgccaagaccccttgcaccaggttccgctggtggcagcccgtgttctcaggggaggactatgaccagtgggcagtcgatgacatcatcattctgtccgagaagcagaagcagatcatcccagttatcaatccaactttacctcagaacttttatgagaagccagcttttgattaccctatgaatcagatgagtgtgtggttgatgttggctaatgaaggaatggttaaaaatgaaaccttctgtgctgccacaccatcagcaatgatatttggaaaatcagatggagatcgatttgcagtaactcgagatttgaccctgaaacctggatatgtgctacagttcaagctaaacataggttgtgccaatcaattcagcagtactgctccagttcttcttcagtactctcatgatgctggtatgtcctggtttctggtgaaagaaggctgttacccggcttctgcaggcaaaggatgcgaaggaaactccagagaactaagtgagcccaccatgtatcacacaggggactttgaagaatggacaagaatcaccattgttattccaaggtctcttgcatccagcaagaccagattccgatggatccaggagagcagctcacagaaaaacgtgcctccatttggtttagatggagtgtacatatccgagccttgtcccagttactgcagtggccatggggactgcatttcaggagtgtgtttctgtgacctgggatatactgctgcacaaggaacctgtgtgtcaaatgtccccaatcacaatgagatgttcgataggtttgaggggaagctcagccctctgtggtacaagataacaggtgcccaggttggaactggctgtggaacacttaacgatggcaaatctctctacttcaatggccctgggaaaagggaagcccggacggtccctctggacaccaggaatatcagacttgttcaattttatatacaaattggaagcaaaacttcaggcattacctgcatcaaaccaagaactagaaatgaagggcttattgttcagtattcaaatgacaatgggatactctggcatttgcttcgagagttggacttcatgtccttcctggaaccacagatcatttccattgacctgccacaggacgcgaagacacctgcaacggcatttcgatggtggcaaccgcaacatgggaagcattcagcccagtgggctttggatgatgttcttataggaatgaatgacagctctcaaactggatttcaagacaaatttgatggctctatagatttgcaagccaactggtatcgaatccaaggaggtcaagttgatattgactgtctctctatggatactgctctgatattcactgaaaacataggaaaacctcgttatgctgagacctgggattttcatgtgtcagcatctacctttttgcagtttgaaatgagcatgggctgtagcaagcccttcagcaactcccacagtgtacagctccagtattctctgaacaatggcaaggactggcatcttgtcaccgaagagtgtgttcctccaaccattggctgtctgcattacacggaaagttcaatttacacctcggaaagattccagaattggaagcggatcactgtctaccttccactctccaccatttctcccaggacccggttcagatggattcaggccaactacactgtgggggctgattcctgggcgattgataatgttgtactggcctcagggtgcccttggatgtgctcaggacgagggatttgtgatgctggacgctgtgtgtgtgaccggggctttggtggaccctattgtgttcctgttgttcctctgccctcgattcttaaagacgatttcaatgggaatttacatcctgacctttggcctgaagtgtatggtgcagagagggggaatctgaatggtgaaaccatcaaatctggaacatctctaatttttaaaggggaaggactaaggatgcttatttcaagagatctagattgtacaaatacaatgtatgtccagttttcacttagatttatagcaaaaagtaccccagagagatctcactctattctgttacaattctccatcagtggaggaatcacttggcacctgatggatgaattttactttcctcaaacaacgaatatacttttcatcaatgttcccttgccatacactgcccaaaccaatgctacaagattcagactctggcaaccttataataacggtaagaaagaagaaatctggattgttgatgacttcattatcgatggaaataatgtaaacaaccctgtgatgctcttggatacatttgattttgggcccagagaagacaattggtttttctatcctggtggtaacatcggtctttattgtccatattcttcaaagggggcacctgaagaagattcagctatggtgtttgtttcaaatgaagttggtgagcattccattaccacccgtgacctaaatgtgaatgagaacaccatcatacaatttgagatcaacgttggctgttcgactgatagctcatccgcggatccagtgagactggaattttcaagggacttcggggcgacctggcaccttctgctgcccctctgctaccacagcagcagccacgtcagctctttatgctccaccgagcaccaccccagcagcacctactacgcaggaaccatgcagggctggaggagggaggtcgtgcactttgggaagctgcacctttgtggatctgtccgtttcagatggtaccagggattttaccctgccggctctcagccagtgacatgggccattgataatgtctacatcggtccccagtgtgaggagatgtgtaatggacaggggagctgtatcaatggaaccaaatgtatatgtgaccctggctactcaggtccaacctgtaaaataagcaccaaaaatcctgattttctcaaagatgatttcgaaggtcagctagaatctgatagattcttattaatgagtggtgggaaaccatctcgaaagtgtggaatcctttctagtggaaacaacctctttttcaatgaagatggcttgcgcatgttgatgacacgagacctggatttatcacatgctagatttgtgcagttcttcatgagactgggatgtggtaaaggcgttcctgaccccaggagtcaacccgtgctcctacagtattctctcaacggtggcctctcgtggagtcttcttcaggagttccttttcagcaattccagcaatgtgggcaggtacattgccctggagatacccttgaaagcccgttctggttctactcgccttcgctggtggcaaccgtctgagaatgggcacttctacagcccctgggttatcgatcagattcttattggaggaaatatttctggtaatacggtcttggaagatgatttcacaacccttgatagtaggaaatggctgcttcacccaggaggcaccaagatgcccgtgtgtggctctactggtgatgccctggtcttcattgaaaaggccagcacccgttacgtggtcagcacagacgttgccgtgaatgaggattccttcctacagatagacttcgctgcctcctgctcagtcacagactcttgttatgcgattgaattggaatactcagtagatcttggattgtcatggcacccattggtaagggactgtctgcctaccaatgtggaatgcagtcgctatcatctgcaacggatcctggtgtcagacactttcaacaagtggactagaatcactctgcctctccctccttataccaggtcccaagccactcgtttccgttggcatcaaccagctccttttgacaagcagcagacatgggcaatagataatgtctatatcggggatggctgcatagacatgtgcagtggccatgggagatgcatccagggaaactgcgtctgtgatgaacagtggggtggcctgtactgtgatgaccccgagacctctcttccaacccaactcaaagacaacttcaatcgagctccatccagtcagaactggctgactgtgaacggagggaaattgagtacagtgtgtggagccgtggcgtcgggaatggctctccatttcagtgggggttgtagtcgattattagtcactgtggatctaaacctcactaatgctgagttcatccaattttacttcatgtatgggtgcctgattacaccaaacaaccgtaaccaaggtgttctcttggaatattctgtcaatggaggcattacctggaacctgctcatggagattttctatgaccagtacagtaagcccggatttgtgaatatccttctccctcctgatgctaaagagattgccactcgcttccgctggtggcagccaagacatgacggcctggatcagaacgactgggccattgacaatgtcctcatctcaggctctgctgaccaaaggaccgttatgctggacaccttcagcagcgccccagtaccccagcatgagcgctcccctgcagatgccggccctgtcgggaggatcgcctttgacatgtttatggaagacaaaacttcagtgaatgagcactggctattccatgatgattgtacagtagaaagattctgtgactcccctgatggtgtgatgctctgtggcagtcatgatggacgggaggtgtatgcagtgacccatgacctgactcccactgaaggctggattatgcaattcaagatctcagttggatgtaaggtgtctgaaaaaattgcccagaatcaaattcatgtgcagtattctactgacttcggtgtgagttggaattatctggtccctcagtgcttgcctgctgacccaaaatgctctggaagtgtttctcagccatctgtattctttccaactaaagggtggaaaaggatcacctacccacttcctgaaagcttagtgggaaatccggtaaggtttaggttctatcagaagtactcagacatgcagtgggcaatcgataatttctacctgggccctggatgcttggacaactgcaggggccatggagattgcttaagggaacagtgcatctgtgatccgggatactcagggccaaactgctacttgacccacactctgaagactttcctgaaggaacgctttgacagtgaagaaatcaaacctgacttatggatgtccttagaaggtggaagtacttgcactgagtgtggaattcttgccgaggacactgcactctattttgggggatccactgtgagacaagcggttacacaagatttggatcttcgaggtgcaaagttcctgcaatactgggggcgcatcggtagtgagaacaacatgacctcttgccatcgtcccatctgccggaaggaaggcgtgctgttggactactctaccgatggaggaattacctggactttgctccatgagatggattaccagaaatacatttctgttagacacgactacatacttcttcctgaagatgccctcaccaacacaactcgacttcgctggtggcagccttttgtgatcagcaatggaattgtggtctctggggtggagcgtgctcagtgggcactggacaacattttgattggtggagcagaaatcaatcccagccaattggtggacacttttgatgatgaaggcacttcccatgaagaaaactggagtttttaccctaatgctgtaaggacagcaggattttgtggcaatccatcctttcacctctattggccaaataaaaagaaggacaagactcacaatgctctctcctcccgagaactcattatacagccaggatacatgatgcagtttaaaattgtggtgggttgtgaagccacttcttgtggtgaccttcattccgtaatgctggaatacactaaggatgcaagatcggattcctggcagctcgtacagacccagtgccttccttcctcttctaacagcattggctgctcccctttccagttccatgaagccaccatctacaactctgtcaacagctcaagctggaaaagaatcaccatccagctgcctgaccatgtctcctctagtgcaacacagttccgctggatccagaagggagaagaaactgagaagcaaagctgggcaattgaccacgtgtacattggagaggcttgccccaagctctgcagcgggcacggatactgcacgaccggtgccatctgcatctgcgacgagagcttccaaggtgatgactgctctgttttcagtcacgaccttcccagttatattaaagataattttgagtccgcaagagtcaccgaggcaaactgggagaccattcaaggtggagtcataggaagtggctgtgggcagctggccccctacgcccatggagactcactgtactttaatggctgtcagatcaggcaagcagctaccaagcctctggatctcactcgagcaagcaaaatcatgtttgttttgcaaattgggagcatgtcgcagacggacagctgcaacagtgacctgagtggcccccacgctgtggacaaggcagtgctgctgcaatacagcgtcaacaacgggatcacctggcatgtcatcgcccagcaccagccaaaggacttcacacaagctcagagagtgtcttacaatgtccccctggaggcacggatgaaaggagtcttactgcgctggtggcaaccacgccacaatggaacaggtcatgatcaatgggctttggaccatgtggaggtcgtcctagtaaccactcgcaaacaaaattacatgatgaatttttcacgacaacatgggctcagacatttctacaacagaagacgaaggtcacttaggcgatacccatgaagaatcaaaaagtttattttttttcttccaacatgtgatgtgttgctctccattcttttaaatctcgcactacatctgatatcaggaaatatctgtgaaggacttggtgattacctgaaagcccttctcaagaccgagtgtacaccactttcccacactgtgaactaatgacaagtgacttatttgctcataagtaaatgtcttcatgttgatgtgtccgtgaaagttgtgatctgttgtaatatcagttacagtggcagtattgacaataagaaacagtttaacagaaaaatgaaatttaagcacaaaaaatttaagagattttatgtttaaaatggcatttagcacagtatttaacattcttggtcacaaagctatttaagtggactgtatttcggctatgtctcatgttttatatgattaaattatcattgtttgtcctttatgtattctcttctacaatacaacacattgaaactgtatttacttgttatgttgtaatattttgctgctgaatttggggctacttatattctgcagaaaattaattgaaatacctattcaagaagatagttgtaaagatattgtatctcctttaatatactccttaaaaatgtatgttggtttagcgttgttttgtggataagaaaaatgcttgaccctgaaatattttctactttaaattgtggatgaagaccctatctcccacaaataagttcccatttccttgtctaaagatctttttttaagtgttctgtggctgatttactaacagtaactgccattttttgtctgtgataacagagtgatttgtaaaacagtggttgttttttcattgtgttttcttcgtggattgttttttctgcgggtcatattcataccttctgatgaagttgtacaacaccagcaacattataatggccctgtagctctgaatgctatttgtgtaactgaaaggttgcactctagggtgaaccaagctataaaagcccatgcttaaataaaaattatgtccaaaagccattgaa

SEQ ID NO: 3612 - DNA, 11571 bp, Homo sapiens
  source 1..11571: mol_type = genomic DNA
ctcggcgggggcccgctcccaggcccgctcccgagcccgttccgctcccgtccgccttcttctcgccttctctccgcgtggctcctccgtcccggcgtctccaaaactgaatgagcgagcggcgcgtagggcgcgcggcggcggcggcggcggcggcggcatggagcgcagtggctgggcccggcagactttcctcctagcgctgttgctgggggcgacgctgagggcgcgcgcggcggctggctattacccccgcttttcgcccttctttttcctgtgcacccaccacggggagctggaaggggatggggagcagggcgaggtgctcatttccctgcatattgcgggcaaccccacctactacgttccgggacaagaataccatgtgacaatttcaacaagcaccttttttgacggcttgctggtgacaggactatacacatctacaagtgttcaggcatcacagagcattggaggttccagtgctttcggatttgggatcatgtctgaccaccagtttggtaaccagtttatgtgcagtgtggtagcctctcacgtgagtcacctgcccacaaccaacctcagtttcatctggattgctccacctgcgggcacaggctgtgtgaatttcatggctacagcaacacaccggggccaggttattttcaaagatgctttagcccagcagttgtgtgaacaaggagctccaacagatgtcactgtgcacccacatctagctgaaatacatagtgacagcattatcctgagagatgactttgactcctaccaccaactgcaattaaatccaaatatatgggttgaatgtaacaactgtgagactggagaacagtgtggcgcgattatgcatggcaatgccgtcaccttctgtgaaccatatggcccacgagaactgattaccacaggccttaatacaacaacagcttctgtcctccaattttccattgggtcaggttcatgtcgctttagttattcagaccccagcatcatcgtgttatatgccaagaataactctgcggactggattcagctagagaaaattagagccccttccaatgtcagcacaatcatccatatcctctaccttcctgaggacgccaaaggggagaatgtccaatttcagtggaagcaggaaaatcttcgtgtaggtgaagtgtatgaagcctgctgggccttagataacatcttgatcatcaattcagctcacagacaagtcgttttagaagatagtctcgacccagtggacacaggcaactggcttttcttcccaggagctacagttaagcatagctgtcagtcagatgggaactccatttatttccatggaaatgaaggcagcgagttcaattttgccaccaccagggatgtagatctttccacagaagatattcaagagcaatggtcagaagaatttgagagccagcctacaggatgggatgtcttgggagctgtcattggtacagaatgtggaacgatagaatcaggcttatcaatggtcttcctcaaagatggagagaggaaattatgcactccatccatggacactaccggttatgggaacctgaggttttactttgtgatgggaggaatttgtgaccctggaaattctcatgaaaatgacataatcctgtatgcaaaaattgaaggaagaaaagagcatataacactggataccctttcctattcctcatataaggttccgtctttggtttctgtggtcatcaatcctgaacttcagactcctgctaccaaattttgtctcaggcaaaagaaccatcaaggacataataggaatgtctgggctgtagactttttccatgtcttgcctgttctcccttctacaatgtctcacatgatacagttttccatcaatctgggatgtggaacgcatcagcctggtaacagtgtcagcttggaattttctaccaaccatgggcgctcctggtccctccttcacactgaatgcttacctgagatctgtgctggaccccacctcccccacagcactgtctactcctctgaaaactacagtgggtggaaccgaataacaattccccttcctaacgcagcactaacccggaacaccaggattcgctggagacaaacaggaccaatccttggaaacatgtgggcaattgataatgtttatattggcccgtcatgtctcaaattctgttctggcagaggacagtgcactagacatggttgcaagtgtgaccctggattttctggcccagcttgtgagatggcatcccagacattcccaatgtttatttctgaaagctttggcagttccaggctctcctcttaccataacttttactctatccgtggtgctgaagtcagctttggttgtggtgtcttggccagtggtaaggccctggttttcaacaaagatgggcggcgtcagctaattacatctttccttgacagctcacaatccaggtttctccagttcacactgagactggggagcaaatctgttctgagcacgtgcagagcccctgatcagcctggtgaaggagttttgttgcattattcttatgataatgggataacttggaaactcctggagcattattcatatctcagctatcatgagcccagaataatctccgtagaactaccaggtgatgcaaagcagtttggaattcagttcagatggtggcaaccgtatcattcttcccagagagaagatgtatgggctattgatgagattatcatgacatctgtgcttttcaacagcattagtcttgactttaccaatcttgtggaggtcactcagtctctgggattctaccttggaaatgttcagccatactgtggccacgactggaccctttgttttacaggagattctaaacttgcctcaagtatgcgctatgtggaaacacaatcaatgcagataggagcatcctatatgattcagttcagtttggtgatgggatgtggccagaaatacaccccacacatggacaaccaggtgaagctggagtactcaaccaaccacggccttacctggcacctcgtccaagaagaatgccttccaagtatgccaagttgtcaggaatttacatcagcaagtatttaccatgccagtgagtttacacagtggaggagagtcatagtgcttcttccccagaaaacttggtccagtgctacccgtttccgctggagccagagctattacacagctcaagacgagtgggctttggacagcatttacattgggcagcagtgccccaacatgtgcagtgggcatggctcatgcgatcatggcatatgcaggtgtgaccaggggtaccaaggcactgaatgccacccagaagctgcccttccgtccacaattatgtcagattttgagaaccagaatggctgggagtctgactggcaagaagttattgggggagaaattgtaaaaccagaacaagggtgtggtgtcatctcttctggatcatctctgtacttcagcaaggctgggaaaagacagctggtgagttgggacctggatacttcttgggtggactttgtccagttctacatccagataggcggagagagtgcttcatgcaacaagcctgacagcagagaggagggcgtcctccttcagtacagcaacaatgggggcatccagtggcacctgctagcagagatgtacttttcagacttcagcaaacccagatttgtctatctggagcttccagctgctgccaagaccccttgcaccaggttccgctggtggcagcccgtgttctcaggggaggactatgaccagtgggcagtcgatgacatcatcattctgtccgagaagcagaagcagatcatcccagttatcaatccaactttacctcagaacttttatgagaagccagcttttgattaccctatgaatcagatgagtgtgtggttgatgttggctaatgaaggaatggttaaaaatgaaaccttctgtgctgccacaccatcagcaatgatatttggaaaatcagatggagatcgatttgcagtaactcgagatttgaccctgaaacctggatatgtgctacagttcaagctaaacataggttgtgccaatcaattcagcagtactgctccagttcttcttcagtactctcatgatgctggtatgtcctggtttctggtgaaagaaggctgttacccggcttctgcaggcaaaggatgcgaaggaaactccagagaactaagtgagcccaccatgtatcacacaggggactttgaagaatggacaagaatcaccattgttattccaaggtctcttgcatccagcaagaccagattccgatggatccaggagagcagctcacagaaaaacgtgcctccatttggtttagatggagtgtacatatccgagccttgtcccagttactgcagtggccatggggactgcatttcaggagtgtgtttctgtgacctgggatatactgctgcacaaggaacctgtgtgtcaaatgtccccaatcacaatgagatgttcgataggtttgaggggaagctcagccctctgtggtacaagataacaggtgcccaggttggaactggctgtggaacacttaacgatggcaaatctctctacttcaatggccctgggaaaagggaagcccggacggtccctctggacaccaggaatatcagacttgttcaattttatatacaaattggaagcaaaacttcaggcattacctgcatcaaaccaagaactagaaatgaagggcttattgttcagtattcaaatgacaatgggatactctggcatttgcttcgagagttggacttcatgtccttcctggaaccacagatcatttccattgacctgccacaggacgcgaagacacctgcaacggcatttcgatggtggcaaccgcaacatgggaagcattcagcccagtgggctttggatgatgttcttataggaatgaatgacagctctcaaactggatttcaagacaaatttgatggctctatagatttgcaagccaactggtatcgaatccaaggaggtcaagttgatattgactgtctctctatggatactgctctgatattcactgaaaacataggaaaacctcgttatgctgagacctgggattttcatgtgtcagcatctacctttttgcagtttgaaatgagcatgggctgtagcaagcccttcagcaactcccacagtgtacagctccagtattctctgaacaatggcaaggactggcatcttgtcaccgaagagtgtgttcctccaaccattggctgtctgcattacacggaaagttcaatttacacctcggaaagattccagaattggaagcggatcactgtctaccttccactctccaccatttctcccaggacccggttcagatggattcaggccaactacactgtgggggctgattcctgggcgattgataatgttgtactggcctcagggtgcccttggatgtgctcaggacgagggatttgtgatgctggacgctgtgtgtgtgaccggggctttggtggaccctattgtgttcctgttgttcctctgccctcgattcttaaagacgatttcaatgggaatttacatcctgacctttggcctgaagtgtatggtgcagagagggggaatctgaatggtgaaaccatcaaatctggaacatctctaatttttaaaggggaaggactaaggatgcttatttcaagagatctagattgtacaaatacaatgtatgtccagttttcacttagatttatagcaaaaagtaccccagagagatctcactctattctgttacaattctccatcagtggaggaatcacttggcacctgatggatgaattttactttcctcaaacaacgaatatacttttcatcaatgttcccttgccatacactgcccaaaccaatgctacaagattcagactctggcaaccttataataacggtaagaaagaagaaatctggattgttgatgacttcattatcgatggaaataatgtaaacaaccctgtgatgctcttggatacatttgattttgggcccagagaagacaattggtttttctatcctggtggtaacatcggtctttattgtccatattcttcaaagggggcacctgaagaagattcagctatggtgtttgtttcaaatgaagttggtgagcattccattaccacccgtgacctaaatgtgaatgagaacaccatcatacaatttgagatcaacgttggctgttcgactgatagctcatccgcggatccagtgagactggaattttcaagggacttcggggcgacctggcaccttctgctgcccctctgctaccacagcagcagccacgtcagctctttatgctccaccgagcaccaccccagcagcacctactacgcaggaaccatgcagggctggaggagggaggtcgtgcactttgggaagctgcacctttgtggatctgtccgtttcagatggtaccagggattttaccctgccggctctcagccagtgacatgggccattgataatgtctacatcggtccccagtgtgaggagatgtgtaatggacaggggagctgtatcaatggaaccaaatgtatatgtgaccctggctactcaggtccaacctgtaaaataagcaccaaaaatcctgattttctcaaagatgatttcgaaggtcagctagaatctgatagattcttattaatgagtggtgggaaaccatctcgaaagtgtggaatcctttctagtggaaacaacctctttttcaatgaagatggcttgcgcatgttgatgacacgagacctggatttatcacatgctagatttgtgcagttcttcatgagactgggatgtggtaaaggcgttcctgaccccaggagtcaacccgtgctcctacagtattctctcaacggtggcctctcgtggagtcttcttcaggagttccttttcagcaattccagcaatgtgggcaggtacattgccctggagatacccttgaaagcccgttctggttctactcgccttcgctggtggcaaccgtctgagaatgggcacttctacagcccctgggttatcgatcagattcttattggaggaaatatttctggtaatacggtcttggaagatgatttcacaacccttgatagtaggaaatggctgcttcacccaggaggcaccaagatgcccgtgtgtggctctactggtgatgccctggtcttcattgaaaaggccagcacccgttacgtggtcagcacagacgttgccgtgaatgaggattccttcctacagatagacttcgctgcctcctgctcagtcacagactcttgttatgcgattgaattggaatactcagtagatcttggattgtcatggcacccattggtaagggactgtctgcctaccaatgtggaatgcagtcgctatcatctgcaacggatcctggtgtcagacactttcaacaagtggactagaatcactctgcctctccctccttataccaggtcccaagccactcgtttccgttggcatcaaccagctccttttgacaagcagcagacatgggcaatagataatgtctatatcggggatggctgcatagacatgtgcagtggccatgggagatgcatccagggaaactgcgtctgtgatgaacagtggggtggcctgtactgtgatgaccccgagacctctcttccaacccaactcaaagacaacttcaatcgagctccatccagtcagaactggctgactgtgaacggagggaaattgagtacagtgtgtggagccgtggcgtcgggaatggctctccatttcagtgggggttgtagtcgattattagtcactgtggatctaaacctcactaatgctgagttcatccaattttacttcatgtatgggtgcctgattacaccaaacaaccgtaaccaaggtgttctcttggaatattctgtcaatggaggcattacctggaacctgctcatggagattttctatgaccagtacagtaagcccggatttgtgaatatccttctccctcctgatgctaaagagattgccactcgcttccgctggtggcagccaagacatgacggcctggatcagaacgactgggccattgacaatgtcctcatctcaggctctgctgaccaaaggaccgttatgctggacaccttcagcagcgccccagtaccccagcatgagcgctcccctgcagatgccggccctgtcgggaggatcgcctttgacatgtttatggaagacaaaacttcagtgaatgagcactggctattccatgatgattgtacagtagaaagattctgtgactcccctgatggtgtgatgctctgtggcagtcatgatggacgggaggtgtatgcagtgacccatgacctgactcccactgaaggctggattatgcaattcaagatctcagttggatgtaaggtgtctgaaaaaattgcccagaatcaaattcatgtgcagtattctactgacttcggtgtgagttggaattatctggtccctcagtgcttgcctgctgacccaaaatgctctggaagtgtttctcagccatctgtattctttccaactaaagggtggaaaaggatcacctacccacttcctgaaagcttagtgggaaatccggtaaggtttaggttctatcagaagtactcagacatgcagtgggcaatcgataatttctacctgggccctggatgcttggacaactgcaggggccatggagattgcttaagggaacagtgcatctgtgatccgggatactcagggccaaactgctacttgacccacactctgaagactttcctgaaggaacgctttgacagtgaagaaatcaaacctgacttatggatgtccttagaaggtggaagtacttgcactgagtgtggaattcttgccgaggacactgcactctattttgggggatccactgtgagacaagcggttacacaagatttggatcttcgaggtgcaaagttcctgcaatactgggggcgcatcggtagtgagaacaacatgacctcttgccatcgtcccatctgccggaaggaaggcgtgctgttggactactctaccgatggaggaattacctggactttgctccatgagatggattaccagaaatacatttctgttagacacgactacatacttcttcctgaagatgccctcaccaacacaactcgacttcgctggtggcagccttttgtgatcagcaatggaattgtggtctctggggtggagcgtgctcagtgggcactggacaacattttgattggtggagcagaaatcaatcccagccaattggtggacacttttgatgatgaaggcacttcccatgaagaaaactggagtttttaccctaatgctgtaaggacagcaggattttgtggcaatccatcctttcacctctattggccaaataaaaagaaggacaagactcacaatgctctctcctcccgagaactcattatacagccaggatacatgatgcagtttaaaattgtggtgggttgtgaagccacttcttgtggtgaccttcattccgtaatgctggaatacactaaggatgcaagatcggattcctggcagctcgtacagacccagtgccttccttcctcttctaacagcattggctgctcccctttccagttccatgaagccaccatctacaactctgtcaacagctcaagctggaaaagaatcaccatccagctgcctgaccatgtctcctctagtgcaacacagttccgctggatccagaagggagaagaaactgagaagcaaagctgggcaattgaccacgtgtacattggagaggcttgccccaagctctgcagcgggcacggatactgcacgaccggtgccatctgcatctgcgacgagagcttccaaggtgatgactgctctgttttcagtcacgaccttcccagttatattaaagataattttgagtccgcaagagtcaccgaggcaaactgggagaccattcaaggtggagtcataggaagtggctgtgggcagctggccccctacgcccatggagactcactgtactttaatggctgtcagatcaggcaagcagctaccaagcctctggatctcactcgagcaagcaaaatcatgtttgttttgcaaattgggagcatgtcgcagacggacagctgcaacagtgacctgagtggcccccacgctgtggacaaggcagtgctgctgcaatacagcgtcaacaacgggatcacctggcatgtcatcgcccagcaccagccaaaggacttcacacaagctcagagagtgtcttacaatgtccccctggaggcacggatgaaaggagtcttactgcgctggtggcaaccacgccacaatggaacaggtcatgatcaatgggctttggaccatgtggaggtcgtcctagtaagcactcgcaaacaaaattacatgatgaatttttcacgacaacatgggctcagacatttctacaacagaagacgaaggtcacttaggcgatacccatgaagaatcaaaaagtttattttttttcttccaacatgtgatgtgttgctctccattcttttaaatctcgcactacatctgatatcaggaaatatctgtgaaggacttggtgattacctgaaagcccttctcaagaccgagtgtacaccactttcccacactgtgaactaatgacaagtgacttatttgctcataagtaaatgtcttcatgttgatgtgtccgtgaaagttgtgatctgttgtaatatcagttacagtggcagtattgacaataagaaacagtttaacagaaaaatgaaatttaagcacaaaaaatttaagagattttatgtttaaaatggcatttagcacagtatttaacattcttggtcacaaagctatttaagtggactgtatttcggctatgtctcatgttttatatgattaaattatcattgtttgtcctttatgtattctcttctacaatacaacacattgaaactgtatttacttgttatgttgtaatattttgctgctgaatttggggctacttatattctgcagaaaattaattgaaatacctattcaagaagatagttgtaaagatattgtatctcctttaatatactccttaaaaatgtatgttggtttagcgttgttttgtggataagaaaaatgcttgaccctgaaatattttctactttaaattgtggatgaagaccctatctcccacaaataagttcccatttccttgtctaaagatctttttttaagtgttctgtggctgatttactaacagtaactgccattttttgtctgtgataacagagtgatttgtaaaacagtggttgttttttcattgtgttttcttcgtggattgttttttctgcgggtcatattcataccttctgatgaagttgtacaacaccagcaacattataatggccctgtagctctgaatgctatttgtgtaactgaaaggttgcactctagggtgaaccaagctataaaagcccatgcttaaataaaaattatgtccaaaagccattgaa

SEQ ID NO: 3613 - DNA, 11571 bp, Homo sapiens
  source 1..11571: mol_type = genomic DNA
ctcggcgggggcccgctcccaggcccgctcccgagcccgttccgctcccgtccgccttcttctcgccttctctccgcgtggctcctccgtcccggcgtctccaaaactgaatgagcgagcggcgcgtagggcgcgcggcggcggcggcggcggcggcggcatggagcgcagtggctgggcccggcagactttcctcctagcgctgttgctgggggcgacgctgagggcgcgcgcggcggctggctattacccccgcttttcgcccttctttttcctgtgcacccaccacggggagctggaaggggatggggagcagggcgaggtgctcatttccctgcatattgcgggcaaccccacctactacgttccgggacaagaataccatgtgacaatttcaacaagcaccttttttgacggcttgctggtgacaggactatacacatctacaagtgttcaggcatcacagagcattggaggttccagtgctttcggatttgggatcatgtctgaccaccagtttggtaaccagtttatgtgcagtgtggtagcctctcacgtgagtcacctgcccacaaccaacctcagtttcatctggattgctccacctgcgggcacaggctgtgtgaatttcatggctacagcaacacaccggggccaggttattttcaaagatgctttagcccagcagttgtgtgaacaaggagctccaacagatgtcactgtgcacccacatctagctgaaatacatagtgacagcattatcctgagagatgactttgactcctaccaccaactgcaattaaatccaaatatatgggttgaatgtaacaactgtgagactggagaacagtgtggcgcgattatgcatggcaatgccgtcaccttctgtgaaccatatggcccacgagaactgattaccacaggccttaatacaacaacagcttctgtcctccaattttccattgggtcaggttcatgtcgctttagttattcagaccccagcatcatcgtgttatatgccaagaataactctgcggactggattcagctagagaaaattagagccccttccaatgtcagcacaatcatccatatcctctaccttcctgaggacgccaaaggggagaatgtccaatttcagtggaagcaggaaaatcttcgtgtaggtgaagtgtatgaagcctgctgggccttagataacatcttgatcatcaattcagctcacagacaagtcgttttagaagatagtctcgacccagtggacacaggcaactggcttttcttcccaggagctacagttaagcatagctgtcagtcagatgggaactccatttatttccatggaaatgaaggcagcgagttcaattttgccaccaccagggatgtagatctttccacagaagatattcaagagcaatggtcagaagaatttgagagccagcctacaggatgggatgtcttgggagctgtcattggtacagaatgtggaacgatagaatcaggcttatcaatggtcttcctcaaagatggagagaggaaattatgcactccatccatggacactaccggttatgggaacctgaggttttactttgtgatgggaggaatttgtgaccctggaaattctcatgaaaatgacataatcctgtatgcaaaaattgaaggaagaaaagagcatataacactggataccctttcctattcctcatataaggttccgtctttggtttctgtggtcatcaatcctgaacttcagactcctgctaccaaattttgtctcaggcaaaagaaccatcaaggacataataggaatgtctgggctgtagactttttccatgtcttgcctgttctcccttctacaatgtctcacatgatacagttttccatcaatctgggatgtggaacgcatcagcctggtaacagtgtcagcttggaattttctaccaaccatgggcgctcctggtccctccttcacactgaatgcttacctgagatctgtgctggaccccacctcccccacagcactgtctactcctctgaaaactacagtgggtggaaccgaataacaattccccttcctaacgcagcactaacccggaacaccaggattcgctggagacaaacaggaccaatccttggaaacatgtgggcaattgataatgtttatattggcccgtcatgtctcaaattctgttctggcagaggacagtgcactagacatggttgcaagtgtgaccctggattttctggcccagcttgtgagatggcatcccagacattcccaatgtttatttctgaaagctttggcagttccaggctctcctcttaccataacttttactctatccgtggtgctgaagtcagctttggttgtggtgtcttggccagtggtaaggccctggttttcaacaaagatgggcggcgtcagctaattacatctttccttgacagctcacaatccaggtttctccagttcacactgagactggggagcaaatctgttctgagcacgtgcagagcccctgatcagcctggtgaaggagttttgttgcattattcttatgataatgggataacttggaaactcctggagcattattcatatctcagctatcatgagcccagaataatctccgtagaactaccaggtgatgcaaagcagtttggaattcagttcagatggtggcaaccgtatcattcttcccagagagaagatgtatgggctattgatgagattatcatgacatctgtgcttttcaacagcattagtcttgactttaccaatcttgtggaggtcactcagtctctgggattctaccttggaaatgttcagccatactgtggccacgactggaccctttgttttacaggagattctaaacttgcctcaagtatgcgctatgtggaaacacaatcaatgcagataggagcatcctatatgattcagttcagtttggtgatgggatgtggccagaaatacaccccacacatggacaaccaggtgaagctggagtactcaaccaaccacggccttacctggcacctcgtccaagaagaatgccttccaagtatgccaagttgtcaggaatttacatcagcaagtatttaccatgccagtgagtttacacagtggaggagagtcatagtgcttcttccccagaaaacttggtccagtgctacccgtttccgctggagccagagctattacacagctcaagacgagtgggctttggacagcatttacattgggcagcagtgccccaacatgtgcagtgggcatggctcatgcgatcatggcatatgcaggtgtgaccaggggtaccaaggcactgaatgccacccagaagctgcccttccgtccacaattatgtcagattttgagaaccagaatggctgggagtctgactggcaagaagttattgggggagaaattgtaaaaccagaacaagggtgtggtgtcatctcttctggatcatctctgtacttcagcaaggctgggaaaagacagctggtgagttgggacctggatacttcttgggtggactttgtccagttctacatccagataggcggagagagtgcttcatgcaacaagcctgacagcagagaggagggcgtcctccttcagtacagcaacaatgggggcatccagtggcacctgctagcagagatgtacttttcagacttcagcaaacccagatttgtctatctggagcttccagctgctgccaagaccccttgcaccaggttccgctggtggcagcccgtgttctcaggggaggactatgaccagtgggcagtcgatgacatcatcattctgtccgagaagcagaagcagatcatcccagttatcaatccaactttacctcagaacttttatgagaagccagcttttgattaccctatgaatcagatgagtgtgtggttgatgttggctaatgaaggaatggttaaaaatgaaaccttctgtgctgccacaccatcagcaatgatatttggaaaatcagatggagatcgatttgcagtaactcgagatttgaccctgaaacctggatatgtgctacagttcaagctaaacataggttgtgccaatcaattcagcagtactgctccagttcttcttcagtactctcatgatgctggtatgtcctggtttctggtgaaagaaggctgttacccggcttctgcaggcaaaggatgcgaaggaaactccagagaactaagtgagcccaccatgtatcacacaggggactttgaagaatggacaagaatcaccattgttattccaaggtctcttgcatccagcaagaccagattccgatggatccaggagagcagctcacagaaaaacgtgcctccatttggtttagatggagtgtacatatccgagccttgtcccagttactgcagtggccatggggactgcatttcaggagtgtgtttctgtgacctgggatatactgctgcacaaggaacctgtgtgtcaaatgtccccaatcacaatgagatgttcgataggtttgaggggaagctcagccctctgtggtacaagataacaggtgcccaggttggaactggctgtggaacacttaacgatggcaaatctctctacttcaatggccctgggaaaagggaagcccggacggtccctctggacaccaggaatatcagacttgttcaattttatatacaaattggaagcaaaacttcaggcattacctgcatcaaaccaagaactagaaatgaagggcttattgttcagtattcaaatgacaatgggatactctggcatttgcttcgagagttggacttcatgtccttcctggaaccacagatcatttccattgacctgccacaggacgcgaagacacctgcaacggcatttcgatggtggcaaccgcaacatgggaagcattcagcccagtgggctttggatgatgttcttataggaatgaatgacagctctcaaactggatttcaagacaaatttgatggctctatagatttgcaagccaactggtatcgaatccaaggaggtcaagttgatattgactgtctctctatggatactgctctgatattcactgaaaacataggaaaacctcgttatgctgagacctgggattttcatgtgtcagcatctacctttttgcagtttgaaatgagcatgggctgtagcaagcccttcagcaactcccacagtgtacagctccagtattctctgaacaatggcaaggactggcatcttgtcaccgaagagtgtgttcctccaaccattggctgtctgcattacacggaaagttcaatttacacctcggaaagattccagaattggaagcggatcactgtctaccttccactctccaccatttctcccaggacccggttcagatggattcaggccaactacactgtgggggctgattcctgggcgattgataatgttgtactggcctcagggtgcccttggatgtgctcaggacgagggatttgtgatgctggacgctgtgtgtgtgaccggggctttggtggaccctattgtgttcctgttgttcctctgccctcgattcttaaagacgatttcaatgggaatttacatcctgacctttggcctgaagtgtatggtgcagagagggggaatctgaatggtgaaaccatcaaatctggaacatctctaatttttaaaggggaaggactaaggatgcttatttcaagagatctagattgtacaaatacaatgtatgtccagttttcacttagatttatagcaaaaagtaccccagagagatctcactctattctgttacaattctccatcagtggaggaatcacttggcacctgatggatgaattttactttcctcaaacaacgaatatacttttcatcaatgttcccttgccatacactgcccaaaccaatgctacaagattcagactctggcaaccttataataacggtaagaaagaagaaatctggattgttgatgacttcattatcgatggaaataatgtaaacaaccctgtgatgctcttggatacatttgattttgggcccagagaagacaattggtttttctatcctggtggtaacatcggtctttattgtccatattcttcaaagggggcacctgaagaagattcagctatggtgtttgtttcaaatgaagttggtgagcattccattaccacccgtgacctaaatgtgaatgagaacaccatcatacaatttgagatcaacgttggctgttcgactgatagctcatccgcggatccagtgagactggaattttcaagggacttcggggcgacctggcaccttctgctgcccctctgctaccacagcagcagccacgtcagctctttatgctccaccgagcaccaccccagcagcacctactacgcaggaaccatgcagggctggaggagggaggtcgtgcactttgggaagctgcacctttgtggatctgtccgtttcagatggtaccagggattttaccctgccggctctcagccagtgacatgggccattgataatgtctacatcggtccccagtgtgaggagatgtgtaatggacaggggagctgtatcaatggaaccaaatgtatatgtgaccctggctactcaggtccaacctgtaaaataagcaccaaaaatcctgattttctcaaagatgatttcgaaggtcagctagaatctgatagattcttattaatgagtggtgggaaaccatctcgaaagtgtggaatcctttctagtggaaacaacctctttttcaatgaagatggcttgcgcatgttgatgacacgagacctggatttatcacatgctagatttgtgcagttcttcatgagactgggatgtggtaaaggcgttcctgaccccaggagtcaacccgtgctcctacagtattctctcaacggtggcctctcgtggagtcttcttcaggagttccttttcagcaattccagcaatgtgggcaggtacattgccctggagatacccttgaaagcccgttctggttctactcgccttcgctggtggcaaccgtctgagaatgggcacttctacagcccctgggttatcgatcagattcttattggaggaaatatttctggtaatacggtcttggaagatgatttcacaacccttgatagtaggaaatggctgcttcacccaggaggcaccaagatgcccgtgtgtggctctactggtgatgccctggtcttcattgaaaaggccagcacccgttacgtggtcagcacagacgttgccgtgaatgaggattccttcctacagatagacttcgctgcctcctgctcagtcacagactcttgttatgcgattgaattggaatactcagtagatcttggattgtcatggcacccattggtaagggactgtctgcctaccaatgtggaatgcagtcgctatcatctgcaacggatcctggtgtcagacactttcaacaagtggactagaatcactctgcctctccctccttataccaggtcccaagccactcgtttccgttggcatcaaccagctccttttgacaagcagcagacatgggcaatagataatgtctatatcggggatggctgcatagacatgtgcagtggccatgggagatgcatccagggaaactgcgtctgtgatgaacagtggggtggcctgtactgtgatgaccccgagacctctcttccaacccaactcaaagacaacttcaatcgagctccatccagtcagaactggctgactgtgaacggagggaaattgagtacagtgtgtggagccgtggcgtcgggaatggctctccatttcagtgggggttgtagtcgattattagtcactgtggatctaaacctcactaatgctgagttcatccaattttacttcatgtatgggtgcctgattacaccaaacaaccgtaaccaaggtgttctcttggaatattctgtcaatggaggcattacctggaacctgctcatggagattttctatgaccagtacagtaagcccggatttgtgaatatccttctccctcctgatgctaaagagattgccactcgcttccgctggtggcagccaagacatgacggcctggatcagaacgactgggccattgacaatgtcctcatctcaggctctgctgaccaaaggaccgttatgctggacaccttcagcagcgccccagtaccccagcatgagcgctcccctgcagatgccggccctgtcgggaggatcgcctttgacatgtttatggaagacaaaacttcagtgaatgagcactggctattccatgatgattgtacagtagaaagattctgtgactcccctgatggtgtgatgctctgtggcagtcatgatggacgggaggtgtatgcagtgacccatgacctgactcccactgaaggctggattatgcaattcaagatctcagttggatgtaaggtgtctgaaaaaattgcccagaatcaaattcatgtgcagtattctactgacttcggtgtgagttggaattatctggtccctcagtgcttgcctgctgacccaaaatgctctggaagtgtttctcagccatctgtattctttccaactaaagggtggaaaaggatcacctacccacttcctgaaagcttagtgggaaatccggtaaggtttaggttctatcagaagtactcagacatgcagtgggcaatcgataatttctacctgggccctggatgcttggacaactgcaggggccatggagattgcttaagggaacagtgcatctgtgatccgggatactcagggccaaactgctacttgacccacactctgaagactttcctgaaggaacgctttgacagtgaagaaatcaaacctgacttatggatgtccttagaaggtggaagtacttgcactgagtgtggaattcttgccgaggacactgcactctattttgggggatccactgtgagacaagcggttacacaagatttggatcttcgaggtgcaaagttcctgcaatactgggggcgcatcggtagtgagaacaacatgacctcttgccatcgtcccatctgccggaaggaaggcgtgctgttggactactctaccgatggaggaattacctggactttgctccatgagatggattaccagaaatacatttctgttagacacgactacatacttcttcctgaagatgccctcaccaacacaactcgacttcgctggtggcagccttttgtgatcagcaatggaattgtggtctctggggtggagcgtgctcagtgggcactggacaacattttgattggtggagcagaaatcaatcccagccaattggtggacacttttgatgatgaaggcacttcccatgaagaaaactggagtttttaccctaatgctgtaaggacagcaggattttgtggcaatccatcctttcacctctattggccaaataaaaagaaggacaagactcacaatgctctctcctcccgagaactcattatacagccaggatacatgatgcagtttaaaattgtggtgggttgtgaagccacttcttgtggtgaccttcattccgtaatgctggaatacactaaggatgcaagatcggattcctggcagctcgtacagacccagtgccttccttcctcttctaacagcattggctgctcccctttccagttccatgaagccaccatctacaactctgtcaacagctcaagctggaaaagaatcaccatccagctgcctgaccatgtctcctctagtgcaacacagttccgctggatccagaagggagaagaaactgagaagcaaagctgggcaattgaccacgtgtacattggagaggcttgccccaagctctgcagcgggcacggatactgcacgaccggtgccatctgcatctgcgacgagagcttccaaggtgatgactgctctgttttcagtcacgaccttcccagttatattaaagataattttgagtccgcaagagtcaccgaggcaaactgggagaccattcaaggtggagtcataggaagtggctgtgggcagctggccccctacgcccatggagactcactgtactttaatggctgtcagatcaggcaagcagctaccaagcctctggatctcactcgagcaagcaaaatcatgtttgttttgcaaattgggagcatgtcgcagacggacagctgcaacagtgacctgagtggcccccacgctgtggacaaggcagtgctgctgcaatacagcgtcaacaacgggatcacctggcatgtcatcgcccagcaccagccaaaggacttcacacaagctcagagagtgtcttacaatgtccccctggaggcacggatgaaaggagtcttactgcgctggtggcaaccacgccacaatggaacaggtcatgatcaatgggctttggaccatgtggaggtcgtcctgtgaagcactcgcaaacaaaattacatgatgaatttttcacgacaacatgggctcagacatttctacaacagaagacgaaggtcacttaggcgatacccatgaagaatcaaaaagtttattttttttcttccaacatgtgatgtgttgctctccattcttttaaatctcgcactacatctgatatcaggaaatatctgtgaaggacttggtgattacctgaaagcccttctcaagaccgagtgtacaccactttcccacactgtgaactaatgacaagtgacttatttgctcataagtaaatgtcttcatgttgatgtgtccgtgaaagttgtgatctgttgtaatatcagttacagtggcagtattgacaataagaaacagtttaacagaaaaatgaaatttaagcacaaaaaatttaagagattttatgtttaaaatggcatttagcacagtatttaacattcttggtcacaaagctatttaagtggactgtatttcggctatgtctcatgttttatatgattaaattatcattgtttgtcctttatgtattctcttctacaatacaacacattgaaactgtatttacttgttatgttgtaatattttgctgctgaatttggggctacttatattctgcagaaaattaattgaaatacctattcaagaagatagttgtaaagatattgtatctcctttaatatactccttaaaaatgtatgttggtttagcgttgttttgtggataagaaaaatgcttgaccctgaaatattttctactttaaattgtggatgaagaccctatctcccacaaataagttcccatttccttgtctaaagatctttttttaagtgttctgtggctgatttactaacagtaactgccattttttgtctgtgataacagagtgatttgtaaaacagtggttgttttttcattgtgttttcttcgtggattgttttttctgcgggtcatattcataccttctgatgaagttgtacaacaccagcaacattataatggccctgtagctctgaatgctatttgtgtaactgaaaggttgcactctagggtgaaccaagctataaaagcccatgcttaaataaaaattatgtccaaaagccattgaa

SEQ ID NO: 3614 - DNA, 1863 bp, Homo sapiens
  source 1..1863: mol_type = genomic DNA
gccggagttggttgggtcttcagacaccagctgaatgcttagggattctttcatttcctaaagtgcttacaaaattatgaaaaagcacgactttgctgaaaacctgccttcatctttactaatcatcatactagtcatctttactctcagtggctcaaaatttgggcggggaactggactcactcagccttctcaacgcacgtctgctcggagatcatttgggagatccaagagattcagtatcactcgctcccttgatgatcttgagtctgcaactgtgtctgatggcgagttgacgggcgccgacctgaaggactgcgtcagcaacaacagcctgagcagcaatgccagcctccccagcgtgcagagctgccggcgcctgcgtgagaggagggtcgccagctgggccgtgtcctttgagcgcctgctgcaggaccccgtcggtgtccgctacttctctgattttctaaggaaagaattcagtgaagaaaacattttattctggcaggcctgtgaatattttaatcatgttcctgcacatgacaaaaaggagctttcctacagggcccgggagattttcagtaagtttctctgcagcaaagccaccaccccggtcaacatcgacagccaggcccagctagcagacgacgtcctccgcgcacctcacccagacatgttcaaggagcagcagctgcagatcttcaatctcatgaagtttgatagctacactcgctttctgaagtccccgctgtaccaggaatgcatcctggcggaagtggagggccgtgcactcccggactcgcagcaggtccccagcagcccggcttccaagcacagcctcggttcagaccactccagtgtgtccacgccaaaaaagttaagtggaaaatcaaaatccggccgatccctgaatgaagagctgggggatgaggacagcgagaagaagcggaaaggcgcgtttttctcgtggtcgcggaccaggagcaccgggaggtcccagaaaaagagggagcacggggaccacgcagacgacgccctgcatgccaatggaggcctgtgtcgccgagagtcgcagggctctgtgtcctctgcggggagcctggacctgtcggaggcctgcaggactttggcacccgagaaggacaaggccaccaagcactgctgcattcatctcccggatgggacatcctgcgtggtggctgtcaaggcgggcttctccatcaaagacatcctgtccggactctgtgagcggcatggcatcaacggggcggccgcggacctcttcctggtgggcggggacaagcctctggtgctgcaccaagacagtagcatcttggagtcaagggacctgcgcctagaaaagcgcaccttgtttcggctggatcttgttccgattaaccggtcagtgggactcaaggccaagcccaccaagcccgtcacggaggtgctgcggcccgtggtggccagatacggcctggacctcagtggcctgctggtgaggctgagtggagagaaggagcccctggaccttggcgcccctatatcgagtctggacggacagcgggttgtcttggaggagaaggatccttccagaggaaaggcatccgcagataaacagaaaggtgtgccagtgaaacagaacacagctgtaaattccagctccagaaaccactcggctacgagttttttgagcttatttccaaagctcagagcaacagagcagatgaccaacgtgggctgctaaggaaggaagacctggtgttgccagagttcctccgtttacctcctggttccacagaactcaccctccccactccagctgctgtggccaagggctttagcaagagaagcgccacaggcaac

SEQ ID NO: 3615 - DNA, 6240 bp, Homo sapiens
  source 1..6240: mol_type = genomic DNA
atttatattcattttttactcttttccatcaaaacataattttactaagtacgcatgttctgtgtccgtgttttgtcatcactgaagccacttttggagtcacctagtaatagcctttccactctatctagttctgtagcttttatgtgtgtaaattacttcaaatctgtttatgatcctattgctggaaactttatcccaagacacaaaaatcttttctattagaagttattaactttaaaacaattatttattttattttattttattttttgagacagagtctcgctttgtcacccaggctggagtgcagtggcacgatctcggctcactgcaagctccacctcccgagttcatgccattctcctgcctcagcctcccgagtagctgggactacgggcgtccgccaccatgcccagctaattttttttgtatttttggtagagacaaggtttcaccgtgttagccaggatggtcttgatctcctgacctcgtggtccacctgcctcggcctcccaaagcgctgggattataggcgtgagccaccgcacctggcctaaaacaattatttctttaaaaaaacataccctctattctattttgtgtcttcacaacacaatcacttactgtattgctttttaaagtgatctttaaagagtcttgcagaagagactacacagcaggcccgagaccatcctgagaggcctgtgtgcaaggctggccccccgctggtgtcaggacggtgcccaccaccctcaatgaagaggggctccctgtgcttagctgcttgtgtggggaacaagggcactgtttgaagaagcaaacatggtagcatcaagcattccttgaaatatggctccaagggaacaatgagacgtgctcttggtcttggaagctcatcagaatgtttagagctggggaggcctccaaacgcccattgcctgggccgtcgcccccaagggtgcggagtgtggaggttgcccgggggagggccggctacggattcacgctttcgggacaggcaccctgtgtgctcagctgcgtcatgagagggagccctgcggatttcgtgggcctccgagctggagaccagatacttgctgtcaatgaaatcaacgtgaaaaaagcatctcatgaagatgtagtgaaattaattgggaagtgctctggtgtccttcacatggtgattgctgaaggcgtcggccgcttcgaatcctgttccagtgatgaagaagggggactctatgaaggaaaaggctggctgaagcccaagctggattctaaagcactaggtataaacagagcagagcgagtcgtggaggaaatgcagtctggtggaattttcaatatgatttttgaaaacccgagcctttgtgcgagcaattcagagcccttgaaattgaaacaaagatccctttcagagtcggccgcaactcgatttgatgttggacatgaaagtataaataatccaaatcccaacatgctttctaaggaggaaatatcaaaagttattcatgatgattcggttttcagcattggactagaaagtcatgacgattttgcattggatgcaagtattttaaacgtggcgatgatcgtgggctacttaggctccattgagcttccttccacgagctccaacctggagtccgacagcttgcaagccatccgcggctgcatgcggcgcctgcgggcagagcagaaaatccactcgctggtgaccatgaagatcatgcacgactgtgtgcagctgagcactgacaaggctggagtcgtggccgagtacccggccgagaagctggccttcagcgccgtgtgcccggacgaccggcgatttttcgggttggttaccatgcagacgaatgacgacgggagcctggcccaggaggaggagggcgccctgcggacttcctgccacgtgttcatggtggacccagacttgtttaatcacaagatccaccaaggcattgctcggcggtttgggtttgagtgcacggccgacccagacaccaatggctgtctggaattcccggcgtcctccctccccgtcctgcagttcatctctgtcctgtaccgagacatgggtgagctgattgagggcatgcgggcccgcgcctttctggacggggacgccgatgcccaccagaacaacagcaccagcagcaacagtgacagcggcattgggaacttccaccaggaggagaagagcaaccgggtccttgtggtggacctgggtgggagctcgagcagacacggccccggaggcagcgcgtgggacggtgtgggtgggaggggtgcccagccctggggtgctccctggactgggcccttctgtccggaccccgaagggagccccccatttgaggccgctcatcagactgacaggttctgggacctaaacaagcacctagggccagcctctcctgtggaggtgcccccagcttccttgaggagctcagtccccccttccaagaggggcaccgtgggtgctggctgtggtttcaaccagcgctggctcccggtccacgtgctccgggagtggcagtgcggacacaccagcgaccaggactcttacacagattccaccgatggctggtccagcatcaactgcggcacactgccccctcctatgagcaagatccccgcagaccgctacagggtggagggcagcttcgcgcagcccccgctgaatgccccgaagagggagtggtccaggaaggcctttggaatgcaaagcatttttggtccccatcgaaatgttcgaaagactaaggaagataaaaagggctcaaaatttgggcggggaactggactcactcagccttctcaacgcacgtctgctcggagatcatttgggagatccaagagattcagtatcactcgctcccttgatgatcttgagtctgcaactgtgtctgatggcgagttgacgggcgccgacctgaaggactgcgtcagcaacaacagcctgagcagcaatgccagcctccccagcgtgcagagctgccggcgcctgcgtgagaggagggtcgccagctgggccgtgtcctttgagcgcctgctgcaggaccccgtcggtgtccgctacttctctgattttctaaggaaagaattcagtgaagaaaacattttattctggcaggcctgtgaatattttaatcatgttcctgcacatgacaaaaaggagctttcctacagggcccgggagattttcagtaagtttctctgcagcaaagccaccaccccggtcaacatcgacagccaggcccagctagcagacgacgtcctccgcgcacctcacccagacatgttcaaggagcagcagctgcagatcttcaatctcatgaagtttgatagctacactcgctttctgaagtccccgctgtaccaggaatgcatcctggcggaagtggagggccgtgcactcccggactcgcagcaggtccccagcagcccggcttccaagcacagcctcggttcagaccactccagtgtgtccacgccaaaaaagttaagtggaaaatcaaaatccggccgatccctgaatgaagagctgggggatgaggacagcgagaagaagcggaaaggcgcgtttttctcgtggtcgcggaccaggagcaccgggaggtcccagaaaaagagggagcacggggaccacgcagacgacgccctgcatgccaatggaggcctgtgtcgccgagagtcgcagggctctgtgtcctctgcggggagcctggacctgtcggaggcctgcaggactttggcacccgagaaggacaaggccaccaagcactgctgcattcatctcccggatgggacatcctgcgtggtggctgtcaaggcgggcttctccatcaaagacatcctgtccggactctgtgagcggcatggcatcaacggggcggccgcggacctcttcctggtgggcggggacaagcctctggtgctgcaccaagacagtagcatcttggagtcaagggacctgcgcctagaaaagcgcaccttgtttcggctggatcttgttccgattaaccggtcagtgggactcaaggccaagcccaccaagcccgtcacggaggtgctgcggcccgtggtggccagatacggcctggacctcagtggcctgctggtgaggctgagtggagagaaggagcccctggaccttggcgcccctatatcgagtctggacggacagcgggttgtcttggaggagaaggatccttccagaggaaaggcatccgcagataaacagaaaggtgtgccagtgaaacagaacacagctgtaaattccagctccagaaaccactcggctacgggagaggaaagaacactaggcaagtctaattctattaaaataaaaggagaaaatggaaaaaatgctagggatccccggctttcaaagagagaagaatctattgcaaagattgggaaaaaaaaatatcagaaaattaatttggacgaagcagaggagttttttgagcttatttccaaagctcagagcaacagagcagatgaccaacgtgggctgctaaggaaggaagacctggtgttgccagagttcctccgtttacctcctggttccacagaactcaccctccccactccagctgctgtggccaagggctttagcaagagaagcgccacaggcaacggccgggagagcgcctcccagcctggcgagcagtgggagccagtccaggagagcagcgacagcccgtccaccagcccgggctcagcctccagcccccctggacctcctgggacgaccccccccgggcagaagtctcccagcgggcccttctgcactccccagtcccccgtctccctcgcgcaggagggcaccgcccagatctggaagaggcagtctcaggaagtggaggccgggggcatccagacggtggaggatgagcacgtggccgagctgaccctgatgggggagggggacatcagcagccccaacagcaccttgctgccgccgccctccaccccccaggaagtgccaggaccttccagaccaggtacctccaggttctgatccctccaccttggccccgtaagcgtggtctgctcagcttccagtcagaaaggacagtgggcccccggctgccactgtttgctggtggtctccgtgaccccctcctcacctgctggttgggggcttccttggccctcttggaaaggaggggctcgtgtggccccaggccagtgtctgtcaggatggtccccccgaggcgctctgggcaggcatcctggtgtcctgagaggctcttgcaggaatgatacgtggcagtgcctgcagcgaggtctgggaacaccctgggtgaggcctgggggtttccgaaaatggaggcattcctttccaaatctggacagcgatcgtttttagtgtttctgtctcaagactggaaaacaatagcatttgtcttgagtgaggaagtgaagcccgctgtgttcatagcaggagagggctcccagacacaggcccgtcctcggaagagccttgagagtgcagctcggacccaccggcggcccccgtagcaggtggtgtgggtgctcgggagtggaggtgacgtcagcagcgctctctgaccgcgggtgtcacgggcatttctcaaaggaagcaggggattcagtgagtgtgaaggtgaacaggatggcctggcagcagggatgtttccgtgagccacaaataccagaaactgaggcgaggctcccagcagccggtagggaaaggtgtttccaggggtccgagggccgtggcctgcgtggccatcccctggagagaggagccgctcagggtgcgcgtcatggagtgtgctcaggggtgcgtggacacctctgctgtggtttgctgctgggggcgatgggagcgcctctccgtcctgtgccctggtccaggatgctgacagcagtgagaggcctgccgtgaggtttggtcttgtcagacctgtagcctggacctcgccgggggaccagggagtgcacgtctgtagatctgtacatatctgggcctttggaggccacgtgtggcatgggaggggctacctggtccctttcacagccaggacacgcctggatgagaaagcctgaggtgcctggcatgcccaccggtgccactctgcagcctccacccctggcctgagtccccctccatccgtcttggtggacacctgtgtggctctcacctgcgttttgagtctgttcttccaggagtaataaattctggacatcatcactgga

SEQ ID NO: 3616 - DNA, 3010 bp, Homo sapiens
  source 1..3010: mol_type = genomic DNA
agaatagattcattggcagctgtaattaaggttgtgaactgcaccacgatgctaaaaaaaacaaattctctgcagctgttttactgactgagaaattacccctgtcggccgaagttttattcttctgatttggtagaggaaatagtttaaaaatgatctcacagcgtgatttatgtaaacggcgcttctttctttggatgagacaattgagatagagtctgaaaccctggcaagccacagcttcctgcagtgtcctgttgccatgggttacgaagggagcgagagggaacttcatcggaaatgcctttaaacttttctcacacgcacaagctgcggtgttgaatggtgtgtcttagacccgggtgcctagtgtggctcggtgccttacaatgaatttggggaaagagttgtcaaacgaaacccatgtttctaatgaccagcagtctgcaactgtgtctgatggcgagttgacgggcgccgacctgaaggactgcgtcagcaacaacagcctgagcagcaatgccagcctccccagcgtgcagagctgccggcgcctgcgtgagaggagggtcgccagctgggccgtgtcctttgagcgcctgctgcaggaccccgtcggtgtccgctacttctctgattttctaaggaaagaattcagtgaagaaaacattttattctggcaggcctgtgaatattttaatcatgttcctgcacatgacaaaaaggagctttcctacagggcccgggagattttcagtaagtttctctgcagcaaagccaccaccccggtcaacatcgacagccaggcccagctagcagacgacgtcctccgcgcacctcacccagacatgttcaaggagcagcagctgcagatcttcaatctcatgaagtttgatagctacactcgctttctgaagtccccgctgtaccaggaatgcatcctggcggaagtggagggccgtgcactcccggactcgcagcaggtccccagcagcccggcttccaagcacagcctcggttcagaccactccagtgtgtccacgccaaaaaagttaagtggaaaatcaaaatccggccgatccctgaatgaagagctgggggatgaggacagcgagaagaagcggaaaggcgcgtttttctcgtggtcgcggaccaggagcaccgggaggtcccagaaaaagagggagcacggggaccacgcagacgacgccctgcatgccaatggaggcctgtgtcgccgagagtcgcagggctctgtgtcctctgcggggagcctggacctgtcggaggcctgcaggactttggcacccgagaaggacaaggccaccaagcactgctgcattcatctcccggatgggacatcctgcgtggtggctgtcaaggcgggcttctccatcaaagacatcctgtccggactctgtgagcggcatggcatcaacggggcggccgcggacctcttcctggtgggcggggacaagcctctggtgctgcaccaagacagtagcatcttggagtcaagggacctgcgcctagaaaagcgcaccttgtttcggctggatcttgttccgattaaccggtcagtgggactcaaggccaagcccaccaagcccgtcacggaggtgctgcggcccgtggtggccagatacggcctggacctcagtggcctgctggtgaggctgagtggagagaaggagcccctggaccttggcgcccctatatcgagtctggacggacagcgggttgtcttggaggagaaggatccttccagaggaaaggcatccgcagataaacagaaaggtgtgccagtgaaacagaacacagctgtaaattccagctccagaaaccactcggctacgggagaggaaagaacactaggcaagtctaattctattaaaataaaaggagaaaatggaaaaaatgctagggatccccggctttcaaagagagaagaatctattgcaaagattgggaaaaaaaaatatcagaaaattaatttggacgaagcagaggagttttttgagcttatttccaaagctcagagcaacagagcagatgaccaacgtgggctgctaaggaaggaagacctggtgttgccagagttcctccgtttacctcctggttccacagaactcaccctccccactccagctgctgtggccaagggctttagcaagagaagcgccacaggcaacggccgggagagcgcctcccagcctggcgagcagtgggagccagtccaggagagcagcgacagcccgtccaccagcccgggctcagcctccagcccccctggacctcctgggacgaccccccccgggcagaagtctcccagcgggcccttctgcactccccagtcccccgtctccctcgcgcaggagggcaccgcccagatctggaagaggcagtctcaggaagtggaggccgggggcatccagacggtggaggatgagcacgtggccgagctgaccctgatgggggagggggacatcagcagccccaacagcaccttgctgccgccgccctccaccccccaggaagtgccaggaccttccagaccaggaagtgggacccatggcagccgagacctcccagtcaacagaatcatcgatgtggatcttgtaactggctcggcgcccgggcgggatggtggcatagcgggggcacaggctggccctgggaggtcgcaggccagtggtgggcctcctacatcagacctccctggcttgggccccgtcccgggtgagcctgctaagcccaagaccagcgctcaccacgccaccttcgtctgagctgccctggcctggccaactctcctgtggacatgtcggggtggggcagcccaggtggattctgtgggcctcaggggggccaccctggccaccacaccctcaggagcccagccaggagggcagggggtgacctcgctggaggcactggccccggacattcgccatgctggccatggggctccctggccctggcctcctgctgcccaataaagcatttctga

SEQ ID NO: 3617 - DNA, 5469 bp, Homo sapiens
  source 1..5469: mol_type = genomic DNA
atttatattcattttttactcttttccatcaaaacataattttactaagtacgcatgttctgtgtccgtgttttgtcatcactgaagccacttttggagtcacctagtaatagcctttccactctatctagttctgtagcttttatgtgtgtaaattacttcaaatctgtttatgatcctattgctggaaactttatcccaagacacaaaaatcttttctattagaagttattaactttaaaacaattatttattttattttattttattttttgagacagagtctcgctttgtcacccaggctggagtgcagtggcacgatctcggctcactgcaagctccacctcccgagttcatgccattctcctgcctcagcctcccgagtagctgggactacgggcgtccgccaccatgcccagctaattttttttgtatttttggtagagacaaggtttcaccgtgttagccaggatggtcttgatctcctgacctcgtggtccacctgcctcggcctcccaaagcgctgggattataggcgtgagccaccgcacctggcctaaaacaattatttctttaaaaaaacataccctctattctattttgtgtcttcacaacacaatcacttactgtattgctttttaaagtgatctttaaagagtcttgcagaagagactacacagcaggcccgagaccatcctgagaggcctgtgtgcaaggctggccccccgctggtgtcaggacggtgcccaccaccctcaatgaagaggggctccctgtgcttagctgcttgtgtggggaacaagggcactgtttgaagaagcaaacatggtagcatcaagcattccttgaaatatggctccaagggaacaatgagacgtgctcttggtcttggaagctcatcagaatgtttagagctggggaggcctccaaacgcccattgcctgggccgtcgcccccaagggtgcggagtgtggaggttgcccgggggagggccggctacggattcacgctttcgggacaggcaccctgtgtgctcagctgcgtcatgagagggagccctgcggatttcgtgggcctccgagctggagaccagatacttgctgtcaatgaaatcaacgtgaaaaaagcatctcatgaagatgtagtgaaattaattgggaagtgctctggtgtccttcacatggtgattgctgaaggcgtcggccgcttcgaatcctgttccagtgatgaagaagggggactctatgaaggaaaaggctggctgaagcccaagctggattctaaagcactaggtataaacagagcagagcgagtcgtggaggaaatgcagtctggtggaattttcaatatgatttttgaaaacccgagcctttgtgcgagcaattcagagcccttgaaattgaaacaaagatccctttcagagtcggccgcaactcgatttgatgttggacatgaaagtataaataatccaaatcccaacatgctttctaaggaggaaatatcaaaagttattcatgatgattcggttttcagcattggactagaaagtcatgacgattttgcattggatgcaagtattttaaacgtggcgatgatcgtgggctacttaggctccattgagcttccttccacgagctccaacctggagtccgacagcttgcaagccatccgcggctgcatgcggcgcctgcgggcagagcagaaaatccactcgctggtgaccatgaagatcatgcacgactgtgtgcagctgagcactgacaaggctggagtcgtggccgagtacccggccgagaagctggccttcagcgccgtgtgcccggacgaccggcgatttttcgggttggttaccatgcagacgaatgacgacgggagcctggcccaggaggaggagggcgccctgcggacttcctgccacgtgttcatggtggacccagacttgtttaatcacaagatccaccaaggcattgctcggcggtttgggtttgagtgcacggccgacccagacaccaatggctgtctggaattcccggcgtcctccctccccgtcctgcagttcatctctgtcctgtaccgagacatgggtgagctgattgagggcatgcgggcccgcgcctttctggacggggacgccgatgcccaccagaacaacagcaccagcagcaacagtgacagcggcattgggaacttccaccaggaggagaagagcaaccgggtccttgtggtggacctgggtgggagctcgagcagacacggccccggaggcagcgcgtgggacggtgtgggtgggaggggtgcccagccctggggtgctccctggactgggcccttctgtccggaccccgaagggagccccccatttgaggccgctcatcagactgacaggttctgggacctaaacaagcacctagggccagcctctcctgtggaggtgcccccagcttccttgaggagctcagtccccccttccaagaggggcaccgtgggtgctggctgtggtttcaaccagcgctggctcccggtccacgtgctccgggagtggcagtgcggacacaccagcgaccaggactcttacacagattccaccgatggctggtccagcatcaactgcggcacactgccccctcctatgagcaagatccccgcagaccgctacagggtggagggcagcttcgcgcagcccccgctgaatgccccgaagagggagtggtccaggaaggcctttggaatgcaaagcatttttggtccccatcgaaatgttcgaaagactaaggaagataaaaagggctcaaaatttgggcggggaactggactcactcagccttctcaacgcacgtctgctcggagatcatttgggagatccaagagattcagtatcactcgctcccttgatgatcttgagtctgcaactgtgtctgatggcgagttgacgggcgccgacctgaaggactgcgtcagcaacaacagcctgagcagcaatgccagcctccccagcgtgcagagctgccggcgcctgcgtgagaggagggtcgccagctgggccgtgtcctttgagcgcctgctgcaggaccccgtcggtgtccgctacttctctgattttctaaggaaagaattcagtgaagaaaacattttattctggcaggcctgtgaatattttaatcatgttcctgcacatgacaaaaaggagctttcctacagggcccgggagattttcagtaagtttctctgcagcaaagccaccaccccggtcaacatcgacagccaggcccagctagcagacgacgtcctccgcgcacctcacccagacatgttcaaggagcagcagctgcagatcttcaatctcatgaagtttgatagctacactcgctttctgaagtccccgctgtaccaggaatgcatcctggcggaagtggagggccgtgcactcccggactcgcagcaggtccccagcagcccggcttccaagcacagcctcggttcagaccactccagtgtgtccacgccaaaaaagttaagtggaaaatcaaaatccggccgatccctgaatgaagagctgggggatgaggacagcgagaagaagcggaaaggcgcgtttttctcgtggtcgcggaccaggagcaccgggaggtcccagaaaaagagggagcacggggaccacgcagacgacgccctgcatgccaatggaggcctgtgtcgccgagagtcgcagggctctgtgtcctctgcggggagcctggacctgtcggaggcctgcaggactttggcacccgagaaggacaaggccaccaagcactgctgcattcatctcccggatgggacatcctgcgtggtggctgtcaaggcgggcttctccatcaaagacatcctgtccggactctgtgagcggcatggcatcaacggggcggccgcggacctcttcctggtgggcggggacaagcctctggtgctgcaccaagacagtagcatcttggagtcaagggacctgcgcctagaaaagcgcaccttgtttcggctggatcttgttccgattaaccggtcagtgggactcaaggccaagcccaccaagcccgtcacggaggtgctgcggcccgtggtggccagatacggcctggacctcagtggcctgctggtgaggctgagtggagagaaggagcccctggaccttggcgcccctatatcgagtctggacggacagcgggttgtcttggaggagaaggatccttccagaggaaaggcatccgcagataaacagaaaggtgtgccagtgaaacagaacacagctgtaaattccagctccagaaaccactcggctacgggagaggaaagaacactaggcaagtctaattctattaaaataaaaggagaaaatggaaaaaatgctagggatccccggctttcaaagagagaagaatctattgcaaagattgggaaaaaaaaatatcagaaaattaatttggacgaagcagaggagttttttgagcttatttccaaagctcagagcaacagagcagatgaccaacgtgggctgctaaggaaggaagacctggtgttgccagagttcctccgtttacctcctggttccacagaactcaccctccccactccagctgctgtggccaagggctttagcaagagaagcgccacaggcaacggccgggagagcgcctcccagcctggcgagcagtgggagccagtccaggagagcagcgacagcccgtccaccagcccgggctcagcctccagcccccctggacctcctgggacgaccccccccgggcagaagtctcccagcgggcccttctgcactccccagtcccccgtctccctcgcgcaggagggcaccgcccagatctggaagaggcagtctcaggaagtggaggccgggggcatccagacggtggaggatgagcacgtggccgagctgaccctgatgggggagggggacatcagcagccccaacagcaccttgctgccgccgccctccaccccccaggaagtgccaggaccttccagaccaggaagtgggacccatggcagccgagacctcccagtcaacagaatcatcgatgtggatcttgtaactggctcggcgcccgggcgggatggtggcatagcgggggcacaggctggccctgggaggtcgcaggccagtggtgggcctcctacatcagacctccctggcttgggccccgtcccgggtgagcctgctaagcccaagaccagcgctcaccacgccaccttcgtctgagctgccctggcctggccaactctcctgtggacatgtcggggtggggcagcccaggtggattctgtgggcctcaggggggccaccctggccaccacaccctcaggagcccagccaggagggcagggggtgacctcgctggaggcactggccccggacattcgccatgctggccatggggctccctggccctggcctcctgctgcccaataaagcatttctga

SEQ ID NO: 3618 - DNA, 5512 bp, Homo sapiens
  source 1..5512: mol_type = genomic DNA
agggcactgtttgaagaagcaaacatggtagcatcaagcattccttgaaatatggctccaagggaacaatgagacgtgctcttggtcttggaagctcatcagaatgtttagagctggggaggcctccaaacgcccattgcctgggccgtcgcccccaagggtgcggagtgtggaggttgcccgggggagggccggctacggattcacgctttcgggacaggcaccctgtgtgctcagctgcgtcatgagagggagccctgcggatttcgtgggcctccgagctggagaccagatacttgctgtcaatgaaatcaacgtgaaaaaagcatctcatgaagatgtagtgaaattaattgggaagtgctctggtgtccttcacatggtgattgctgaaggcgtcggccgcttcgaatcctgttccagtgatgaagaagggggactctatgaaggaaaaggctggctgaagcccaagctggattctaaagcactaggtataaacagagcagagcgagtcgtggaggaaatgcagtctggtggaattttcaatatgatttttgaaaacccgagcctttgtgcgagcaattcagagcccttgaaattgaaacaaagatccctttcagagtcggccgcaactcgatttgatgttggacatgaaagtataaataatccaaatcccaacatgctttctaaggaggaaatatcaaaagttattcatgatgattcggttttcagcattggactagaaagtcatgacgattttgcattggatgcaagtattttaaacgtggcgatgatcgtgggctacttaggctccattgagcttccttccacgagctccaacctggagtccgacagcttgcaagccatccgcggctgcatgcggcgcctgcgggcagagcagaaaatccactcgctggtgaccatgaagatcatgcacgactgtgtgcagctgagcactgacaaggctggagtcgtggccgagtacccggccgagaagctggccttcagcgccgtgtgcccggacgaccggcgatttttcgggttggttaccatgcagacgaatgacgacgggagcctggcccaggaggaggagggcgccctgcggacttcctgccacgtgttcatggtggacccagacttgtttaatcacaagatccaccaaggcattgctcggcggtttgggtttgagtgcacggccgacccagacaccaatggctgtctggaattcccggcgtcctccctccccgtcctgcagttcatctctgtcctgtaccgagacatgggtgagctgattgagggcatgcgggcccgcgcctttctggacggggacgccgatgcccaccagaacaacagcaccagcagcaacagtgacagcggcattgggaacttccaccaggaggagaagagcaaccgggtccttgtggtggacctgggtgggagctcgagcagacacggccccggaggcagcgcgtgggacggtgtgggtgggaggggtgcccagccctggggtgctccctggactgggcccttctgtccggaccccgaagggagccccccatttgaggccgctcatcagactgacaggttctgggacctaaacaagcacctagggccagcctctcctgtggaggtgcccccagcttccttgaggagctcagtccccccttccaagaggggcaccgtgggtgctggctgtggtttcaaccagcgctggctcccggtccacgtgctccgggagtggcagtgcggacacaccagcgaccaggactcttacacagattccaccgatggctggtccagcatcaactgcggcacactgccccctcctatgagcaagatccccgcagaccgctacagggtggagggcagcttcgcgcagcccccgctgaatgccccgaagagggagtggtccaggaaggcctttggaatgcaaagcatttttggtccccatcgaaatgttcgaaagactaaggaagataaaaagggctcaaaatttgggcggggaactggactcactcagccttctcaacgcacgtctgctcggagatcatttgggagatccaagagattcagtatcactcgctcccttgatgatcttgagtctgcaactgtgtctgatggcgagttgacgggcgccgacctgaaggactgcgtcagcaacaacagcctgagcagcaatgccagcctccccagcgtgcagagctgccggcgcctgcgtgagaggagggtcgccagctgggccgtgtcctttgagcgcctgctgcaggaccccgtcggtgtccgctacttctctgattttctaaggaaagaattcagtgaagaaaacattttattctggcaggcctgtgaatattttaatcatgttcctgcacatgacaaaaaggagctttcctacagggcccgggagattttcagtaagtttctctgcagcaaagccaccaccccggtcaacatcgacagccaggcccagctagcagacgacgtcctccgcgcacctcacccagacatgttcaaggagcagcagctgcagatcttcaatctcatgaagtttgatagctacactcgctttctgaagtccccgctgtaccaggaatgcatcctggcggaagtggagggccgtgcactcccggactcgcagcaggtccccagcagcccggcttccaagcacagcctcggttcagaccactccagtgtgtccacgccaaaaaagttaagtggaaaatcaaaatccggccgatccctgaatgaagagctgggggatgaggacagcgagaagaagcggaaaggcgcgtttttctcgtggtcgcggaccaggagcaccgggaggtcccagaaaaagagggagcacggggaccacgcagacgacgccctgcatgccaatggaggcctgtgtcgccgagagtcgcagggctctgtgtcctctgcggggagcctggacctgtcggaggcctgcaggactttggcacccgagaaggacaaggccaccaagcactgctgcattcatctcccggatgggacatcctgcgtggtggctgtcaaggcgggcttctccatcaaagacatcctgtccggactctgtgagcggcatggcatcaacggggcggccgcggacctcttcctggtgggcggggacaagcctctggtgctgcaccaagacagtagcatcttggagtcaagggacctgcgcctagaaaagcgcaccttgtttcggctggatcttgttccgattaaccggtcagtgggactcaaggccaagcccaccaagcccgtcacggaggtgctgcggcccgtggtggccagatacggcctggacctcagtggcctgctggtgaggctgagtggagagaaggagcccctggaccttggcgcccctatatcgagtctggacggacagcgggttgtcttggaggagaaggatccttccagaggaaaggcatccgcagataaacagaaaggtgtgccagtgaaacagaacacagctgtaaattccagctccagaaaccactcggctacgggagaggaaagaacactaggcaagtctaattctattaaaataaaaggagaaaatggaaaaaatgctagggatccccggctttcaaagagagaagaatctattgcaaagattgggaaaaaaaaatatcagaaaattaatttggacgaagcagaggagttttttgagcttatttccaaagctcagagcaacagagcagatgaccaacgtgggctgctaaggaaggaagacctggtgttgccagagttcctccgtttacctcctggttccacagaactcaccctccccactccagctgctgtggccaagggctttagcaagagaagcgccacaggcaacggccgggagagcgcctcccagcctggcgagcagtgggagccagtccaggagagcagcgacagcccgtccaccagcccgggctcagcctccagcccccctggacctcctgggacgaccccccccgggcagaagtctcccagcgggcccttctgcactccccagtcccccgtctccctcgcgcaggagggcaccgcccagatctggaagaggcagtctcaggaagtggaggccgggggcatccagacggtggaggatgagcacgtggccgagctgaccctgatgggggagggggacatcagcagccccaacagcaccttgctgccgccgccctccaccccccaggaagtgccaggaccttccagaccaggtacctccaggttctgatccctccaccttggccccgtaagcgtggtctgctcagcttccagtcagaaaggacagtgggcccccggctgccactgtttgctggtggtctccgtgaccccctcctcacctgctggttgggggcttccttggccctcttggaaaggaggggctcgtgtggccccaggccagtgtctgtcaggatggtccccccgaggcgctctgggcaggcatcctggtgtcctgagaggctcttgcaggaatgatacgtggcagtgcctgcagcgaggtctgggaacaccctgggtgaggcctgggggtttccgaaaatggaggcattcctttccaaatctggacagcgatcgtttttagtgtttctgtctcaagactggaaaacaatagcatttgtcttgagtgaggaagtgaagcccgctgtgttcatagcaggagagggctcccagacacaggcccgtcctcggaagagccttgagagtgcagctcggacccaccggcggcccccgtagcaggtggtgtgggtgctcgggagtggaggtgacgtcagcagcgctctctgaccgcgggtgtcacgggcatttctcaaaggaagcaggggattcagtgagtgtgaaggtgaacaggatggcctggcagcagggatgtttccgtgagccacaaataccagaaactgaggcgaggctcccagcagccggtagggaaaggtgtttccaggggtccgagggccgtggcctgcgtggccatcccctggagagaggagccgctcagggtgcgcgtcatggagtgtgctcaggggtgcgtggacacctctgctgtggtttgctgctgggggcgatgggagcgcctctccgtcctgtgccctggtccaggatgctgacagcagtgagaggcctgccgtgaggtttggtcttgtcagacctgtagcctggacctcgccgggggaccagggagtgcacgtctgtagatctgtacatatctgggcctttggaggccacgtgtggcatgggaggggctacctggtccctttcacagccaggacacgcctggatgagaaagcctgaggtgcctggcatgcccaccggtgccactctgcagcctccacccctggcctgagtccccctccatccgtcttggtggacacctgtgtggctctcacctgcgttttgagtctgttcttccaggagtaataaattctggacatcatcactggactggcttacaacttttctttctcatttgaaactttgtttccactttagaaaataataaaagtattttaatcta

SEQ ID NO: 3619 - DNA, 2193 bp, Homo sapiens
  source 1..2193: mol_type = genomic DNA
gtgttcctcagatggacttttcgtttcctggagttttgtcatgaggcttaattaactcatgtctctctctcttttctttcagtctgcaactgtgtctgatggcgagttgacgggcgccgacctgaaggactgcgtcagcaacaacagcctgagcagcaatgccagcctccccagcgtgcagagctgccggcgcctgcgtgagaggagggtcgccagctgggccgtgtcctttgagcgcctgctgcaggaccccgtcggtgtccgctacttctctgattttctaaggaaagaattcagtgaagaaaacattttattctggcaggcctgtgaatattttaatcatgttcctgcacatgacaaaaaggagctttcctacagggcccgggagattttcagtaagtttctctgcagcaaagccaccaccccggtcaacatcgacagccaggcccagctagcagacgacgtcctccgcgcacctcacccagacatgttcaaggagcagcagctgcagatcttcaatctcatgaagtttgatagctacactcgctttctgaagtccccgctgtaccaggaatgcatcctggcggaagtggagggccgtgcactcccggactcgcagcaggtccccagcagcccggcttccaagcacagcctcggttcagaccactccagtgtgtccacgccaaaaaagttaagtggaaaatcaaaatccggccgatccctgaatgaagagctgggggatgaggacagcgagaagaagcggaaaggcgcgtttttctcgtggtcgcggaccaggagcaccgggaggtcccagaaaaagagggagcacggggaccacgcagacgacgccctgcatgccaatggaggcctgtgtcgccgagagtcgcagggctctgtgtcctctgcggggagcctggacctgtcggaggcctgcaggactttggcacccgagaaggacaaggccaccaagcactgctgcattcatctcccggatgggacatcctgcgtggtggctgtcaaggcgggcttctccatcaaagacatcctgtccggactctgtgagcggcatggcatcaacggggcggccgcggacctcttcctggtgggcggggacaagcctctggtgctgcaccaagacagtagcatcttggagtcaagggacctgcgcctagaaaagcgcaccttgtttcggctggatcttgttccgattaaccggtcagtgggactcaaggccaagcccaccaagcccgtcacggaggtgctgcggcccgtggtggccagatacggcctggacctcagtggcctgctggtgaggctgagtggagagaaggagcccctggaccttggcgcccctatatcgagtctggacggacagcgggttgtcttggaggagaaggatccttccagaggaaaggcatccgcagataaacagaaaggtgtgccagtgaaacagaacacagctgtaaattccagctccagaaaccactcggctacgagttttttgagcttatttccaaagctcagagcaacagagcagatgaccaacgtgggctgctaaggaaggaagacctggtgttgccagagttcctccgtttacctcctggttccacagaactcaccctccccactccagctgctgtggccaagggctttagcaagagaagcgccacaggcaacggccgggagagcgcctcccagcctggcgagcagtgggagccagtccaggagagcagcgacagcccgtccaccagcccgggctcagcctccagcccccctggacctcctgggacgaccccccccgggcagaagtctcccagcgggcccttctgcactccccagtcccccgtctccctcgcgcaggagggcaccgcccagatctggaagaggcagtctcaggaagtggaggccgggggcatccagacggtggaggatgagcacgtggccgagctgaccctgatgggggagggggacatcagcagccccaacagcaccttgctgccgccgccctccaccccccaggaagtgccaggaccttccagaccaggtacctccaggttctgatccctccaccttggccccgtaagcgtggtctgctcagcttccagtcagaaaggacagtgggcccccggctgccactgtttgctggtggtctccgtgaccccctcctcacctgctggttgggggcttccttgg

SEQ ID NO: 3620 - DNA, 2804 bp, Homo sapiens
  source 1..2804: mol_type = genomic DNA
aggtgtcctctgaggagagctgagcaggagaggagctgggactcgggaatggcagggcactgtttgaagaagcaaacatggtagcatcaagcattccttgaaatatggctccaagggaacaatgagacgtgctcttggtcttggaagctcatcagaatgtttagagctggggaggcctccaaacgcccattgcctgggccgtcgcccccaagggtgcggagtgtggaggttgcccgggggagggccggctacggattcacgctttcgggacaggcaccctgtgtgctcagctgcgtcatgagagggagccctgcggatttcgtgggcctccgagctggagaccagatacttgctgtcaatgaaatcaacgtgaaaaaagcatctcatgaagatgtagtgaaattaattgggaagtgctctggtgtccttcacatggtgattgctgaaggcgtcggccgcttcgaatcctgttccagtgatgaagaagggggactctatgaaggaaaaggctggctgaagcccaagctggattctaaagcactaggtataaacagagcagagcgagtcgtggaggaaatgcagtctggtggaattttcaatatgatttttgaaaacccgagcctttgtgcgagcaattcagagcccttgaaattgaaacaaagatccctttcagagtcggccgcaactcgatttgatgttggacatgaaagtataaataatccaaatcccaacatgctttctaaggaggaaatatcaaaagttattcatgatgattcggttttcagcattggactagaaagtcatgacgattttgcattggatgcaagtattttaaacgtggcgatgatcgtgggctacttaggctccattgagcttccttccacgagctccaacctggagtccgacagcttgcaagccatccgcggctgcatgcggcgcctgcgggcagagcagaaaatccactcgctggtgaccatgaagatcatgcacgactgtgtgcagctgagcactgacaaggctggagtcgtggccgagtacccggccgagaagctggccttcagcgccgtgtgcccggacgaccggcgatttttcgggttggttaccatgcagacgaatgacgacgggagcctggcccaggaggaggagggcgccctgcggacttcctgccacgtgttcatggtggacccagacttgtttaatcacaagatccaccaaggcattgctcggcggtttgggtttgagtgcacggccgacccagacaccaatggctgtctggaattcccggcgtcctccctccccgtcctgcagttcatctctgtcctgtaccgagacatgggtgagctgattgagggcatgcgggcccgcgcctttctggacggggacgccgatgcccaccagaacaacagcaccagcagcaacagtgacagcggcattgggaacttccaccaggaggagaagagcaaccgggtccttgtggtggacctgggtgggagctcgagcagacacggccccggaggcagcgcgtgggacggtgtgggtgggaggggtgcccagccctggggtgctccctggactgggcccttctgtccggaccccgaagggagccccccatttgaggccgctcatcagactgacaggttctgggacctaaacaagcacctagggccagcctctcctgtggaggtgcccccagcttccttgaggagctcagtccccccttccaagaggggcaccgtgggtgctggctgtggtttcaaccagcgctggctcccggtccacgtgctccgggagtggcagtgcggacacaccagcgaccaggactcttacacagattccaccgatggctggtccagcatcaactgcggcacactgccccctcctatgagcaagatccccgcagaccgctacagggtggagggcagcttcgcgcagcccccgctgaatgccccgaagagggagtggtccaggaaggcctttggaatgcaaagcatttttggtccccatcgaaatgttcgaaagactaaggaagataaaaagggctcaaaatttgggcggggaactggactcactcagccttctcaacgcacgtctgctcggagatcatttgggagatccaagagattcagtatcactcgctcccttgatgatcttgagagttgacgggcgccgacctgaaggactgcgtcagcaacaacagcctgagcagcaatgccagcctccccagcgtgcagagctgccggcgcctgcgtgagaggagggtcgccagctgggccgtgtcctttgagcgcctgctgcaggaccccgtcggtgtccgctacttctctgattttctaaggaaagaattcagtgaagaaaacattttattctggcaggcctgtgaatattttaatcatgttcctgcacatgacaaaaaggagctttcctacagggcccgggagattttcagtaagtttctctgcagcaaagccaccaccccggtcaacatcgacagccaggcccagctagcagacgacgtcctccgcgcacctcacccagacatgttcaaggagcagcagctgcagatcttcaatctcatgaagtttgatagctacactcgctttctgaagtccccgctgtaccaggaatgcatcctggcggaagtggagggccgtgcactcccggactcgcagcaggtccccagcagcccggcttccaagcacagcctcggttcagaccactccagtgtgtccacgccaaaaaagttaagtggaaaatcaaaatccggccgatccctgaatgaagagctgggggatgaggacagcgag

SEQ ID NO: 3621 - DNA, 1344 bp, Homo sapiens
  source 1..1344: mol_type = genomic DNA
aaacagccggggctccagcgggagaacgataatgcaaagtgctatgttcttggctgttcaacacgactgcagacccatggacaagagcgcaggcagtggccacaagagcgaggagaagcgagaaaagatgaaacggacccttttaaaagattggaagacccgtttgagctacttcttacaaaattcctctactcctgggaagcccaaaaccggcaaaaaaagcaaacagcaagctttcatcaagccttctcctgaggaagcacagctgtggtcagaagcatttgacgagctgctagccagcaaatatggtcttgctgcattcagggcttttttaaagtcggaattctgtgaagaaaatattgaattctggctggcctgtgaagacttcaaaaaaaccaaatcaccccaaaagctgtcctcaaaagcaaggaaaatatatactgacttcatagaaaaggaagctccaaaagagataaacatagattttcaaaccaaaactctgattgcccagaatatacaagaagctacaagtggctgctttacaactgcccagaaaagggtatacagcttgatggagaacaactcttatcctcgtttcttggagtcagaattctaccaggacttgtgtaaaaagccacaaatcaccacagagcctcatgctacatgaaatgtaaaagggagcccagaaatggaggacatttcattctttttcctgaggggaaggactgtgacctgccataaagactgaccttgaattcagcctgggtgttcaggaaacatcactcagaactattgattcaaagttgggtagtgaatcaggaagccagtaactgactaggagaagctggtatcagaacagcttccctcactgtgtacagaacgcaagaagggaataggtggtctgaacgtggtgtctcactctgaaaagcaggaatgtaagatgatgaaagagacaatgtaatactgttggtccaaaagcatttaaaatcaatagatctgggattatgtggccttaggtagctggttgtacatctttccctaaatcgatccatgttaccacatagtagttttagtttaggattcagtaacagtgaagtgtttactatgtgcaacggtattgaagttcttatgaccacagatcatcagtactgttgtctcatgtaatgctaaaactgaaatggtccgtgtttgcattgttaaaaatgatgtgtgaaatagaatgagtgctatggtgttgaaaactgcagtgtccgttatgagtgccaaaaatctgtcttgaaggcagctacactttgaagtggtctttgaatacttttaataaatttattttgataaataatattg

SEQ ID NO: 3622 - DNA, 5030 bp, Homo sapiens
  source 1..5030: mol_type = genomic DNA
agtcagccctgctgccagccagtgccgggtgctggggactcagggaggcccgccgggaccactgcgggacagtgagccgagcagaagctggaacgcaggagaggaaggagagggggcggtcagggctctcaggagccgggtcctgggcaaggcgcagccgttttcaaattttcaggaaagcggtcggctcacactcgagcagtaaaaagatgcctctggggaggaggcccgtgcagctctccgggcaatggtggtggctcggcctagagaggcggtagtggaacgcagaccctggtgggggaatgacatcaagggaggagacgggcgggaccccagatttctgcctgtgggcgatggaagtgaggttcactggccagcggagccggacacagaacgcgcaaaacgccgtgtaggcctggaggagccgaagagcaggcggaccccctccgcgggggaacagtttccgccgggagcacaaagcaacggaccggaagtggggggcggaagtgcagtgggctcagcgccgactgcgcgcctctgcccgcgaaaactctgagctggctgacagctggggacgggtggcggccctcgactggagtcggttgagttcctgagggaccccggttctggaaggttcgccgcggagacaagtgagcagtctgtgccatagggattctcgaagagaacagcgttgtgtcccagtgcacatgctcgcatcgcttaccaggagtgcccgagaccctaagatgttcggagtggttttttcgcacagacccgaatagcctgcccctcagccacgctctgtgcccttctgagaacaggctgatatgcccaagatagtcctgaatggtgtgaccgtagacttccctttccagccctacaaatgccaacaggagtacatgaccaaggtcctggaatgtctgcagcagaaggtgaatggcatcctggagagccctacgggtacagggaagacgctgtgcctgctgtgcaccacgctggcctggcgagaacacctccgagacggcatctctgcccgcaagattgccgagagggcgcaaggagagcttttcccggatcgggccttgtcatcctggggcaacgctgctgctgctgctggagaccccatagcttgctacacggacatcccaaagattatttacgcctccaggacccactcgcaactcacacaggtcatcaacgagcttcggaacacctcctaccggcctaaggtgtgtgtgctgggctcccgggagcagctgtgcatccatcctgaggtgaagaaacaagagagtaaccatctacagatccacttgtgccgtaagaaggtggcaagtcgctcctgtcatttctacaacaacgtagaagaaaaaagcctggagcaggagctggccagccccatcctggacattgaggacttggtcaagagcggaagcaagcacagggtgtgcccttactacctgtcccggaacctgaagcagcaagccgacatcatattcatgccgtacaattacttgttggatgccaagagccgcagagcacacaacattgacctgaaggggacagtcgtgatctttgacgaagctcacaacgtggagaagatgtgtgaagaatcggcatcctttgacctgactccccatgacctggcttcaggactggacgtcatagaccaggtgctggaggagcagaccaaggcagcgcagcagggtgagccccacccggagttcagcgcggactcccccagcccagggctgaacatggagctggaagacattgcaaagctgaagatgatcctgctgcgcctggagggggccatcgatgctgttgagctgcctggagacgacagcggtgtcaccaagccagggagctacatctttgagctgtttgctgaagcccagatcacgtttcagaccaagggctgcatcctggactcgctggaccagatcatccagcacctggcaggacgtgctggagtgttcaccaacacggccggactgcagaagctggcggacattatccagattgtgttcagtgtggacccctccgagggcagccctggttccccagcagggctgggggccttacagtcctataaggtgcacatccatcctgatgctggtcaccggaggacggctcagcggtctgatgcctggagcaccactgcagccagaaagcgagggaaggtgctgagctactggtgcttcagtcccggccacagcatgcacgagctggtccgccagggcgtccgctccctcatccttaccagcggcacgctggccccggtgtcctcctttgctctggagatgcagatccctttcccagtctgcctggagaacccacacatcatcgacaagcaccagatctgggtgggggtcgtccccagaggccccgatggagcccagttgagctccgcgtttgacagacggttttccgaggagtgcttatcctccctggggaaggctctgggcaacatcgcccgcgtggtgccctatgggctcctgatcttcttcccttcctatcctgtcatggagaagagcctggagttctggcgggcccgcgacttggccaggaagatggaggcgctgaagccgctgtttgtggagcccaggagcaaaggcagcttctccgagaccatcagtgcttactatgcaagggttgccgcccctgggtccaccggcgccaccttcctggcggtctgccggggcaaggccagcgaggggctggacttctcagacacgaatggccgtggtgtgattgtcacgggcctcccgtaccccccacgcatggacccccgggttgtcctcaagatgcagttcctggatgagatgaagggccagggtggggctgggggccagttcctctctgggcaggagtggtaccggcagcaggcgtccagggctgtgaaccaggccatcgggcgagtgatccggcaccgccaggactacggagctgtcttcctctgtgaccacaggttcgcctttgccgacgcaagagcccaactgccctcctgggtgcgtccccacgtcagggtgtatgacaactttggccatgtcatccgagacgtggcccagttcttccgtgttgccgagcgaactatgccagcgccggccccccgggctacagcacccagtgtgcgtggagaagatgctgtcagcgaggccaagtcgcctggccccttcttctccaccaggaaagctaagagtctggacctgcatgtccccagcctgaagcagaggtcctcagggtcaccagctgccggggaccccgagagtagcctgtgtgtggagtatgagcaggagccagttcctgcccggcagaggcccagggggctgctggccgccctggagcacagcgaacagcgggcggggagccctggcgaggagcaggcccacagctgctccaccctgtccctcctgtctgagaagaggccggcagaagaaccgcgaggagggaggaagaagatccggctggtcagccacccggaggagcccgtggctggtgcacagacggacagggccaagctcttcatggtggccgtgaagcaggagttgagccaagccaactttgccaccttcacccaggccctgcaggactacaagggttccgatgacttcgccgccctggccgcctgtctcggccccctctttgctgaggaccccaagaagcacaacctgctccaaggcttctaccagtttgtgcggccccaccataagcagcagtttgaggaggtctgtatccagctgacaggacgaggctgtggctatcggcctgagcacagcattccccgaaggcagcgggcacagccggtcctggaccccactggaagaacggcgccggatcccaagctgaccgtgtccacggctgcagcccagcagctggacccccaagagcacctgaaccagggcaggccccacctgtcgcccaggccacccccaacaggagaccctggcagccaaccacagtgggggtctggagtgcccagagcagggaagcagggccagcacgccgtgagcgcctacctggctgatgcccgcagggccctggggtccgcgggctgtagccaactcttggcagcgctgacagcctataagcaagacgacgacctcgacaaggtgctggctgtgttggccgccctgaccactgcaaagccagaggacttccccctgctgcacaggttcagcatgtttgtgcgtccacaccacaagcagcgcttctcacagacgtgcacagacctgaccggccggccctacccgggcatggagccaccgggaccccaggaggagaggcttgccgtgcctcctgtgcttacccacagggctccccaaccaggcccctcacggtccgagaagaccgggaagacccagagcaagatctcgtccttccttagacagaggccagcagggactgtgggggcgggcggtgaggatgcaggtcccagccagtcctcaggacctccccacgggcctgcagcatctgagtggggtgagcctcatgggagagacatcgctgggcagcaggccacgggagctccgggcgggcccctctcagcaggctgtgtgtgccagggctgtggggcagaggacgtggtgcccttccagtgccctgcctgtgacttccagcgctgccaagcctgctggcaacggcaccttcaggcctctaggatgtgcccagcctgccacaccgcctccaggaagcagagcgtcatgcaggtcttctggccagagccccacaaggaccatgagggcgctggaggggccaggcctgtcgctgctgtgcctggtgttggcgctgcctgccctgctgccggtgccggctgtacgcggagtggcagaaacacccacctacccctggcgggacgcagagacaggggagcggctggtgtgcgcccagtgccccccaggcacctttgtgcagcggccgtgccgccgagacagccccacgacgtgtggcccgtgtccaccgcgccactacacgcagttctggaactacctagagcgctgccgctactgcaacgtcctctgcggggagcgtga

SEQ ID NO: 3623 - DNA, 2273 bp, Homo sapiens
  source 1..2273: mol_type = genomic DNA
agcctctccggctactcggggtcagcgtggggcccctgcagcagatgagggtcttcacttcggtgaactgaacccttgaagcggctgtgggcagggcagcagggctatggccaccccccaggttcgcctttgccgacgcaagagcccaactgccctcctgggtgcgtccccacgtcagggtgtatgacaactttggccatgtcatccgagacgtggcccagttcttccgtgttgccgagcgaactatgccagcgccggccccccgggctacagcacccagtgtgcgtggagaagatgctgtcagcgaggccaagtcgcctggccccttcttctccaccaggaaagctaagagtctggacctgcatgtccccagcctgaagcagaggtcctcagggtcaccagctgccggggaccccgagagtagcctgtgtgtggagtatgagcaggagccagttcctgcccggcagaggcccagggggctgctggccgccctggagcacagcgaacagcgggcggggagccctggcgaggagcaggcccacagctgctccaccctgtccctcctgtctgagaagaggccggcagaagaaccgcgaggagggaggaagaagatccggctggtcagccacccggaggagcccgtggctggtgcacagacggacagggccaagctcttcatggtggccgtgaagcaggagttgagccaagccaactttgccaccttcacccaggccctgcaggactacaagggttccgatgacttcgccgccctggccgcctgtctcggccccctctttgctgaggaccccaagaagcacaacctgctccaaggcttctaccagtttgtgcggccccaccataagcagcagtttgaggaggtctgtatccagctgacaggacgaggctgtggctatcggcctgagcacagcattccccgaaggcagcgggcacagccggtcctggaccccactggaagaacggcgccggatcccaagctgaccgtgtccacggctgcagcccagcagctggacccccaagagcacctgaaccagggcaggccccacctgtcgcccaggccacccccaacaggagaccctggcagccaaccacagtgggggtctggagtgcccagagcagggaagcagggccagcacgccgtgagcgcctacctggctgatgcccgcagggccctggggtccgcgggctgtagccaactcttggcagcgctgacagcctataagcaagacgacgacctcgacaaggtgctggctgtgttggccgccctgaccactgcaaagccagaggacttccccctgctgcacaggttcagcatgtttgtgcgtccacaccacaagcagcgcttctcacagacgtgcacagacctgaccggccggccctacccgggcatggagccaccgggaccccaggaggagaggcttgccgtgcctcctgtgcttacccacagggctccccaaccaggcccctcacggtccgagaagaccgggaagacccagagcaagatctcgtccttccttagacagaggccagcagggactgtgggggcgggcggtgaggatgcaggtcccagccagtcctcaggacctccccacgggcctgcagcatctgagtggggtgagcctcatgggagagacatcgctgggcagcaggccacgggagctccgggcgggcccctctcagcaggctgtgtgtgccagggctgtggggcagaggacgtggtgcccttccagtgccctgcctgtgacttccagcgctgccaagcctgctggcaacggcaccttcaggcctctaggatgtgcccagcctgccacaccgcctccaggaagcagagcgtcatgcaggtcttctggccagagccccagtgagtgcccacggaggcccccagcacacccaacgtggcttgatcacctgcctgtccagctctggtgggccaagaacccacccaacagaataggccagcccatgccagccggcttggcccgctgcaggcctcaggcaggcggggcccatggttggtccctgcggtgggaccggatctgggcctgcctctgagaagccctgagctaccttggggtctggggtgggtttctgggaaagtgcttccccagaacttccctggctcctggcctgtgagtggtgccacaggggcaccccagctgagcccctcaccgggaaggaggagacccccgtgggcacgtgtccacttttaatcaggggacagggctctctaataaagctgctggcagtgcccagga

SEQ ID NO: 3624 - DNA, 4955 bp, Homo sapiens
  source 1..4955: mol_type = genomic DNA
agtcagccctgctgccagccagtgccgggtgctggggactcagggaggcccgccgggaccactgcgggacagtgagccgagcagaagctggaacgcaggagaggaaggagagggggcggtcagggctctcaggagccgggtcctgggcaaggcgcagccgttttcaaattttcaggaaagcggtcggctcacactcgagcagtaaaaagatgcctctggggaggaggcccgtgcagctctccgggcaatggtggtggctcggcctagagaggcggtagtggaacgcagaccctggtgggggaatgacatcaagggaggagacgggcgggaccccagatttctgcctgtgggcgatggaagtgaggttcactggccagcggagccggacacagaacgcgcaaaacgccgtgtaggcctggaggagccgaagagcaggcggaccccctccgcgggggaacagtttccgccgggagcacaaagcaacggaccggaagtggggggcggaagtgcagtgggctcagcgccgactgcgcgcctctgcccgcgaaaactctgagctggctgacagctggggacgggtggcggccctcgactggagtcggttgagttcctgagggaccccggttctggaaggttcgccgcggagacaagtgagcagtctgtgccatagggattctcgaagagaacagcgttgtgtcccagtgcacatgctcgcatcgcttaccaggagtgcccgagaccctaagatgttcggagtggttttttcgcacagacccgaatagcctgcccctcagccacgctctgtgcccttctgagaacaggctgatatgcccaagatagtcctgaatggtgtgaccgtagacttccctttccagccctacaaatgccaacaggagtacatgaccaaggtcctggaatgtctgcagcagaaggtgaatggcatcctggagagccctacgggtacagggaagacgctgtgcctgctgtgcaccacgctggcctggcgagaacacctccgagacggcatctctgcccgcaagattgccgagagggcgcaaggagagcttttcccggatcgggccttgtcatcctggggcaacgctgctgctgctgctggagaccccatagcttgctacacggacatcccaaagattatttacgcctccaggacccactcgcaactcacacaggtcatcaacgagcttcggaacacctcctaccggcctaaggtgtgtgtgctgggctcccgggagcagctgtgcatccatcctgaggtgaagaaacaagagagtaaccatctacagatccacttgtgccgtaagaaggtggcaagtcgctcctgtcatttctacaacaacgtagaagaaaaaagcctggagcaggagctggccagccccatcctggacattgaggacttggtcaagagcggaagcaagcacagggtgtgcccttactacctgtcccggaacctgaagcagcaagccgacatcatattcatgccgtacaattacttgttggatgccaagagccgcagagcacacaacattgacctgaaggggacagtcgtgatctttgacgaagctcacaacgtggagaagatgtgtgaagaatcggcatcctttgacctgactccccatgacctggcttcaggactggacgtcatagaccaggtgctggaggagcagaccaaggcagcgcagcagggtgagccccacccggagttcagcgcggactcccccagcccagggctgaacatggagctggaagacattgcaaagctgaagatgatcctgctgcgcctggagggggccatcgatgctgttgagctgcctggagacgacagcggtgtcaccaagccagggagctacatctttgagctgtttgctgaagcccagatcacgtttcagaccaagggctgcatcctggactcgctggaccagatcatccagcacctggcaggacgtgctggagtgttcaccaacacggccggactgcagaagctggcggacattatccagattgtgttcagtgtggacccctccgagggcagccctggttccccagcagggctgggggccttacagtcctataaggtgcacatccatcctgatgctggtcaccggaggacggctcagcggtctgatgcctggagcaccactgcagccagaaagcgagggaaggtgctgagctactggtgcttcagtcccggccacagcatgcacgagctggtccgccagggcgtccgctccctcatccttaccagcggcacgctggccccggtgtcctcctttgctctggagatgcagatccctttcccagtctgcctggagaacccacacatcatcgacaagcaccagatctgggtgggggtcgtccccagaggccccgatggagcccagttgagctccgcgtttgacagacggttttccgaggagtgcttatcctccctggggaaggctctgggcaacatcgcccgcgtggtgccctatgggctcctgatcttcttcccttcctatcctgtcatggagaagagcctggagttctggcgggcccgcgacttggccaggaagatggaggcgctgaagccgctgtttgtggagcccaggagcaaaggcagcttctccgagaccatcagtgcttactatgcaagggttgccgcccctgggtccaccggcgccaccttcctggcggtctgccggggcaaggccagcgaggggctggacttctcagacacgaatggccgtggtgtgattgtcacgggcctcccgtaccccccacgcatggacccccgggttgtcctcaagatgcagttcctggatgagatgaagggccagggtggggctgggggccagttcctctctgggcaggagtggtaccggcagcaggcgtccagggctgtgaaccaggccatcgggcgagtgatccggcaccgccaggactacggagctgtcttcctctgtgaccacaggttcgcctttgccgacgcaagagcccaactgccctcctgggtgcgtccccacgtcagggtgtatgacaactttggccatgtcatccgagacgtggcccagttcttccgtgttgccgagcgaactatgccagcgccggccccccgggctacagcacccagtgtgcgtggagaagatgctgtcagcgaggccaagtcgcctggccccttcttctccaccaggaaagctaagagtctggacctgcatgtccccagcctgaagcagaggtcctcagggtcaccagctgccggggaccccgagagtagcctgtgtgtggagtatgagcaggagccagttcctgcccggcagaggcccagggggctgctggccgccctggagcacagcgaacagcgggcggggagccctggcgaggagcaggcccacagctgctccaccctgtccctcctgtctgagaagaggccggcagaagaaccgcgaggagggaggaagaagatccggctggtcagccacccggaggagcccgtggctggtgcacagacggacagggccaagctcttcatggtggccgtgaagcaggagttgagccaagccaactttgccaccttcacccaggccctgcaggactacaagggttccgatgacttcgccgccctggccgcctgtctcggccccctctttgctgaggaccccaagaagcacaacctgctccaaggcttctaccagtttgtgcggccccaccataagcagcagtttgaggaggtctgtatccagctgacaggacgaggctgtggctatcggcctgagcacagcattccccgaaggcagcgggcacagccggtcctggaccccactggaagaacggcgccggatcccaagctgaccgtgtccacggctgcagcccagcagctggacccccaagagcacctgaaccagggcaggccccacctgtcgcccaggccacccccaacaggagaccctggcagccaaccacagtgggggtctggagtgcccagagcagggaagcagggccagcacgccgtgagcgcctacctggctgatgcccgcagggccctggggtccgcgggctgtagccaactcttggcagcgctgacagcctataagcaagacgacgacctcgacaaggtgctggctgtgttggccgccctgaccactgcaaagccagaggacttccccctgctgcacaggttcagcatgtttgtgcgtccacaccacaagcagcgcttctcacagacgtgcacagacctgaccggccggccctacccgggcatggagccaccgggaccccaggaggagaggcttgccgtgcctcctgtgcttacccacagggctccccaaccaggcccctcacggtccgagaagaccgggaagacccagagcaagatctcgtccttccttagacagaggccagcagggactgtgggggcgggcggtgaggatgcaggtcccagccagtcctcaggacctccccacgggcctgcagcatctgagtggggcctctaggatgtgcccagcctgccacaccgcctccaggaagcagagcgtcatgcaggtcttctggccagagccccagtgagtgcccacggaggcccccagcacacccaacgtggcttgatcacctgcctgtccagctctggtgggccaagaacccacccaacagaataggccagcccatgccagccggcttggcccgctgcaggcctcaggcaggcggggcccatggttggtccctgcggtgggaccggatctgggcctgcctctgagaagccctgagctaccttggggtctggggtgggtttctgggaaagtgcttccccagaacttccctggctcctggcctgtgagtggtgccacaggggcaccccagctgagcccctcaccgggaaggaggagacccccgtgggcacgtgtccacttttaatcaggggacagggctctctaataaagctgctggcagtgcccaggacggtg

SEQ ID NO: 3625 - DNA, 4273 bp, Homo sapiens
  source 1..4273: mol_type = genomic DNA
aacggaccggaagtggggggcggaagtgcagtgggctcagcgccgactgcgcgcctctgcccgcgaaaactctgagctggctgacagctggggacgggtggcggccctcgactggagtcggttgagttcctgagggaccccggttctggaaggttcgccgcggagacaagtgagcagtctgtgccatagggattctcgaagagaacagcgttgtgtcccagtgcacatgctcgcatcgcttaccaggagtgcccgagaccctaagatgttcggagtggttttttcgcacagacccgaatagcctgcccctcagccacgctctgtgcccttctgagaacaggctgatatgcccaagatagtcctgaatggtgtgaccgtagacttccctttccagccctacaaatgccaacaggagtacatgaccaaggtcctggaatgtctgcagcagaaggtgaatggcatcctggagagccctacgggtacagggaagacgctgtgcctgctgtgcaccacgctggcctggcgagaacacctccgagacggcatctctgcccgcaagattgccgagagggcgcaaggagagcttttcccggatcgggccttgtcatcctggggcaacgctgctgctgctgctggagaccccatagcttgctacacggacatcccaaagattatttacgcctccaggacccactcgcaactcacacaggtcatcaacgagcttcggaacacctcctaccgctcacgctgcagggccacgctgtgggtgttggagacagctcctcctcgacccacggtgctctctcccaccaggcctaaggtgtgtgtgctgggctcccgggagcagctgtgcatccatcctgaggtgaagaaacaagagagtaaccatctacagatccacttgtgccgtaagaaggtggcaagtcgctcctgtcatttctacaacaacgtagaagaaaaaagcctggagcaggagctggccagccccatcctggacattgaggacttggtcaagagcggaagcaagcacagggtgtgcccttactacctgtcccggaacctgaagcagcaagccgacatcatattcatgccgtacaattacttgttggatgccaagagccgcagagcacacaacattgacctgaaggggacagtcgtgatctttgacgaagctcacaacgtggagaagatgtgtgaagaatcggcatcctttgacctgactccccatgacctggcttcaggactggacgtcatagaccaggtgctggaggagcagaccaaggcagcgcagcagggtgagccccacccggagttcagcgcggactcccccagcccagggctgaacatggagctggaagacattgcaaagctgaagatgatcctgctgcgcctggagggggccatcgatgctgttgagctgcctggagacgacagcggtgtcaccaagccagggagctacatctttgagctgtttgctgaagcccagatcacgtttcagaccaagggctgcatcctggactcgctggaccagatcatccagcacctggcaggacgtgctggagtgttcaccaacacggccggactgcagaagctggcggacattatccagattgtgttcagtgtggacccctccgagggcagccctggttccccagcagggctgggggccttacagtcctataaggtgcacatccatcctgatgctggtcaccggaggacggctcagcggtctgatgcctggagcaccactgcagccagaaagcgagggaaggtgctgagctactggtgcttcagtcccggccacagcatgcacgagctggtccgccagggcgtccgctccctcatccttaccagcggcacgctggccccggtgtcctcctttgctctggagatgcagatccctttcccagtctgcctggagaacccacacatcatcgacaagcaccagatctgggtgggggtcgtccccagaggccccgatggagcccagttgagctccgcgtttgacagacggttttccgaggagtgcttatcctccctggggaaggctctgggcaacatcgcccgcgtggtgccctatgggctcctgatcttcttcccttcctatcctgtcatggagaagagcctggagttctggcgggcccgcgacttggccaggaagatggaggcgctgaagccgctgtttgtggagcccaggagcaaaggcagcttctccgagaccatcagtgcttactatgcaagggttgccgcccctgggtccaccggcgccaccttcctggcggtctgccggggcaaggccagcgaggggctggacttctcagacacgaatggccgtggtgtgattgtcacgggcctcccgtaccccccacgcatggacccccgggttgtcctcaagatgcagttcctggatgagatgaagggccagggtggggctgggggccagttcctctctgggcaggagtggtaccggcagcaggcgtccagggctgtgaaccaggccatcgggcgagtgatccggcaccgccaggactacggagctgtcttcctctgtgaccacaggttcgcctttgccgacgcaagagcccaactgccctcctgggtgcgtccccacgtcagggtgtatgacaactttggccatgtcatccgagacgtggcccagttcttccgtgttgccgagcgaactatgccagcgccggccccccgggctacagcacccagtgtgcgtggagaagatgctgtcagcgaggccaagtcgcctggccccttcttctccaccaggaaagctaagagtctggacctgcatgtccccagcctgaagcagaggtcctcagggtcaccagctgccggggaccccgagagtagcctgtgtgtggagtatgagcaggagccagttcctgcccggcagaggcccagggggctgctggccgccctggagcacagcgaacagcgggcggggagccctggcgaggagcaggcccacagctgctccaccctgtccctcctgtctgagaagaggccggcagaagaaccgcgaggagggaggaagaagatccggctggtcagccacccggaggagcccgtggctggtgcacagacggacagggccaagctcttcatggtggccgtgaagcaggagttgagccaagccaactttgccaccttcacccaggccctgcaggactacaagggttccgatgacttcgccgccctggccgcctgtctcggccccctctttgctgaggaccccaagaagcacaacctgctccaaggcttctaccagtttgtgcggccccaccataagcagcagtttgaggaggtctgtatccagctgacaggacgaggctgtggctatcggcctgagcacagcattccccgaaggcagcgggcacagccggtcctggaccccactggaagaacggcgccggatcccaagctgaccgtgtccacggctgcagcccagcagctggacccccaagagcacctgaaccagggcaggccccacctgtcgcccaggccacccccaacaggagaccctggcagccaaccacagtgggggtctggagtgcccagagcagggaagcagggccagcacgccgtgagcgcctacctggctgatgcccgcagggccctggggtccgcgggctgtagccaactcttggcagcgctgacagcctataagcaagacgacgacctcgacaaggtgctggctgtgttggccgccctgaccactgcaaagccagaggacttccccctgctgcacagcaacagcatgtttgtgcgtccacaccacaagcagcgcttctcacagacgtgcacagacctgaccggccggccctacccgggcatggagccaccgggaccccaggaggagaggcttgccgtgcctcctgtgcttacccacagggctccccaaccaggcccctcacggtccgagaagaccgggaagacccagagcaagatctcgtccttccttagacagaggccagcagggactgtgggggcgggcggtgaggatgcaggtcccagccagtcctcaggacctccccacgggcctgcagcatctgagtggggcctctaggatgtgcccagcctgccacaccgcctccaggaagcagagcgtcatgcaggtcttctggccagagccccagtgagtgcccacggaggcccccagcacacccaacgtggcttgatcacctgcctgtccagctctggtgggccaagaacccacccaacagaataggccagcccatgccagccggcttggcccgctgca

SEQ ID NO: 3626 - DNA, 4859 bp, Homo sapiens
  source 1..4859: mol_type = genomic DNA
cttgcacttcgcgggagaagttgttggcgcgaatggatcctgagcctcgataacagattcctcaaccggcccacccgccagccagccagcgccttcatcctggggctgcgatggacattcggaaattctttggagtaataccaagtggaaagaaacttgtaagtgaaacagtaaagaagaatgagaaaacaaagtctgatgaagaaactttaaaagcaaagaaaggaataaaggaaatcaaggtaaatagctcccgtaaagaggatgacttcaaacaaaagcaaccaagcaagaaaaagaggatcatctatgattcagattcagagtcagaggagacgttgcaggtaaaaaatgccaaaaagccaccagaaaaactgccagtatcttctaaacctggtaaaatttcacggcaggatcctgttacatacatttcagaaacagatgaagaagatgactttatgtgtaagaaggcggcctctaaatcaaaagagaatggaagatctacaaatagtcatcttggaacatcaaacatgaaaaagaatgaagaaaacactaagaccaagaataagcctttatcaccaataaaacttacacccacatcagtacttgattattttggaactggaagtgtccaaagatctaataagaagatggtggcaagcaaaagaaaagagctttcacaaaatacagatgagtctggattaaatgatgaagccatcgccaagcaattacagcttgatgaagatgcggagctggagaggcagttgcatgaagatgaagagtttgccagaacattagccatgttggatgaagaacccaagaccaaaaaggctcgaaaggacacagaagcgggagaaacgttttcatctgtccaagccaatttaagtaaagcagaaaaacataaatatcctcataaagtaaaaacagcacaagtttcagatgaaagaaagagctacagtcctaggaagcaaagtaaatatgaaagttcaaaagaatctcagcaacattccaagtcatcagctgacaaaataggagaagtctcttctcccaaggccagttctaagctggcaattatgaaaagaaaagaagagagctcttataaagaaatagagcctgtggcctcaaaaagaaaagaaaatgccattaaattgaaaggagagacaaaaactcctaagaaaaccaaaagttctccagctaaaaaagagtctgtaagtcctgaagattctgaaaagaaacgcactaattatcaagcttatcgaagctacttaaatcgagaaggtcccaaggctctgggctccaaagaaataccaaagggagctgaaaattgcttggaaggccttatatttgtaatcacaggcgtgctggagtctattgaacgagatgaggccaagtctctaattgaacgttatgggggaaaagtaacaggaaatgtcagcaagaaaacaaattatcttgtcatgggtcgtgatagtggacagtccaagagtgataaggccgcagccttggggacaaaaattattgatgaagatggcctgttgaatctgattcggactatgccaggcaagaaatccaagtatgaaatagcagttgaaactgagatgaagaaagagtccaaactggagagaacaccccaaaaaaatgtccaaggaaaaagaaaaattagtccatctaaaaaggaatcagaatctaaaaagagcaggccgacttccaaaagggacagtttggcaaagacaataaaaaaggaaacagatgtgttttggaaaagcctggatttcaaggagcaggtggctgaggagacaagtggtgacagcaaggctaggaatttggctgatgacagcagtgaaaacaaagtggaaaatttgctctgggtggataaatataagccaacctcgctcaagaccataattggacagcaaggtgaccagagctgtgccaacaaactcctacgctggctccgaaactggcaaaagagttcttccgaagataaaaaacacgcaaagtttggtaaattttccggcaaagatgatggctctagttttaaagcagcgttgctgtcaggccctcctggtgttggcaaaaccaccacagcttccctggtgtgtcaggagttgggatacagctacgtggaactgaatgcaagtgacacccggagtaagagcagtttgaaggcgattgttgctgagtcactgaacaataccagcatcaaaggcttttattcaaatggagcagcctcttcagtaagcacgaaacatgctctcatcatggatgaagtagatggcatggcaggcaatgaggataggggaggaattcaggaattaattggcctgataaaacatactaaaattcccattatttgtatgtgcaatgatagaaatcatcccaagattcgctctctggttcattattgttttgatcttcgttttcaaagacctcgggttgaacagattaagggtgctatgatgtctattgcatttaaagaaggtttaaagattccccctccagctatgaatgaaataattttgggagccaatcaagatatcagacaggttttacataatctgagtatgtggtgtgcacgaagtaaagcattaacctatgaccaggccaaagctgattctcacagagccaaaaaggatatcaaaatgggcccatttgatgttgcccggaaagtgtttgcagctggagaggagactgctcacatgtcacttgtggacaagtcagatctcttttttcatgattattcaatagcacccctcttcgtccaggaaaattacatacacgtgaagcctgtagcagcagggggtgacatgaaaaagcacctgatgcttttaagcagagcagcagacagcatatgcgatggtgacctagtggacagccagatccggagtaagcaaaactggagtcttctgcctgcgcaggccatttatgccagtgttcttcctggagagttgatgagggggtacatgacccagtttcccaccttcccaagctggctggggaagcactcgtctacaggcaaacatgatcgtattgttcaggacctggccttgcatatgagtctcagaacttactccagcaaaaggactgtaaacatggattatctgtcgcttctaagggatgcacttgtacagcccttgacctcacaaggagtagacggagtacaggatgttgttgcacttatggacacatattatttgatgaaagaagactttgagaatatcatggaaatcagcagctggggtggcaaacctagtcccttttcaaagctggatcccaaggtgaaagcagccttcacaagagcttacaataaggaagcccaccttactccatactcacttcaagctataaaggcatctagacacagcacaagcccatccctggattcggaatacaatgaagaattaaatgaagatgactctcaatctgatgagaaagaccaagatgctatagaaactgatgccatgatcaagaaaaagacaaaatcttcaaagccttcaaaaccagaaaaagataaggagcccagaaaaggaaaaggaaaaagttcgaagaaatgaaaccatttttcactagcgacagccactttttactctccctcctgaccagtccagctggtctagagaaagccttgttttttcccagagcaaccatgttttagcataatgggatgacctggtgtcccattataaataaagggtggtatggctagaagggtatgagcagtaggcttatgtacacctcttatagaggttgataggactgcttgggtcctccactgtcctctgtcaatctagttagacgtgcttctgaatgactgtagaattggaactagaaactacacctgggctttggagtcagattttagttaacaataatgagcctgggagcagtagtactaaggcgtcttttgtaggcttaagaatttatcctaatggcctttataggaccaatgctgattttttttaaaggcagttcctattatgtggtgaaattttgtaaataaatgattatacaaaacagtcaccacctagaactgggtattctttgtacattgtcagatatctttcaaagtataaattaggaataaaaatgttccacatgatatgtgtacaaattctttttaagattgtcatcttgtacagcaaaatattatgttggtatattacttccttattaatttgcaaatgattggattaaaaaagctcactgtattccttactaacctgttgtgtgaaacataacattggcagtcgaggagtcagaactcggattcccagcctcactccctctgtgtgtgttgaccacgtctctgctgtgaataggatttcatgcagtggtctgttatggggctttgcagcgtggggggctgcagaagattctcagacattcttatccttctggagtctcaacccatcaggttcagaccagtaggaaccaggctgggtcaggctcttaatttcactatggtgggggacaaaatgaacactggcttttgttcactttgcccctgagagatctagtcctgtcctgtgatggcttccacaaaccctgttggaagtttgggttattcctataactgtatgtgttgagtggccgtgaggctatggacctagcctggaatttagatgtctagctattttttaatcttgttggtaaatgctcagaggtctgtgctacctctgtgaggtatatactaaaatgaatgtaaaataaggatcgtattccctgctttaaggaactggtagtcttgtttgggtgatgagacaaagttcttgagacatttaaactgtatttaccagtgtgaaaaatgtcatttatggagattaattcattatggaaataaaacattgcctaagcccttg

SEQ ID NO: 3627 - DNA, 4886 bp, Homo sapiens
  source 1..4886: mol_type = genomic DNA
accgcgcgccactgtcttcgccttcttgcacttcgcgggagaagttgttggcgcgaatggatcctgagcctcgataacagattcctcaaccggcccacccgccagccagccagcgccttcatcctggggctgcgatggacattcggaaattctttggagtaataccaagtggaaagaaacttgtaagtgaaacagtaaagaagaatgagaaaacaaagtctgatgaagaaactttaaaagcaaagaaaggaataaaggaaatcaaggtaaatagctcccgtaaagaggatgacttcaaacaaaagcaaccaagcaagaaaaagaggatcatctatgattcagattcagagtcagaggagacgttgcaggtaaaaaatgccaaaaagccaccagaaaaactgccagtatcttctaaacctggtaaaatttcacggcaggatcctgttacatacatttcagaaacagatgaagaagatgactttatgtgtaagaaggcggcctctaaatcaaaagagaatggaagatctacaaatagtcatcttggaacatcaaacatgaaaaagaatgaagaaaacactaagaccaagaataagcctttatcaccaataaaacttacacccacatcagtacttgattattttggaactggaagtgtccaaagatctaataagaagatggtggcaagcaaaagaaaagagctttcacaaaatacagatgagtctggattaaatgatgaagccatcgccaagcaattacagcttgatgaagatgcggagctggagaggcagttgcatgaagatgaagagtttgccagaacattagccatgttggatgaagaacccaagaccaaaaaggctcgaaaggacacagaagcgggagaaacgttttcatctgtccaagccaatttaagtaaagcagaaaaacataaatatcctcataaagtaaaaacagcacaagtttcagatgaaagaaagagctacagtcctaggaagcaaagtaaatatgaaagttcaaaagaatctcagcaacattccaagtcatcagctgacaaaataggagaagtctcttctcccaaggccagttctaagctggcaattatgaaaagaaaagaagagagctcttataaagaaatagagcctgtggcctcaaaaagaaaagaaaatgccattaaattgaaaggagagacaaaaactcctaagaaaaccaaaagttctccagctaaaaaagagtctgtaagtcctgaagattctgaaaagaaacgcactaattatcaagcttatcgaagctacttaaatcgagaaggtcccaaggctctgggctccaaagaaataccaaagggagctgaaaattgcttggaaggccttatatttgtaatcacaggcgtgctggagtctattgaacgagatgaggccaagtctctaattgaacgttatgggggaaaagtaacaggaaatgtcagcaagaaaacaaattatcttgtcatgggtcgtgatagtggacagtccaagagtgataaggccgcagccttggggacaaaaattattgatgaagatggcctgttgaatctgattcggactatgccaggcaagaaatccaagtatgaaatagcagttgaaactgagatgaagaaagagtccaaactggagagaacaccccaaaaaaatgtccaaggaaaaagaaaaattagtccatctaaaaaggaatcagaatctaaaaagagcaggccgacttccaaaagggacagtttggcaaagacaataaaaaaggaaacagatgtgttttggaaaagcctggatttcaaggagcaggtggctgaggagacaagtggtgacagcaaggctaggaatttggctgatgacagcagtgaaaacaaagtggaaaatttgctctgggtggataaatataagccaacctcgctcaagaccataattggacagcaaggtgaccagagctgtgccaacaaactcctacgctggctccgaaactggcaaaagagttcttccgaagataaaaaacacgcagcaaagtttggtaaattttccggcaaagatgatggctctagttttaaagcagcgttgctgtcaggccctcctggtgttggcaaaaccaccacagcttccctggtgtgtcaggagttgggatacagctacgtggaactgaatgcaagtgacacccggagtaagagcagtttgaaggcgattgttgctgagtcactgaacaataccagcatcaaaggcttttattcaaatggagcagcctcttcagtaagcacgaaacatgctctcatcatggatgaagtagatggcatggcaggcaatgaggataggggaggaattcaggaattaattggcctgataaaacatactaaaattcccattatttgtatgtgcaatgatagaaatcatcccaagattcgctctctggttcattattgttttgatcttcgttttcaaagacctcgggttgaacagattaagggtgctatgatgtctattgcatttaaagaaggtttaaagattccccctccagctatgaatgaaataattttgggagccaatcaagatatcagacaggttttacataatctgagtatgtggtgtgcacgaagtaaagcattaacctatgaccaggccaaagctgattctcacagagccaaaaaggatatcaaaatgggcccatttgatgttgcccggaaagtgtttgcagctggagaggagactgctcacatgtcacttgtggacaagtcagatctcttttttcatgattattcaatagcacccctcttcgtccaggaaaattacatacacgtgaagcctgtagcagcagggggtgacatgaaaaagcacctgatgcttttaagcagagcagcagacagcatatgcgatggtgacctagtggacagccagatccggagtaagcaaaactggagtcttctgcctgcgcaggccatttatgccagtgttcttcctggagagttgatgagggggtacatgacccagtttcccaccttcccaagctggctggggaagcactcgtctacaggcaaacatgatcgtattgttcaggacctggccttgcatatgagtctcagaacttactccagcaaaaggactgtaaacatggattatctgtcgcttctaagggatgcacttgtacagcccttgacctcacaaggagtagacggagtacaggatgttgttgcacttatggacacatattatttgatgaaagaagactttgagaatatcatggaaatcagcagctggggtggcaaacctagtcccttttcaaagctggatcccaaggtgaaagcagccttcacaagagcttacaataaggaagcccaccttactccatactcacttcaagctataaaggcatctagacacagcacaagcccatccctggattcggaatacaatgaagaattaaatgaagatgactctcaatctgatgagaaagaccaagatgctatagaaactgatgccatgatcaagaaaaagacaaaatcttcaaagccttcaaaaccagaaaaagataaggagcccagaaaaggaaaaggaaaaagttcgaagaaatgaaaccatttttcactagcgacagccactttttactctccctcctgaccagtccagctggtctagagaaagccttgttttttcccagagcaaccatgttttagcataatgggatgacctggtgtcccattataaataaagggtggtatggctagaagggtatgagcagtaggcttatgtacacctcttatagaggttgataggactgcttgggtcctccactgtcctctgtcaatctagttagacgtgcttctgaatgactgtagaattggaactagaaactacacctgggctttggagtcagattttagttaacaataatgagcctgggagcagtagtactaaggcgtcttttgtaggcttaagaatttatcctaatggcctttataggaccaatgctgattttttttaaaggcagttcctattatgtggtgaaattttgtaaataaatgattatacaaaacagtcaccacctagaactgggtattctttgtacattgtcagatatctttcaaagtataaattaggaataaaaatgttccacatgatatgtgtacaaattctttttaagattgtcatcttgtacagcaaaatattatgttggtatattacttccttattaatttgcaaatgattggattaaaaaagctcactgtattccttactaacctgttgtgtgaaacataacattggcagtcgaggagtcagaactcggattcccagcctcactccctctgtgtgtgttgaccacgtctctgctgtgaataggatttcatgcagtggtctgttatggggctttgcagcgtggggggctgcagaagattctcagacattcttatccttctggagtctcaacccatcaggttcagaccagtaggaaccaggctgggtcaggctcttaatttcactatggtgggggacaaaatgaacactggcttttgttcactttgcccctgagagatctagtcctgtcctgtgatggcttccacaaaccctgttggaagtttgggttattcctataactgtatgtgttgagtggccgtgaggctatggacctagcctggaatttagatgtctagctattttttaatcttgttggtaaatgctcagaggtctgtgctacctctgtgaggtatatactaaaatgaatgtaaaataaggatcgtattccctgctttaaggaactggtagtcttgtttgggtgatgagacaaagttcttgagacatttaaactgtatttaccagtgtgaaaaatgtcatttatggagattaattcattatggaaataaaacattgcctaagcccttg

SEQ ID NO: 3628 - DNA, 561 bp, Homo sapiens
  source 1..561: mol_type = genomic DNA
cctgaagattctgaaaagaaacgcactaattatcaagcttatcgaagctacttaaatcgagaaggtcccaaggctctgggctccaaagaaataccaaagggagctgaaaattgcttggaaggccttatatttgtaatcacaggcgtgctggagtctattgaacgagatgaggccaagtctctaattgaacgttatgggggaaaagtaacaggaaatgtcagcaagaaaacaaattatcttgtcatgggtcgtgatagtggacagtccaagagtgataaggccgcagccttggggacaaaaattattgatgaagatggcctgttgaatctgattcggactatgccaggcaagaaatccaagtatgaaatagcagttgaaactgaggagttgggatacagctacgtggaactgaatgcaagtgacacccggagtaagagcagtttgaaggcgattgttgctgagtcactgaacaataccagcatcaaaggcttttattcaaatggagcagcctcttcagtaagcacgaaacatgctctcatcatggatgaagtagatggcatg

SEQ ID NO: 3629 - DNA, 4352 bp, Homo sapiens
  source 1..4352: mol_type = genomic DNA
gcacgtcgggggcgggagcggtgcgcgcaacttctcgggccaataactgcgcagcgcgcgggacccgggtggggaagctggagctgttgcggggtccgcggggaagtcttggcggtggagccatggtcggccaactgagcgagggggccattgcggccatcatgcagaagggggatacaaacataaagcccatcctccaagtcatcaacatccgtcccattactacggggaatagtccgccgcgttatcgactgctcatgagtgatggattgaacactctatcctctttcatgttggcgacacagttgaaccctctcgtggaggaagaacaattgtccagcaactgtgtatgccagattcacagatttattgtgaacactctgaaagacggaaggagagtagttatcttgatggaattagaagttttgaagtcagctgaagcagttggagtgaagattggcaatccagtgccctataatgaaggactcgggcagccgcaagtagctcctccagcgccagcagccagcccagcagcaagcagcaggccccagccgcagaatggaagctcgggaatgggttctactgtttctaaggcttatggtgcttcaaagacatttggaaaagctgcaggtcccagcctgtcacacacttctgggggaacacagtccaaagtggtgcccattgccagcctcactccttaccagtccaagtggaccatttgtgctcgtgttaccaacaaaagtcagatccgtacctggagcaactcccgaggggaagggaagcttttctccctagaactggttgacgaaagtggtgaaatccgagctacagctttcaatgagcaagtggacaagttctttcctcttattgaagtgaacaaggtgtattatttctcgaaaggcaccctgaagattgctaacaagcagttcacagctgttaaaaatgactacgagatgaccttcaataacgagacttccgtcatgccctgtgaggacgaccatcatttacctacggttcagtttgatttcacggggattgatgacctcgagaacaagtcgaaagactcacttgtagacatcatcgggatctgcaagagctatgaagacgccactaaaatcacagtgaggtctaacaacagagaagttgccaagaggaatatctacttgatggacacatccgggaaggtggtgactgctacactgtggggggaagatgctgataaatttgatggttctagacagcccgtgttggctatcaaaggagcccgagtctctgatttcggtggacggagcctctccgtgctgtcttcaagcactatcattgcgaatcctgacatcccagaggcctataagcttcgtggatggtttgacgcagaaggacaagccttagatggtgtttccatctctgatctaaagagcggcggagtcggagggagtaacaccaactggaaaaccttgtatgaggtcaaatccgagaacctgggccaaggcgacaagccggactactttagttctgtggccacagtggtgtatcttcgcaaagagaactgcatgtaccaagcctgcccgactcaggactgcaataagaaagtgattgatcaacagaatggattgtaccgctgtgagaagtgcgacaccgaatttcccaatttcaagtaccgcatgatcctgtcagtaaatattgcagattttcaagagaatcagtgggtgacttgtttccaggagtctgctgaagctatccttggacaaaatgctgcttatcttggggaattaaaagacaagaatgaacaggcatttgaagaagttttccagaatgccaacttccgatctttcatattcagagtcagggtcaaagtggagacctacaacgacgagtctcgaattaaggccactgtgatggacgtgaagcccgtggactacagagagtatggccgaaggctggtcatgagcatcaggagaagtgcattgatgtgagaggagcagtgccaatcgggcagaagtttgcaaataggcagaatggaatcgatttcctcccacctccgtgtgacgatcccatgttagctacacagtgcagaggctcttgatggtggactaagcaatttcccccctcgtgcgcatctcagaacccatcggtaggcaaaggaaaatacgctcaggtggttgtggtgtagactgtgtcaggcctacggagtcagccagtggctagcgcaagaccagtcactccctctgccttcaggcttctgtcaatttcattatcatcaagcaggaattatgtcgtaagtcactgaccctaactgcagaccatgaagtaaattatgtaactaggtttttgcttctccagtggtgaccacccccccccatccccgctcacaacttgggttcttctcagcggggcgagctgagaagcggtcatgagcacctggggattttagtaagtgtgtcttcctagaattcgaaggctctctctttctagaggtgctacatagttggtaatgcttggaatggcaatagggtagaatgattaatcaaaggcatatcttctatatctgaagagtatccttccttcagggtttaatagactgagtcagatgggtctgatattaatcaaaattgtctcttctgaggaccgctgataagcattgacttgccgtcccctaaggaaatccgagcggctacaaagcgtttctttacttctcacttcaattaatgctgcgcttcgcttggtgagtgcgtactttttctacctgtacacattcctgcattcatgtattttgttttttttgactaaagctatgttacatggaaaggattttgaagccttttgtttcccttgctttgttttaataaacagtatattctttggttgtgaatcctactttctttgaatgcaaagagttcctataactggaaagcaattaattagccttcataataaatgttcacttgggggggatgttaactcattataaacccgaagattagtccaaggcatggagatccttcttcctagtgtttgcagccctgaaatgcatctttcaaagcatgaaaacactaaaaacaaaaagccattttgcctgaggatgctgatgatctggcacttgggattttattgatgtttacgcagcagtctaacaccaaccacgctttgaaatgtgtacagacagtgagctggtaagaaaacagtaattatgctagtgggcctttcagtcagcaaaagcatgctcgctctgtgtgttcctaatcatattaattatctatccggtggctgcaacacaccgcctgccattggccgcacatctcgccgtcgtaccccggcagtgcggcggtcactctgcagccagaggacctgctgttcatcactgcacatgccgcctgcggaggcttttggatatggggagtgatggtgtcctgtctgtctcccccctcggtgtctgccgttgacataggggccagccagccctagacgggatgacttccgttcctgaggacagacacagagggactcctgctcagcctcactaattgtttagacacattccttcctacccttctctagtctcaggagatggtaactgggtcgcatttcagtctctgactgaggcctcagccatttttacggaagttcttttctgtctgaccttgcttataaagcatcgacgagaaaattacagtcttcaaccctcttctggattgacaaattgtggctgggaagtggcgatctagctttcagcccagtaaccagtctttcatgcctactactcccagcattccctcctctccccacgtgtctgtccacacagtgaagaggcctgaccagccgtggtaccaggacaggacgtgtccagggaacgctgacacctgtcctcgcgccttctcagtggccagcgtgatgaaaccagcacgtctccgtggatgtgattgggaacccaggggcagtgccagggggagggctccctcgaggaggctgtttctaacagatttccccactcaaagatcagatcaccagcagaggagcatcagaaactggctccactgttgggcttttcagagattttggtccctgcgggttgcctaaatagattctggcccacagtttacctcgaaaggctgttgatgttgttctgtttctcctctttcacttagagatcaatgttgattttgcgtacaccatgacatcagcgttaggcaattaggagaaaaaaatctaatcatttcgcctttatttcaagtggttcttgaattccctccagtctcattgtgaaaggggcagggaaaaaaataaaagggtaataatctgatttctgtccatatttccagtgttttatgctttccattaaaaccttgctaatctct

SEQ ID NO: 3630 - DNA, 2020 bp, Homo sapiens
  source 1..2020: mol_type = genomic DNA
aagctactcagataagaggctccaagaggacatttttggatgtgaaaaacaatgagaaggaggacaacacacatttacaatcgtcttaattttgtactcagaaaaaggatgtgaagacaatgcacagggaatacaatagtttcagatctgtgtacagtttccttttgcttcatctcctgcaacaatgtaatgaagacaccatgatatcattaacatttcacacaaaaggaaaatgaggctgaaatggtgtgggcaaggcccaggaatctggagcatccctaaccaagcaggagagcacctgggatagagaaagtgctcaagaatgttcacttactgattactacaatcaaaaaaagatacgacactaatttaccacattcttcttacttattttatgagatactattcttccaaggtggagaaagtggagaaagtagagtgacgcagctaagggagtaaatcgaccctcagccaacaagtggcaaaagcctgaagaaagtgatcaagatcactgatgaccccgctgcccatctccaagggggcgggtatcacaaccccgacgccacaccacgtatcattccgcaaaactcccgcgcctcccacgcagaactggcaagagggaaggcgagacagcagtgaacagctggtacgcagcacccacagcaccgcggcagcagctagtgccgactcccgcctagctcttttgactctgttcgcgggaagaatggggaaacagtaaggttgcggcgcctcccgcgagacgaggtacctgaggctggccccgcagtcccccgccgcaccagcaccggagcttcacaccccacttccggggtcaagtcaccgccgggaatcctgtgatcgcagaaaggtagtctcaggttccgcccctatccaagtcccgcctccactgcctctcgccctgtatctgtcaacttccgggacgccgcgcgtcactaagcagccaatctccacttccggactcatccagccccttctccacccctttcagagacagcgcgattgcgatttaggtttccgcgcatttaattggcgaagctggagcgctagtcttcgctgattggtgccgagaaatctgccccatagacacccgcggggcgcacagtttcagtcgtccgtgggtttcccgccagccgcagtcttggaccataatcatggtggacatgatggacttgcccaggtcgcgcatcaacgccggcatgctagctcaattcatcgacaagcctgtctgcttcgtagggaggctggaaaagattcatcccaccggaaaaatgtttattctttcagatggagaaggaaaaaatggaaccatcgagttgatggaaccccttgatgaagaaatctctggaattgtggaagtggttggaagagtaaccgccaaggccaccatcttgtgtacatcttatgtccagtttaaagaagatagccatccttttgatcttggactttacaatgaagctgtgaaaattatccatgacttccctcagttttatcctttagggattgtgcaacatgattgatcttgatggattttcatacgattgtaaatgagctatattaaagtctattaaaggaagcccttcttgtttgagggagagatttctgtgctttctcatatttaatttgctgtttttaagatattccaacctagagtttttgatggaactgatatattgacagttctcaccgaagtccttttataaagaattgctactccaatatatggtcagattagatgcaagaataaagcagttgtccgagtctaagtttctattttattaataaaaactaaaatggtacgtactatcggtcatttcattttcattcttttaatcatgtattcaagcacaaacttgaaatttcatagccataaggtcaagatttagacctaccaaataaaaccttgggccagctgtgttaaggatttgctcaccttttcccaaactataccttgataattatttccttgataccctacttacaaaatgaagtagatgacatt

SEQ ID NO: 3631 - DNA, 847 bp, Homo sapiens
  source 1..847: mol_type = genomic DNA
gggaaggcgagacagcagtgaacagctggtacgcagcacccacagcaccgcggcagcagctagtgccgactcccgcctagctcttttgactctgttcgcgggaagaatggggaaacagtaaggttgcggcgcctcccgcgagacgaggtacctgaggctggccccgcagtcccccgccgcaccagcaccggagcttcacaccccacttccggggtcaagtcaccgccgggaatcctgtgatcgcagaaagagacagcgcgattgcgatttaggtttccgcgcatttaattggcgaagctggagcgctagtcttcgctgattggtgccgagaaatctgccccatagacacccgcggggcgcacagtttcagtcgtccgtgggtttcccgccagccgcagtcttggaccataatcatggtggacatgatggacttgcccaggtcgcgcatcaacgccggcatgctagctcaattcatcgacaagcctgtctgcttcgtagggaggctggaaaagattcatcccaccggaaaaatgtttattctttcagatggagaaggaaaaaatggaaccatcgagttgatggaaccccttgatgaagaaatctctggaattgtggaagtggttggaagagtaaccgccaaggccaccatcttgtgtacatcttatgtccagtttaaagaagatagccatccttttgatcttggactttacaatgaagctgtgaaaattatccatgacttccctcagttttatcctttagggattgtgcaacatgattgatcttgatggattttcatacgattgtaaatgagctatattaaagtctattaaaggaagcccttcttgtt

SEQ ID NO: 3632 - DNA, 4840 bp, Homo sapiens
  source 1..4840: mol_type = genomic DNA
tccggtttttctcaggggacgttgaaattatttttgtaacgggagtcgggagaggacggggcgtgccccgacgtgcgcgcgcgtcgtcctccccggcgctcctccacagctcgctggctcccgccgcggaaaggcgtcatgccgcccaaaaccccccgaaaaacggccgccaccgccgccgctgccgccgcggaacccccggcaccgccgccgccgccccctcctgaggaggacccagagcaggacagcggcccggaggacctgcctctcgtcaggcttgagtttgaagaaacagaagaacctgattttactgcattatgtcagaaattaaagataccagatcatgtcagagagagagcttggttaacttgggagaaagtttcatctgtggatggagtattgggaggttatattcaaaagaaaaaggaactgtggggaatctgtatctttattgcagcagttgacctagatgagatgtcgttcacttttactgagctacagaaaaacatagaaatcagtgtccataaattctttaacttactaaaagaaattgataccagtaccaaagttgataatgctatgtcaagactgttgaagaagtatgatgtattgtttgcactcttcagcaaattggaaaggacatgtgaacttatatatttgacacaacccagcagttcgatatctactgaaataaattctgcattggtgctaaaagtttcttggatcacatttttattagctaaaggggaagtattacaaatggaagatgatctggtgatttcatttcagttaatgctatgtgtccttgactattttattaaactctcacctcccatgttgctcaaagaaccatataaaacagctgttatacccattaatggttcacctcgaacacccaggcgaggtcagaacaggagtgcacggatagcaaaacaactagaaaatgatacaagaattattgaagttctctgtaaagaacatgaatgtaatatagatgaggtgaaaaatgtttatttcaaaaattttataccttttatgaattctcttggacttgtaacatctaatggacttccagaggttgaaaatctttctaaacgatacgaagaaatttatcttaaaaataaagatctagatgcaagattatttttggatcatgataaaactcttcagactgattctatagacagttttgaaacacagagaacaccacgaaaaagtaaccttgatgaagaggtgaatgtaattcctccacacactccagttaggactgttatgaacactatccaacaattaatgatgattttaaattcagcaagtgatcaaccttcagaaaatctgatttcctattttaacaactgcacagtgaatccaaaagaaagtatactgaaaagagtgaaggatataggatacatctttaaagagaaatttgctaaagctgtgggacagggttgtgtcgaaattggatcacagcgatacaaacttggagttcgcttgtattaccgagtaatggaatccatgcttaaatcagaagaagaacgattatccattcaaaattttagcaaacttctgaatgacaacatttttcatatgtctttattggcgtgcgctcttgaggttgtaatggccacatatagcagaagtacatctcagaatcttgattctggaacagatttgtctttcccatggattctgaatgtgcttaatttaaaagcctttgatttttacaaagtgatcgaaagttttatcaaagcagaaggcaacttgacaagagaaatgataaaacatttagaacgatgtgaacatcgaatcatggaatcccttgcatggctctcagattcacctttatttgatcttattaaacaatcaaaggaccgagaaggaccaactgatcaccttgaatctgcttgtcctcttaatcttcctctccagaataatcacactgcagcagatatgtatctttctcctgtaagatctccaaagaaaaaaggttcaactacgcgtgtaaattctactgcaaatgcagagacacaagcaacctcagccttccagacccagaagccattgaaatctacctctctttcactgttttataaaaaagtgtatcggctagcctatctccggctaaatacactttgtgaacgccttctgtctgagcacccagaattagaacatatcatctggacccttttccagcacaccctgcagaatgagtatgaactcatgagagacaggcatttggaccaaattatgatgtgttccatgtatggcatatgcaaagtgaagaatatagaccttaaattcaaaatcattgtaacagcatacaaggatcttcctcatgctgttcaggagacattcaaacgtgttttgatcaaagaagaggagtatgattctattatagtattctataactcggtcttcatgcagagactgaaaacaaatattttgcagtatgcttccaccaggccccctaccttgtcaccaatacctcacattcctcgaagcccttacaagtttcctagttcacccttacggattcctggagggaacatctatatttcacccctgaagagtccatataaaatttcagaaggtctgccaacaccaacaaaaatgactccaagatcaagaatcttagtatcaattggtgaatcattcgggacttctgagaagttccagaaaataaatcagatggtatgtaacagcgaccgtgtgctcaaaagaagtgctgaaggaagcaaccctcctaaaccactgaaaaaactacgctttgatattgaaggatcagatgaagcagatggaagtaaacatctcccaggagagtccaaatttcagcagaaactggcagaaatgacttctactcgaacacgaatgcaaaagcagaaaatgaatgatagcatggatacctcaaacaaggaagagaaatgaggatctcaggaccttggtggacactgtgtacacctctggattcattgtctctcacagatgtgactgtataactttcccaggttctgtttatggccacatttaatatcttcagctctttttgtggatataaaatgtgcagatgcaattgtttgggtgattcctaagccacttgaaatgttagtcattgttatttatacaagattgaaaatcttgtgtaaatcctgccatttaaaaagttgtagcagattgtttcctcttccaaagtaaaattgctgtgctttatggatagtaagaatggccctagagtgggagtcctgataacccaggcctgtctgactactttgccttcttttgtagcatataggtgatgtttgctcttgtttttattaatttatatgtatatttttttaatttaacatgaacacccttagaaaatgtgtcctatctatcttccaaatgcaatttgattgactgcccattcaccaaaattatcctgaactcttctgcaaaaatggatattattagaaattagaaaaaaattactaattttacacattagattttattttactattggaatctgatatactgtgtgcttgttttataaaattttgcttttaattaaataaaagctggaagcaaagtataaccatatgatactatcatactactgaaacagatttcatacctcagaatgtaaaagaacttactgattattttcttcatccaacttatgtttttaaatgaggattattgatagtactcttggtttttataccattcagatcactgaatttataaagtacccatctagtacttgaaaaagtaaagtgttctgccagatcttaggtatagaggaccctaacacagtatatcccaagtgcactttctaatgtttctgggtcctgaagaattaagatacaaattaattttactccataaacagactgttaattataggagccttaatttttttttcatagagatttgtctaattgcatctcaaaattattctgccctccttaatttgggaaggtttgtgttttctctggaatggtacatgtcttccatgtatcttttgaactggcaattgtctatttatcttttatttttttaagtcagtatggtctaacactggcatgttcaaagccacattatttctagtccaaaattacaagtaatcaagggtcattatgggttaggcattaatgtttctatctgattttgtgcaaaagcttcaaattaaaacagctgcattagaaaaagaggcgcttctcccctcccctacacctaaaggtgtatttaaactatcttgtgtgattaacttatttagagatgctgtaacttaaaataggggatatttaaggtagcttcagctagcttttaggaaaatcactttgtctaactcagaattatttttaaaaagaaatctggtcttgttagaaaacaaaattttattttgtgctcatttaagtttcaaacttactattttgacagttattttgataacaatgacactagaaaacttgactccatttcatcattgtttctgcatgaatatcatacaaatcagttagtttttaggtcaagggcttactatttctgggtcttttgctactaagttcacattagaattagtgccagaattttaggaacttcagagatcgtgtattgagatttcttaaataatgcttcagatattattgctttattgcttttttgtattggttaaaactgtacatttaaaattgctatgttactattttctacaattaatagtttgtctattttaaaataaattagttgttaagagtcttaatggtctgatgttgtgttctttgtattaagtacactaatgttctcttttctgtctaggagaagatagatagaagataactctcctagtatctcatcc

SEQ ID NO: 3633 - DNA, 480 bp, Homo sapiens
  source 1..480: mol_type = genomic DNA
tccggtttttctcaggggacgttgaaattatttttgtaacgggagtcgggagaggacggggcgtgccccgacgtgcgcgcgcgtcgtcctccccggcgctcctccacagctcgctggctcccgccgcggaaaggcgtcatgccgcccaaaaccccccgaaaaacggccgccaccgccgccgctgccgccgcggaacccccggcaccgccgccgccgccccctcctgaggaggacccagagcaggacagcggcccggaggacctgcctctcgtcaggggaagtattacaaatggaagatgatctggtgatttcatttcagttaatgctatgtgtccttgactattttattaaactctcacctcccatgttgctcaaagaaccatataaaacagctgttatacccattaatggttcacctcgaacacccaggcgaggtcagaacaggagtgcacggatagcaaaacaactagaaaatgatac

SEQ ID NO: 3634 - DNA, 3150 bp, Homo sapiens
  source 1..3150: mol_type = genomic DNA
gctcagttgccgggcgggggagggcgcgtccggtttttctcaggggacgttgaaattatttttgtaacgggagtcgggagaggacggggcgtgccccgacgtgcgcgcgcgtcgtcctccccggcgctcctccacagctcgctggctcccgccgcggaaaggcgtcatgccgcccaaaaccccccctcctgaggaggacccagagcaggacagcggcccggaggacctgcctctcgtcaggcttgagtttgaagaaacagaagaacctgattttactgcattatgtcagaaattaaagataccagatcatgtcagagagagagcttggttaacttgggagaaagtttcatctgtggatggagtattgggaggttatattcaaaagaaaaaggaactgtggggaatctgtatctttattgcagcagttgacctagatgagatgtcgttcacttttactgagctacagaaaaacatagaaatcagtgtccataaattctttaacttactaaaagaaattgataccagtaccaaagttgataatgctatgtcaagactgttgaagaagtatgatgtattgtttgcactcttcagcaaattggaaaggacatgtgaacttatatatttgacacaacccagcagttcgatatctactgaaataaattctgcattggtgctaaaagtttcttggatcacatttttattagctaaaggggaagtattacaaatggaagatgatctggtgatttcatttcagttaatgctatgtgtccttgactattttattaaactctcacctcccatgttgctcaaagaaccatataaaacagctgttatacccattaatggttcacctcgaacacccaggcgaggtcagaacaggagtgcacggatagcaaaacaactagaaaatgatacaagaattattgaagttctctgtaaagaacatgaatgtaatatagatgaggtgaaaaatgtttatttcaaaaattttataccttttatgaattctcttggacttgtaacatctaatggacttccagaggttgaaaatctttctaaacgatacgaagaaatttatcttaaaaataaagatctagatgcaagattatttttggatcatgataaaactcttcagactgattctatagacagttttgaaacacagagaacaccacgaaaaagtaaccttgatgaagaggtgaatgtaattcctccacacactccagttaggactgttatgaacactatccaacaattaatgatgattttaaattcagcaagtgatcaaccttcagaaaatctgatttcctattttaacaactgcacagtgaatccaaaagaaagtatactgaaaagagtgaaggatataggatacatctttaaagagaaatttgctaaagctgtgggacagggttgtgtcgaaattggatcacagcgatacaaacttggagttcgcttgtattaccgagtaatggaatccatgcttaaatcagaagaagaacgattatccattcaaaattttagcaaacttctgaatgacaacatttttcatatgtctttattggcgtgcgctcttgaggttgtaatggccacatatagcagaagtacatctcagaatcttgattctggaacagatttgtctttcccatggattctgaatgtgcttaatttaaaagcctttgatttttacaaagtgatcgaaagttttatcaaagcagaaggcaacttgacaagagaaatgataaaacatttagaacgatgtgaacatcgaatcatggaatcccttgcatggctctcagattcacctttatttgatcttattaaacaatcaaaggaccgagaaggaccaactgatcaccttgaatctgcttgtcctcttaatcttcctctccagaataatcacactgcagcagatatgtatctttctcctgtaagatctccaaagaaaaaaggttcaactacgcgtgtaaattctactgcaaatgcagagacacaagcaacctcagccttccagacccagaagccattgaaatctacctctctttcactgttttataaaaaagtgtatcggctagcctatctccggctaaatacactttgtgaacgccttctgtctgagcacccagaattagaacatatcatctggacccttttccagcacaccctgcagaatgagtatgaactcatgagagacaggcatttggaccaaattatgatgtgttccatgtatggcatatgcaaagtgaagaatatagaccttaaattcaaaatcattgtaacagcatacaaggatcttcctcatgctgttcaggagacattcaaacgtgttttgatcaaagaagaggagtatgattctattatagtattctataactcggtcttcatgcagagactgaaaacaaatattttgcagtatgcttccaccaggccccctaccttgtcaccaatacctcacattcctcgaagcccttacaagtttcctagttcacccttacggattcctggagggaacatctatatttcacccctgaagagtccatataaaatttcagaaggtctgccaacaccaacaaaaatgactccaagatcaagaatcttagtatcaattggtgaatcattcgggacttctgagaagttccagaaaataaatcagatggtatgtaacagcgaccgtgtgctcaaaagaagtgctgaaggaagcaaccctcctaaaccactgaaaaaactacgctttgatattgaaggatcagatgaagcagatggaagtaaacatctcccaggagagtccaaatttcagcagaaactggcagaaatgacttctactcgaacacgaatgcaaaagcagaaaatgaatgatagcatggatacctcaaacaaggaagagaaatgaggatctcaggaccttggtggacactgtgtacacctctggattcattgtctctcacagatgtgactgtataactttcccaggttctgtttatggccacatttaatatcttcagctctttttgtggatataaaatgtgcagatgcaattgtttgggtgattcctaagccacttgaaatgttagtcattgttatttatacaagattgaaaatcttgtgtaaatcctgccatttaaaaagttgtagcagattgtttcctcttcc

SEQ ID NO: 3635 - DNA, 3276 bp, Homo sapiens
  source 1..3276: mol_type = genomic DNA
cgcgtgacgtcgcgcgggctcccgggcggggcgggtccggccgcctccgagcccggccggcagcccccggccttaaagcgcgggctgtccggaggggtcggctttcccaccgaggatttggcactctggtgagggaaaagggcgaaagagaaaagcgagcagccgtcctttcacagcctcagaaagtgctcgcttcccttcgggggctttcgcgaatcccgaggcaatctcggaggcggtatttgacctgtccaaagacgacttgatacctctataatgtaacagaaaaggtcagaaaatattaagcaagtagaagtgtggagcatattaagcaagatgaacatctcgggaagcagctgtggaagccctaactctgcagatacatctagtgactttaaggacctttggacaaaactaaaagaatgtcatgatagagaagtacaaggtttacaagtaaaagtaaccaagctaaaacaggaacgaatcttagatgcacaaagactagaagaattcttcaccaaaaatcaacagctgagggaacagcagaaagtccttcatgaaaccattaaagttttagaagatcggttaagagcaggcttatgtgatcgctgtgcagtaactgaagaacatatgcggaaaaaacagcaagagtttgaaaatatccggcagcagaatcttaaacttattacagaacttatgaatgaaaggaatactctacaggaagaaaataaaaagctttctgaacaactccagcagaaaattgagaatgatcaacagcatcaagcagctgagcttgaatgtgaggaagacgttattccagattcaccgataacagccttctcattttctggcgttaaccggctacgaagaaaggagaacccccatgtccgatacatagaacaaacacatactaaattggagcactctgtgtgtgcaaatgaaatgagaaaagtttccaagtcttcaactcatccacaacataatcctaatgaaaatgaaattctagtagctgacacttatgaccaaagtcaatctccaatggccaaagcacatggaacaagcagctatacccctgataagtcatcttttaatttagctacagttgttgctgaaacacttggacttggtgttcaagaagaatctgaaactcaaggtcccatgagcccccttggtgatgagctctaccactgtctggaaggaaatcacaagaaacagccttttgaggaatctacaagaaatactgaagatagtttaagattttcagattctacttcaaagactcctcctcaagaagaattacctactcgagtgtcatctcctgtatttggagctacctctagtatcaaaagtggtttagatttgaatacaagtttgtccccttctcttttacagcctgggaaaaaaaaacatctgaaaacactcccttttagcaacacttgtatatctagattagaaaaaactagatcaaaatctgaagatagtgcccttttcacacatcacagtcttgggtctgaagtgaacaagatcattatccagtcatctaataaacagatacttataaataaaaatataagtgaatccctaggtgaacagaataggactgagtacggtaaagattctaacactgataaacatttggagcccctgaaatcattgggaggccgaacatccaaaaggaagaaaactgaggaagaaagtgaacatgaagtaagctgcccccaagcttcttttgataaagaaaatgctttcccttttccaatggataatcagttttccatgaatggagactgtgtgatggataaacctctggatctgtctgatcgattttcagctattcagcgtcaagagaaaagccaaggaagtgagacttctaaaaacaaatttaggcaagtgactctttatgaggctttgaagaccattccaaagggcttttcctcaagccgtaaggcctcagatggcaactgcacgttgcccaaagattccccaggggagccctgttcacaggaatgcatcatccttcagcccttgaataaatgctctccagacaataaaccatcattacaaataaaagaagaaaatgctgtctttaaaattcctctacgtccacgtgaaagtttggagactgagaatgttttagatgacataaagagtgctggttctcatgagccaataaaaatacaaaccaggtcagaccatggaggatgtgaacttgcatcagttcttcagttaaatccatgtagaactggtaaaataaagtctctacaaaacaaccaagatgtatcctttgaaaatatccagtggagtatagatccgggagcagacctttctcagtataaaatggatgttactgtaatagatacaaaggatggcagtcagtcaaaattaggaggagagacagtggacatggactgtacattggttagtgaaaccgttctcttaaaaatgaagaagcaagagcagaagggagaaaaaagttcaaatgaagaaagaaaaatgaatgatagcttggaagatatgtttgatcggacaacacatgaagagtatgaatcctgtttggcagacagtttctcccaagcagcagatgaagaggaggaattgtctactgccacaaagaaactacacactcatggtgataaacaagacaaagtcaagcagaaagcgtttgtggagccgtattttaaaggtgatgaaagagagactagcttgcaaaattttcctcatattgaggtggttcggaaaaaagaggagagaagaaaactgcttgggcacacgtgtaaggaatgtgaaatttattatgcagatatgccagcagaagaaagagaaaagaaattggcttcctgctcaagacaccgattccgctacattccacccaacacaccagagaatttttgggaagttggttttccttccactcagacttgtatggaaagaggttatattaaggaagatcttgatccttgtcctcgtccaaaaagacgtcagccttacaacgcaatattttctccaaaaggcaaggagcagaagacatagacgttgaaacagaaacagaaggatgaaggacagttttttccttcttagttatttatagttaaagttggtactaaacattgatttttttgatcttctgtaaatggatttataaatcagttttctattgaaaatgtttgtgatattttgcttttgcacctttaaaacaataaggcgctttcattttgcactctaacttaagagtttttactttatgtagtgatacctaatacaattttgaaaatacaa

SEQ ID NO: 3636 - DNA, 2961 bp, Homo sapiens
  source 1..2961: mol_type = genomic DNA
gattgagaacatgcgggctacagagaggtatttgacctgtccaaagacgacttgatacctctataatgtaacagaaaaggtcagaaaatattaagcaagtagaagtgtggagcatattaagcaagatgaacatctcgggaagcagctgtggaagccctaactctgcagatacatctagtgactttaaggacctttggacaaaactaaaagaatgtcatgatagagaagtacaaggtttacaagtaaaagtaaccaagctaaaacaggaacgaatcttagatgcacaaagactagaagaattcttcaccaaaaatcaacagctgagggaacagcagaaagtccttcatgaaaccattaaagttttagaagatcggttaagagcaggcttatgtgatcgctgtgcagtaactgaagaacatatgcggaaaaaacagcaagagtttgaaaatatccggcagcagaatcttaaacttattacagaacttatgaatgaaaggaatactctacaggaagaaaataaaaagctttctgaacaactccagcagaaaattgagaatgatcaacagcatcaagcagctgagcttgaatgtgaggaagacgttattccagattcaccgataacagccttctcattttctggcgttaaccggctacgaagaaaggagaacccccatgtccgatacatagaacaaacacatactaaattggagcactctgtgtgtgcaaatgaaatgagaaaagtttccaagtcttcaactcatccacaacataatcctaatgaaaatgaaattctagtagctgacacttatgaccaaagtcaatctccaatggccaaagcacatggaacaagcagctatacccctgataagtcatcttttaatttagctacagttgttgctgaaacacttggacttggtgttcaagaagaatctgaaactcaaggtcccatgagcccccttggtgatgagctctaccactgtctggaaggaaatcacaagaaacagccttttgaggaatctacaagaaatactgaagatagtttaagattttcagattctacttcaaagactcctcctcaagaagaattacctactcgagtgtcatctcctgtatttggagctacctctagtatcaaaagtggtttagatttgaatacaagtttgtccccttctcttttacagcctgggaaaaaaaaacatctgaaaacactcccttttagcaacacttgtatatctagattagaaaaaactagatcaaaatctgaagatagtgcccttttcacacatcacagtcttgggtctgaagtgaacaagatcattatccagtcatctaataaacagatacttataaataaaaatataagtgaatccctaggtgaacagaataggactgagtacggtaaagattctaacactgataaacatttggagcccctgaaatcattgggaggccgaacatccaaaaggaagaaaactgaggaagaaagtgaacatgaagtaagctgcccccaagcttcttttgataaagaaaatgctttcccttttccaatggataatcagttttccatgaatggagactgtgtgatggataaacctctggatctgtctgatcgattttcagctattcagcgtcaagagaaaagccaaggaagtgagacttctaaaaacaaatttaggcaagtgactctttatgaggctttgaagaccattccaaagggcttttcctcaagccgtaaggcctcagatggcaactgcacgttgcccaaagattccccaggggagccctgttcacaggaatgcatcatccttcagcccttgaataaatgctctccagacaataaaccatcattacaaataaaagaagaaaatgctgtctttaaaattcctctacgtccacgtgaaagtttggagactgagaatgttttagatgacataaagagtgctggttctcatgagccaataaaaatacaaaccaggtcagaccatggaggatgtgaacttgcatcagttcttcagttaaatccatgtagaactggtaaaataaagtctctacaaaacaaccaagatgtatcctttgaaaatatccagtggagtatagatccgggagcagacctttctcagtataaaatggatgttactgtaatagatacaaaggatggcagtcagtcaaaattaggaggagagacagtggacatggactgtacattggttagtgaaaccgttctcttaaaaatgaagaagcaagagcagaagggagaaaaaagttcaatgctcttttacatagatgaagaaagaaaaatgaatgatagcttggaagatatgtttgatcggacaacacatgaagagtatgaatcctgtttggcagacagtttctcccaagcagcagatgaagaggaggaattgtctactgccacaaagaaactacacactcatggtgataaacaagacaaagtcaagcagaaagcgtttgtggagccgtattttaaaggtgatgaaagagagactagcttgcaaaattttcctcatattgaggtggttcggaaaaaagaggagagaagaaaactgcttgggcacacgtgtaaggaatgtgaaatttattatgcagatatgccagcagaagaaagagaaaagaaattggcttcctgctcaagacaccgattccgctacattccacccaacacaccagagaatttttgggaagttggttttccttccactcagacttgtatggaaagaggttatattaaggaagatcttgatccttgtcctcgtccaaaaagacgtcagccttacaacgcaatattttctccaaaaggcaaggagcagaagacatagacgttgaaacagaaacagaaggatgaaggacagttttttccttcttagttatttatagttaaagttggtactaaacattgatttttttgatcttctgtaaatggatttataaatcagttttctattg

SEQ ID NO: 3637 - DNA, 3199 bp, Homo sapiens
  source 1..3199: mol_type = genomic DNA
ggggagaaatggatggagaagggacctggctggaaagcctttgccccgctgctctgctccgcccataagaggacccctgaaatgtcccgtgcagtttgttcaagtcccctgtgtgatgaaatgtgcctctcgccttacccgtgtgagaatacctgtggtgtggcagcgagtattttggtgagcacctgcagtgtagtggtttatactaaggaatacacacaaattacaggcctttgagcccagaatgcaacttgggaggtatttgacctgtccaaagacgacttgatacctctataatgtaacagaaaaggtcagaaaatattaagcaagtagaagtgtggagcatattaagcaagatgaacatctcgggaagcagctgtggaagccctaactctgcagatacatctagtgactttaaggacctttggacaaaactaaaagaatgtcatgatagagaagtacaaggtttacaagtaaaagtaaccaagctaaaacaggaacgaatcttagatgcacaaagactagaagaattcttcaccaaaaatcaacagctgagggaacagcagaaagtccttcatgaaaccattaaagttttagaagatcggttaagagcaggcttatgtgatcgctgtgcagtaactgaagaacatatgcggaaaaaacagcaagagtttgaaaatatccggcagcagaatcttaaacttattacagaacttatgaatgaaaggaatactctacaggaagaaaataaaaagctttctgaacaactccagcagaaaattgagaatgatcaacagcatcaagcagctgagcttgaatgtgaggaagacgttattccagattcaccgataacagccttctcattttctggcgttaaccggctacgaagaaaggagaacccccatgtccgatacatagaacaaacacatactaaattggagcactctgtgtgtgcaaatgaaatgagaaaagtttccaagtcttcaactcatccacaacataatcctaatgaaaatgaaattctagtagctgacacttatgaccaaagtcaatctccaatggccaaagcacatggaacaagcagctatacccctgataagtcatcttttaatttagctacagttgttgctgaaacacttggacttggtgttcaagaagaatctgaaactcaaggtcccatgagcccccttggtgatgagctctaccactgtctggaaggaaatcacaagaaacagccttttgaggaatctacaagaaatactgaagatagtttaagattttcagattctacttcaaagactcctcctcaagaagaattacctactcgagtgtcatctcctgtatttggagctacctctagtatcaaaagtggtttagatttgaatacaagtttgtccccttctcttttacagcctgggaaaaaaaaacatctgaaaacactcccttttagcaacacttgtatatctagattagaaaaaactagatcaaaatctgaagatagtgcccttttcacacatcacagtcttgggtctgaagtgaacaagatcattatccagtcatctaataaacagatacttataaataaaaatataagtgaatccctaggtgaacagaataggactgagtacggtaaagattctaacactgataaacatttggagcccctgaaatcattgggaggccgaacatccaaaaggaagaaaactgaggaagaaagtgaacatgaagtaagctgcccccaagcttcttttgataaagaaaatgctttcccttttccaatggataatcagttttccatgaatggagactgtgtgatggataaacctctggatctgtctgatcgattttcagctattcagcgtcaagagaaaagccaaggaagtgagacttctaaaaacaaatttaggcaagtgactctttatgaggctttgaagaccattccaaagggcttttcctcaagccgtaaggcctcagatggcaactgcacgttgcccaaagattccccaggggagccctgttcacaggaatgcatcatccttcagcccttgaataaatgctctccagacaataaaccatcattacaaataaaagaagaaaatgctgtctttaaaattcctctacgtccacgtgaaagtttggagactgagaatgttttagatgacataaagagtgctggttctcatgagccaataaaaatacaaaccaggtcagaccatggaggatgtgaacttgcatcagttcttcagttaaatccatgtagaactggtaaaataaagtctctacaaaacaaccaagatgtatcctttgaaaatatccagtggagtatagatccgggagcagacctttctcagtataaaatggatgttactgtaatagatacaaaggatggcagtcagtcaaaattaggaggagagacagtggacatggactgtacattggttagtgaaaccgttctcttaaaaatgaagaagcaagagcagaagggagaaaaaagttcaaatgaagaaagaaaaatgaatgatagcttggaagatatgtttgatcggacaacacatgaagagtatgaatcctgtttggcagacagtttctcccaagcagcagatgaagaggaggaattgtctactgccacaaagaaactacacactcatggtgataaacaagacaaagtcaagcagaaagcgtttgtggagccgtattttaaaggtgatgaaagtattatgcagatatgccagcagaagaaagagaaaagaaattggcttcctgctcaagacaccgattccgctacattccacccaacacaccagagaatttttgggaagttggttttccttccactcagacttgtatggaaagaggttatattaaggaagatcttgatccttgtcctcgtccaaaaagacgtcagccttacaacgcaatattttctccaaaaggcaaggagcagaagacatagacgttgaaacagaaacagaaggatgaaggacagttttttccttcttagttatttatagttaaagttggtactaaacattgatttttttgatcttctgtaaatggatttataaatcagttttctattgaaaatgtttgtgatattttgcttttgcacctttaaaacaataaggcgctttcattttgcactctaacttaagagtttttactttatgtagtgatacctaatacaattttgaaaatacaa

SEQ ID NO: 3638 - DNA, 3237 bp, Homo sapiens
  source 1..3237: mol_type = genomic DNA
cgcacgcggaaccggcgcgggcacctggggagaaatggatggagaagggacctggctggaaagcctttgccccgctgctctgctccgcccataagaggacccctgaaatgtcccgtgcagtttgttcaagtcccctgtgtgatgaaatgtgcctctcgccttacccgtgtgagaatacctgtggtgtggcagcgagtattttggtatttgacctgtccaaagacgacttgatacctctataatgtaacagaaaaggtcagaaaatattaagcaagtagaagtgtggagcatattaagcaagatgaacatctcgggaagcagctgtggaagccctaactctgcagatacatctagtgactttaaggacctttggacaaaactaaaagaatgtcatgatagagaagtacaaggtttacaagtaaaagtaaccaagctaaaacaggaacgaatcttagatgcacaaagactagaagaattcttcaccaaaaatcaacagctgagggaacagcagaaagtccttcatgaaaccattaaagttttagaagatcggttaagagcaggcttatgtgatcgctgtgcagtaactgaagaacatatgcggaaaaaacagcaagagtttgaaaatatccggcagcagaatcttaaacttattacagaacttatgaatgaaaggaatactctacaggaagaaaataaaaagctttctgaacaactccagcagaaaattgagaatgatcaacagcatcaagcagctgagcttgaatgtgaggaagacgttattccagattcaccgataacagccttctcattttctggcgttaaccggctacgaagaaaggagaacccccatgtccgatacatagaacaaacacatactaaattggagcactctgtgtgtgcaaatgaaatgagaaaagtttccaagtcttcaactcatccacaacataatcctaatgaaaatgaaattctagtagctgacacttatgaccaaagtcaatctccaatggccaaagcacatggaacaagcagctatacccctgataagtcatcttttaatttagctacagttgttgctgaaacacttggacttggtgttcaagaagaatctgaaactcaaggtcccatgagcccccttggtgatgagctctaccactgtctggaaggaaatcacaagaaacagccttttgaggaatctacaagaaatactgaagatagtttaagattttcagattctacttcaaagactcctcctcaagaagaattacctactcgagtgtcatctcctgtatttggagctacctctagtatcaaaagtggtttagatttgaatacaagtttgtccccttctcttttacagcctgggaaaaaaaaacatctgaaaacactcccttttagcaacacttgtatatctagattagaaaaaactagatcaaaatctgaagatagtgcccttttcacacatcacagtcttgggtctgaagtgaacaagatcattatccagtcatctaataaacagatacttataaataaaaatataagtgaatccctaggtgaacagaataggactgagtacggtaaagattctaacactgataaacatttggagcccctgaaatcattgggaggccgaacatccaaaaggaagaaaactgaggaagaaagtgaacatgaagtaagctgcccccaagcttcttttgataaagaaaatgctttcccttttccaatggataatcagttttccatgaatggagactgtgtgatggataaacctctggatctgtctgatcgattttcagctattcagcgtcaagagaaaagccaaggaagtgagacttctaaaaacaaatttaggcaagtgactctttatgaggctttgaagaccattccaaagggcttttcctcaagccgtaaggcctcagatggcaactgcacgttgcccaaagattccccaggggagccctgttcacaggaatgcatcatccttcagcccttgaataaatgctctccagacaataaaccatcattacaaataaaagaagaaaatgctgtctttaaaattcctctacgtccacgtgaaagtttggagactgagaatgttttagatgacataaagagtgctggttctcatgagccaataaaaatacaaaccaggtcagaccatggaggatgtgaacttgcatcagttcttcagttaaatccatgtagaactggtaaaataaagtctctacaaaacaaccaagatgtatcctttgaaaatatccagtggagtatagatccgggagcagacctttctcagtataaaatggatgttactgtaatagatacaaaggatggcagtcagtcaaaattaggaggagagacagtggacatggactgtacattggttagtgaaaccgttctcttaaaaatgaagaagcaagagcagaagggagaaaaaagttcaaatgaagaaagaaaaatgaatgatagcttggaagatatgtttgatcggacaacacatgaagagtatgaatcctgtttggcagacagtttctcccaagcagcagatgaagaggaggaattgtctactgccacaaagaaactacacactcatggtgataaacaagacaaagtcaagcagaaagcgtttgtggagccgtattttaaaggtgatgaaagagagactagcttgcaaaattttcctcatattgaggtggttcggaaaaaagaggagagaagaaaactgcttgggcacacgtgtaaggaatgtgaaatttattatgcagatatgccagcagaagaaagagaaaagaaattggcttcctgctcaagacaccgattccgctacattccacccaacacaccagagaatttttgggaagttggttttccttccactcagacttgtatggaaagaggttatattaaggaagatcttgatccttgtcctcgtccaaaaagacgtcagccttacaacgcaatattttctccaaaaggcaaggagcagaagacatagacgttgaaacagaaacagaaggatgaaggacagttttttccttcttagttatttatagttaaagttggtactaaacattgatttttttgatcttctgtaaatggatttataaatcagttttctattgaaaatgtttgtgatattttgcttttgcacctttaaaacaataaggcgctttcattttgcactctaacttaagagtttttactttatgtagtgatacctaatacaattttgaaaat

SEQ ID NO: 3639 - DNA, 3221 bp, Homo sapiens
  source 1..3221: mol_type = genomic DNA
cgcacgcggaaccggcgcgggcacctggggagaaatggatggagaagggacctggctggaaagcctttgccccgctgctctgctccgcccataagaggacccctgaaatgtcccgtgcagtttgttcaagtcccctgtgtgatgaaatgtgcctctcgccttacccgtgtgagaatacctgtggtgtggcagcgagtattttggtgagcacctgcagtgtagtggtttatactaaggaatacacacaaattacaggcctttgagcccagaatgcaacttgggaggtatttgacctgtccaaagacgacttgatacctctataatgtaacagaaaaggtcagaaaatattaagcaagtagaagtgtggagcatattaagcaagatgaacatctcgggaagcagctgtggaagccctaactctgcagatacatctagtgactttaaggacctttggacaaaactaaaagaatgtcatgatagagaagtacaaggtttacaagtaaaagtaaccaagctaaaacaggaacgaatcttagatgcacaaagactagaagaattcttcaccaaaaatcaacagctgagggaacagcagaaagtccttcatgaaaccattaaagttttagaagatcggttaagagcaggcttatgtgatcgctgtgcagtaactgaagaacatatgcggaaaaaacagcaagagtttgaaaatatccggcagcagaatcttaaacttattacagaacttatgaatgaaaggaatactctacaggaagaaaataaaaagctttctgaacaactccagcagaaaattgagaatgatcaacagcatcaagcagctgagcttgaatgtgaggaagacgttattccagattcaccgataacagccttctcattttctggcgttaaccggctacgaagaaaggagaacccccatgtccgatacatagaacaaacacatactaaattggagcactctgtgtgtgcaaatgaaatgagaaaagtttccaagtcttcaactcatccacaacataatcctaatgaaaatgaaattctagtagctgacacttatgaccaaagtcaatctccaatggccaaagcacatggaacaagcagctatacccctgataagtcatcttttaatttagctacagttgttgctgaaacacttggacttggtgttcaagaagaatctgaaactcaaggtcccatgagcccccttggtgatgagctctaccactgtctggaaggaaatcacaagaaacagccttttgaggaatctacaagaaatactgaagatagtttaagattttcagattctacttcaaagactcctcctcaagaagaattacctactcgagtgtcatctcctgtatttggagctacctctagtatcaaaagtggtttagatttgaatacaagtttgtccccttctcttttacagcctgggaaaaaaaaacatctgaaaacactcccttttagcaacacttgtatatctagattagaaaaaactagatcaaaatctgaagatagtgcccttttcacacatcacagtcttgggtctgaagtgaacaagatcattatccagtcatctaataaacagatacttataaataaaaatataagtgaatccctaggtgaacagaataggactgagtacggtaaagattctaacactgataaacatttggagcccctgaaatcattgggaggccgaacatccaaaaggaagaaaactgaggaagaaagtgaacatgaagtaagctgcccccaagcttcttttgataaagaaaatgctttcccttttccaatggataatcagttttccatgaatggagactgtgtgatggataaacctctggatctgtctgatcgattttcagctattcagcgtcaagagaaaagccaaggaagtgagacttctaaaaacaaatttaggcaagtgactctttatgaggctttgaagaccattccaaagggcttttcctcaagccgtaaggcctcagatggcaactgcacgttgcccaaagattccccaggggagccctgttcacaggaatgcatcatccttcagcccttgaataaatgctctccagacaataaaccatcattacaaataaaagaagaaaatgctgtctttaaaattcctctacgtccacgtgaaagtttggagactgagaatgttttagatgacataaagagtgctggttctcatgagccaataaaaatacaaaccaggtcagaccatggaggatgtgaacttgcatcagttcttcagttaaatccatgtagaactggtaaaataaagtctctacaaaacaaccaagatgtatcctttgaaaatatccagtggagtatagatccgggagcagacctttctcagtataaaatggatgttactgtaatagatacaaaggatggcagtcagtcaaaattaggaggagagacagtggacatggactgtacattggttagtgaaaccgttctcttaaaaatgaagaagcaagagcagaagggagaaaaaagttcaaatgaagaaagaaaaatgaatgatagcttggaagatatgtttgatcggacaacacatgaagagtatgaatcctgtttggcagacagtttctcccaagcagcagatgaagaggaggaattgtctactgccacaaagaaactacacactcatggtgataaacaagacaaagtcaagcagaaagcgtttgtggagccgtattttaaaggtgatgaaagtattatgcagatatgccagcagaagaaagagaaaagaaattggcttcctgctcaagacaccgattccgctacattccacccaacacaccagagaatttttgggaagttggttttccttccactcagacttgtatggaaagaggttatattaaggaagatcttgatccttgtcctcgtccaaaaagacgtcagccttacaacgcaatattttctccaaaaggcaaggagcagaagacatagacgttgaaacagaaacagaaggatgaaggacagttttttccttcttagttatttatagttaaagttggtactaaacattgatttttttgatcttctgtaaatggatttataaatcagttttctattgaaaatgtttgtgatattttgcttttgcacctttaaaacaataaggcgctttcattttgcactctaacttaagagtttttactttatgtagtgatacctaatacaattttgaaaat

SEQ ID NO: 3640 - DNA, 3225 bp, Homo sapiens
  source 1..3225: mol_type = genomic DNA
cgcgcctgggagggagaaagaagtcgggggccgtggcgcgcagcccgcggggcctgaagggatgttcgaggacaagccccacgctgagggggcggcggtggtcgccgcagccggggaggcgctacaggccctgtgccaggagctgaacctggacgaggggagcgcggccgaagccctggacgactttactgccatccgaggcaactacagcctagagggagaagttacacactggttggcatgttcattatatgttgcatgccgcaaaagcattattcccacggttggaaagggtatcatggaaggcaactgtgtttcacttaccagaatactacgttcagctaaattaagtttaatacaattttttagtaaaatgaagaaatggatggacatgtcaaatctaccacaagaatttcgtgaacgtatagaaaggctagagagaaattttgaggtgtctactgtaatattcaaaaaatatgagccaatttttttagatatatttcaaaatccatatgaagaaccaccaaagttaccacgaagccggaagcagaggaggattccttgcagtgttaaggatctgtttaatttctgttggacactttttgtttatactaagggtaattttcggatgattggggatgacttagtaaactcttatcatttacttctatgctgcttggatctgatttttgccaatgcgattatgtgcccaaatagacaagacttgctaaatccatcatttaaaggtttaccatctgattttcatactgctgactttacggcttctgaagagccaccctgcatcattgctgtactgtgtgaactgcatgatggacttctcgtagaagcaaaaggaataaaggagcactactttaagccatatatttcaaaactctttgacaggaagatattaaaaggagaatgcctcctggacctttcaagttttactgataatagcaaagcagtgaataaggagtatgaagagtatgttctaactgttggtgattttgatgagaggatctttttgggagcagacgcagaagaggaaattggaacacctcgaaagttcactcgtgacaccccattagggaaactgacagcacaggctaatgtggagtataaccttcaacagcactttgaaaaaaaaaggtcatttgcaccttctaccccactgaccggacggagatatttacgagaaaaagaagcagtcattactcctgttgcatcagccacccaaagtgtgagccggttacagagtattgtggctggtctgaaaaatgcaccaagtgaccaacttataaatatttttgaatcttgtgtgcgtaatcctgtggaaaacattatgaaaatactaaaaggaataggagagactttctgtcaacactatactcaatcaacagatgaacagccaggatctcacatagactttgctgtaaacagactaaagctggcagaaattttgtattataaaatactagagactgtaatggttcaggaaacacgaagacttcatggaatggacatgtcagttcttttagagcaagatatatttcatcgttccttgatggcttgttgtttggaaattgtgctctttgcctatagctcacctcgtacttttccttggattattgaagttctcaacttgcaaccattttacttttataaggttattgaggtggtgatccgctcagaagaggggctctcaagggacatggtgaaacacctaaacagcattgaagaacagattttggagagtttagcatggagtcacgattctgcactgtgggaggctctccaggtttctgcaaacaaagttcctacctgtgaagaagttatattcccaaataactttgaaacaggaaatggaggaaatgtgcagggacatcttcccctgatgccaatgtctcctctaatgcacccaagagtcaaggaagttcgaactgacagtgggagtcttcgaagagatatgcaaccattgtctccaatttctgtccatgaacgctacagttctcctaccgcagggagtgctaagagaagactctttggagaggaccccccaaaggaaatgcttatggacaagatcataacagaaggaacaaaattgaaaatcgctccttcttcaagcattactgctgaaaatgtatcaattttacctggtcaaactcttctaacaatggccacagccccagtaacaggaacaacaggacataaagttacaattccattacatggtgtcgcaaatgatgctggagagatcacactgatacctctttccatgaatacaaatcaggagtccaaagtcaagagtcctgtatcacttactgctcattcattaattggtgcttctccaaaacagaccaatctgactaaagcacaagaggtacattcaactggaataaacaggccaaagagaactgggtccttagcactattttacagaaaggtctatcatttggcaagtgtacgcttacgtgatctatgtctaaaactggatgtttcaaatgagttacgaaggaagatatggacgtgttttgaattcactttagttcactgtcctgatctaatgaaagacaggcatttggatcagctcctcctttgtgccttttatatcatggcaaaggtaacaaaagaagaaagaacttttcaagaaattatgaaaagttataggaatcagccccaagctaatagtcacgtatatagaagtgttctgctgaaaagtattccaagagaagttgtggcatataataaaaatataaatgatgactttgaaatgatagattgtgacttagaagatgctacaaaaacacctgactgttccagtggaccagtgaaagaggaaagaggtgatcttataaaattttacaatacaatatatgtaggaagagtgaagtcatttgcactgaaatacgacttggcgaatcaggaccatatgatggatgctccaccactctctccttttccacatattaaacaacagccaggctcaccacgccgcatttcccagcagcactccatttatatttccccgcacaagaatgggtcaggccttacaccaagaagcgctctgctgtacaagttcaatggcagcccttctaaggtaaggtgaataggctaaaagttggatttcagattaacagtcagtaactgttaatcctgcctctttttttttttttcttttttggccaagttactactatactaataaaatatgaaatgttaactatg

SEQ ID NO: 3641 - DNA, 5684 bp, Homo sapiens
  source 1..5684: mol_type = genomic DNA
gggtagcgcgcctgggagggagaaagaagtcgggggccgtggcgcgcagcccgcggggcctgaagggatgttcgaggacaagccccacgctgagggggcggcggtggtcgccgcagccggggaggcgctacaggccctgtgccaggagctgaacctggacgaggggagcgcggccgaagccctggacgactttactgccatccgaggcaactacagcctagagggagaagttacacactggttggcatgttcattatatgttgcatgccgcaaaagcattattcccacggttggaaagggtatcatggaaggcaactgtgtttcacttaccagaatactacgttcagctaaattaagtttaatacaattttttagtaaaatgaagaaatggatggacatgtcaaatctaccacaagaatttcgtgaacgtatagaaaggctagagagaaattttgaggtgtctactgtaatattcaaaaaatatgagccaatttttttagatatatttcaaaatccatatgaagaaccaccaaagttaccacgaagccggaagcagaggaggattccttgcagtgttaaggatctgtttaatttctgttggacactttttgtttatactaagggtaattttcggatgattggggatgacttagtaaactcttatcatttacttctatgctgcttggatctgatttttgccaatgcgattatgtgcccaaatagacaagacttgctaaatccatcatttaaaggtttaccatctgattttcatactgctgactttacggcttctgaagagccaccctgcatcattgctgtactgtgtgaactgcatgatggacttctcgtagaagcaaaaggaataaaggagcactactttaagccatatatttcaaaactctttgacaggaagatattaaaaggagaatgcctcctggacctttcaagttttactgataatagcaaagcagtgaataaggagtatgaagagtatgttctaactgttggtgattttgatgagaggatctttttgggagcagacgcagaagaggaaattggaacacctcgaaagttcactcgtgacaccccattagggaaactgacagcacaggctaatgtggagtataaccttcaacagcactttgaaaaaaaaaggtcatttgcaccttctaccccactgaccggacggagatatttacgagaaaaagaagcagtcattactcctgttgcatcagccacccaaagtgtgagccggttacagagtattgtggctggtctgaaaaatgcaccaagtgaccaacttataaatatttttgaatcttgtgtgcgtaatcctgtggaaaacattatgaaaatactaaaaggaataggagagactttctgtcaacactatactcaatcaacagatgaacagccaggatctcacatagactttgctgtaaacagactaaagctggcagaaattttgtattataaaatactagagactgtaatggttcaggaaacacgaagacttcatggaatggacatgtcagttcttttagagcaagatatatttcatcgttccttgatggcttgttgtttggaaattgtgctctttgcctatagctcacctcgtacttttccttggattattgaagttctcaacttgcaaccattttacttttataaggttattgaggtggtgatccgctcagaagaggggctctcaagggacatggtgaaacacctaaacagcattgaagaacagattttggagagtttagcatggagtcacgattctgcactgtgggaggctctccaggtttctgcaaacaaagttcctacctgtgaagaagttatattcccaaataactttgaaacaggaaatggaggaaatgtgcagggacatcttcccctgatgccaatgtctcctctaatgcacccaagagtcaaggaagttcgaactgacagtgggagtcttcgaagagatatgcaaccattgtctccaatttctgtccatgaacgctacagttctcctaccgcagggagtgctaagagaagactctttggagaggaccccccaaaggaaatgcttatggacaagatcataacagaaggaacaaaattgaaaatcgctccttcttcaagcattactgctgaaaatgtatcaattttacctggtcaaactcttctaacaatggccacagccccagtaacaggaacaacaggacataaagttacaattccattacatggtgtcgcaaatgatgctggagagatcacactgatacctctttccatgaatacaaatcaggagtccaaagtcaagagtcctgtatcacttactgctcattcattaattggtgcttctccaaaacagaccaatctgactaaagcacaagaggtacattcaactggaataaacaggccaaagagaactgggtccttagcactattttacagaaaggtctatcatttggcaagtgtacgcttacgtgatctatgtctaaaactggatgtttcaaatgagttacgaaggaagatatggacgtgttttgaattcactttagttcactgtcctgatctaatgaaagacaggcatttggatcagctcctcctttgtgccttttatatcatggcaaaggtaacaaaagaagaaagaacttttcaagaaattatgaaaagttataggaatcagccccaagctaatagtcacgtatatagaagtgttctgctgaaaagtattccaagagaagttgtggcatataataaaaatataaatgatgactttgaaatgatagattgtgacttagaagatgctacaaaaacacctgactgttccagtggaccagtgaaagaggaaagaggtgatcttataaaattttacaatacaatatatgtaggaagagtgaagtcatttgcactgaaatacgacttggcgaatcaggaccatatgatggatgctccaccactctctccttttccacatattaaacaacagccaggctcaccacgccgcatttcccagcagcactccatttatatttccccgcacaagaatgggtcaggccttacaccaagaagcgctctgctgtacaagttcaatggcagcccttctaagagtttgaaagatatcaacaacatgataaggcaaggtgagcagagaaccaagaagcgagtaatagccatcgatagtgatgcagaatcccctgccaaacgcgtctgtcaagaaaatgatgacgttttactgaaacgactacaggatgttgtcagtgaaagagcaaatcattaatgttgttcttgtttctatgataaaagcactttcagattgttctgcagaaagttggagctctgtccttcaaaccttttagccctatagatgataaatatcactgggttataagaaaaaattgcacaaaaattatgtgctttttaaaatatttatccaaaatgtagttgacagagatgtattttgagttggattggaaaggaatattttaagtgccttttaaaaatactaatagtccggccaggcgctgtggctcacgcctgtaatcccaggactttgggaggccaaggcgggcagatcaccggaggtcaggagttcgagaccagcctgaccaacatggagaaaccccatctctactaaaaatacaaaattagccgggtgtggtggcgcatgcctgtaatcccagctacttgggaggctgaggcagaattgcttgaacccaggaagcggaggttgtggtgagccaaggttgcgccactgcactccagcctgggcaacaagagtaaaactccatctcaaaaaatatatatatatatataaatagggaattttttttaatgtttgctccttgagttttcaagatgaaataaggagaaaccccataactttttagctctcttttaaaaataaatgtctccttctgtgttctgtaatatgaggataaataatctacttttgatagcatgctttgagatatttgtattcttaatttaatattgaaggaaggggttggttcccatagtacctggccagagggttatataccatcctgtctctggcccactgtggtaattccacatccaggtaccaccgccattcagagttgtctcaccccttctcgtgccttttctctccttgagctttataaacagatttgtacctgagccccagtgctacactcatccttgctttccagccctaagccatctcagcctgatgtcacaacccaataaatggggcactttcttcttttgtaaactattatcattttggtttctgtgacattaacttaattatatatgatcgtattaactcatgtagttctcaaaataggcagctgcttctgaagccagtaaaataaaattcagttagttattaaaaactaaattcctattagtaaggtaacaccatgattatgtgtgatatactgtttttgagatcatagttatcagtcattctcaatatctaattgagtccctaagaatattttaaaccttttaaaaatcacataaatatcatctcatgcctcataattctaatatatttaatacatcagtaaaatagctgcttattacttcccacactttgttctcagtattgttagtgcatcatgagtttcctgctagtgtttgaccactgggtactcctgaagatgttttttagtactagggatgcttttcagtattagggatgcttttttcagtactagggatgtactagggagtactgagtactcctgaagatgtttttcagtactagggatgcttttttcagtgttagggatgcttttcagtactagggatgcttttttcagtgctagggatgcttttcagtactagggatgctttccaaaatatcacctctttaacgtttactttttctagtgtgtgtctggaatccaaaggacatgaataagccactcataattaattttgagaagttttatcaaatgtttatgtttctaactgcaaaccttaattttggaaaggcacaatgtttaactcacctatgtttaaccatggctaatttaaaatagtctaagatttggccgtcactaattagtattctcaagaatttcatttttcaattttaagaagaaaagggattttggtcacattttgcttgtaaatgaaaattacatcctcattctttgtgtagtatctacacattgttataagccaaaaaacaaagtctgtctggaatctttgtacatatttgtatgttgctataattgttatttttatcttcattattgtgcaaaatataaatgagcatttgtacattgactgtataagaaaccatgggccaggtcctgtggctcatgcctataatcccaacactttgggaggctgaggcaggaggattgcttcagtccaggagttcaagactaacctgggcaacatagccctcatctctacaaaaaataaaaaaattagttgggtgtgatggcatgtgcctgtagtcccagctactcaggagactgacatgagaggatcacttgagactgggagattctgaggctgcagtgagctgtgattgcaccactacactccatcctaggtgagagggcaagaccctttctcagaaaaggaaaaaaagaaattctggacatgtttttatcagttttcaggacttggtatcaatgtacatagaatggctaataaaaattggaattgagattattgaaaaaaaa

SEQ ID NO: 3642 - DNA, 4876 bp, Homo sapiens
  source 1..4876: mol_type = genomic DNA
gcggcgcaggcgcggtgcgggcggcggacgggcgggcgcttcgccgtttgaatggctgcgggcccgggccctcacctcacctgaggtccggccgcccaggggtgcgctatgccgtcgggaggtgaccagtcgccaccgcccccgcctccccctccggcggcggcagcctcggatgaggaggaggaggacgacggcgaggcggaagacgccgcgccgcctgccgagtcgcccacccctcagatccagcagcggttcgacgagctgtgcagccgcctcaacatggacgaggcggcgcgggccgaggcctgggacagctaccgcagcatgagcgaaagctacacgctggagggaaatgatcttcattggttagcatgtgccttatatgtggcttgcagaaaatctgttccaactgtaagcaaagggacagtggaaggaaactatgtatctttaactagaatcctgaaatgttcagagcagagcttaatcgaattttttaataagatgaagaagtgggaagacatggcaaatctacccccacatttcagagaacgtactgagagattagaaagaaacttcactgtttctgctgtaatttttaagaaatatgaacccatttttcaggacatctttaaataccctcaagaggagcaacctcgtcagcagcgaggaaggaaacagcggcgacagccctgtactgtgtctgaaattttccatttttgttgggtgctttttatatatgcaaaaggtaatttccccatgattagtgatgatttggtcaattcttatcacctgctgctgtgtgctttggacttagtttatggaaatgcacttcagtgttctaatcgtaaagaacttgtgaaccctaattttaaaggcttatctgaagattttcatgctaaagattctaaaccttcctctgaccccccttgtatcattgagaaactgtgttccttacatgatggcctagttttggaagcaaaggggataaaggaacatttctggaaaccctatattaggaaactttatgaaaaaaagctccttaagggaaaagaagaaaatctcactgggtttctagaacctgggaactttggagagagttttaaagccatcaataaggcctatgaggagtatgttttatctgttgggaatttagatgagcggatatttcttggagaggatgctgaggaggaaattgggactctctcaaggtgtctgaacgctggttcaggaacagagactgctgaaagggtgcagatgaaaaacatcttacagcagcattttgacaagtccaaagcacttagaatctccacaccactaactggtgttaggtacattaaggagaatagcccttgtgtgactccagtttctacagctacgcatagcttgagtcgtcttcacaccatgctgacaggcctcaggaatgcaccaagtgagaaactggaacagattctcaggacatgttccagagatccaacccaggctattgctaacagactgaaagaaatgtttgaaatatattctcagcatttccagccagacgaggatttcagtaattgtgctaaagaaattgccagcaaacattttcgttttgcggagatgctttactataaagtattagaatctgttattgagcaggaacaaaaaagactaggagacatggatttatctggtattctggaacaagatgcgttccacagatctctcttggcctgctgccttgaggtcgtcactttttcttataagcctcctgggaattttccatttattactgaaatatttgatgtgcctctttatcatttttataaggtgatagaagtattcattagagcagaagatggcctttgtagagaggtggtaaaacaccttaatcagattgaagaacagatcttagatcatttggcatggaaaccagagtctccactctgggaaaaaattagagacaatgaaaacagagttcctacatgtgaagaggtcatgccacctcagaacctggaaagggcagatgaaatttgcattgctggctcccctttgactcccagaagggtgactgaagttcgtgctgatactggaggacttggaaggagcataacatctccaaccacattatacgataggtacagctccccaccagccagcactaccagaaggcggctatttgttgagaatgatagcccctctgatggagggacgcctgggcgcatgcccccacagcccctagtcaatgctgtccctgtgcagaatgtatctggggagactgtttctgtcacaccagttcctggacagactttggtcaccatggcaaccgccactgtcacagccaacaatgggcaaacggtaaccattcctgtgcaaggtattgccaatgaaaatggagggataacattcttccctgtccaagtcaatgttggggggcaggcacaagctgtgacaggctccatccagcccctcagtgctcaggccctggctggaagtctgagctctcaacaggtgacaggaacaactttgcaagtccctggtcaagtggccattcaacagatttccccaggtggccaacagcagaagcaaggccagtctgtaaccagcagtagtaatagacccaggaagaccagctctttatcgcttttctttagaaaggtataccatttagcagctgtccgccttcgggatctctgtgccaaactagatatttcagatgaattgaggaaaaaaatctggacctgctttgaattctccataattcagtgtcctgaacttatgatggacagacatctggaccagttattaatgtgtgccatttatgtgatggcaaaggtcacaaaagaagataagtccttccagaacattatgcgttgttataggactcagccgcaggcccggagccaggtgtatagaagtgttttgataaaagggaaaagaaaaagaagaaattctggcagcagtgatagcagaagccatcagaattctccaacagaactaaacaaagatagaaccagtagagactccagtccagttatgaggtcaagcagcaccttgccagttccacagcccagcagtgctcctcccacacctactcgcctcacaggtgccaacagtgacatggaagaagaggagaggggagacctcattcagttctacaacaacatctacatcaaacagattaagacatttgccatgaagtactcacaggcaaatatggatgctcctccactctctccctatccatttgtaagaacaggctcccctcgccgaatacagttgtctcaaaatcatcctgtctacatttccccacataaaaatgaaacaatgctttctcctcgagaaaagattttctattacttcagcaacagtccttcaaagagactgagagaaattaatagtatgatacgcacaggagaaactcctactaaaaagagaggaattcttttggaagatggaagtgaatcacctgcaaaaagaatttgcccagaaaatcattctgccttattacgccgtctccaagatgtagctaatgaccgtggttcccactgaggttagtctcttgtattaaactcttcacaaaatctgtttagcagcagcctttaatgcatctagattatggagcttttttccttaatccagctgatgagttacagcctgttagtaacatgaggggacattttggtgagaaatgggacttaactccttccagtgtccttagaacattttaattcatcccaactgtctttttttccctaccattcagtgattactgtcaaggctgcttagaatccaaacttggatttttgactctggcaaagcttttagaaatactgcaagaaaatgatgtgtacccaaacgtgagcataggaggcttctgttgacgtactccaacagaagaactgtgtttcaagttcaatcctacctgttttgtggtcagctgtagtcctcataaaaagcaaaacaaaaattaggtattttgtcctaaaacacctggtaggagtgtgtgattttttgcattcctgacaaaggagagcacacccaggtttggaggtcctaggtcattagccctcgtctcccgttccctttgtgcacatcttccctctccccattcggtgtggtgcagtgtgaaaagtccttgattgttcgggtgtgcaatgtctgagtgaacctgtataagtggaggcactttagggctgtaaaatgcatgattttgtaacccagattttgctgtatatttgtgatagcactttctacaatgtgaactttattaaatacaaaacttccaggctaaacatccaatattttctttaatgcttttatatttttttaaaatgttaaaacccctatagccaccttttgggaatgttttaaattctccagttttttgttatatagggatcaaccagctaagaaaagattttaatcaagttgaattgaggggattaatatgaaaacttatgacctcttcctttaggagggagttatctaaaagaaatgtctattaaggtgatatatttaaaaatatttttgggtgttcctggcagtttaaaaaaattggttggagaatttaggtttttattagtaccatagtaccatttatacaaattagaaaatgttatttaacagctgaattatctatacatatctttattaatcactattgttccagcagttttcaagtcaaattaataatcttattagggagaaaattcaattgtaaattgaatcagtataaacaaagttactaggtaacttcatattgctgagagaaatatggaacttacattgttcaattagaatagtgttctgcaaaaatatttataaaacttctcaagatactgctactgtaattttatatgaagataagtgtatttttcaataaagcatttataaatta

SEQ ID NO: 3643 - DNA, 4465 bp, Homo sapiens
  source 1..4465: mol_type = genomic DNA
gagagcttacagtacagtcagcgagatgaggcaggtatgaagattccagtgcatgcaatgcagtgtgttataaaagtcccatgactaccagagggaatacagatgtaaaacttaggaggaaaagaaatcactctggatgagccagtcaggcgacagccctgtactgtgtctgaaattttccatttttgttgggtgctttttatatatgcaaaaggtaatttccccatgattagtgatgatttggtcaattcttatcacctgctgctgtgtgctttggacttagtttatggaaatgcacttcagtgttctaatcgtaaagaacttgtgaaccctaattttaaaggcttatctgaagattttcatgctaaagattctaaaccttcctctgaccccccttgtatcattgagaaactgtgttccttacatgatggcctagttttggaagcaaaggggataaaggaacatttctggaaaccctatattaggaaactttatgaaaaaaagctccttaagggaaaagaagaaaatctcactgggtttctagaacctgggaactttggagagagtttatggagtctcgctgtgtcgcccaggctggaatgcagtggcatgatctcggctcactgcaacctctgcctcccaggttcaagcgattcttctgcctcagcctcctgagtagctgtgaatacagtaaagccatcaataaggcctatgaggagtatgttttatctgttgggaatttagatgagcggatatttcttggagaggatgctgaggaggaaattgggactctctcaaggtgtctgaacgctggttcaggaacagagactgctgaaagggtgcagatgaaaaacatcttacagcagcattttgacaagtccaaagcacttagaatctccacaccactaactggtgttaggtacattaaggagaatagcccttgtgtgactccagtttctacagctacgcatagcttgagtcgtcttcacaccatgctgacaggcctcaggaatgcaccaagtgagaaactggaacagattctcaggacatgttccagagatccaacccaggctattgctaacagactgaaagaaatgtttgaaatatattctcagcatttccagccagacgaggatttcagtaattgtgctaaagaaattgccagcaaacattttcgttttgcggagatgctttactataaagtattagaatctgttattgagcaggaacaaaaaagactaggagacatggatttatctggtattctggaacaagatgcgttccacagatctctcttggcctgctgccttgaggtcgtcactttttcttataagcctcctgggaattttccatttattactgaaatatttgatgtgcctctttatcatttttataaggtgatagaagtattcattagagcagaagatggcctttgtagagaggtggtaaaacaccttaatcagattgaagaacagatcttagatcatttggcatggaaaccagagtctccactctgggaaaaaattagagacaatgaaaacagagttcctacatgtgaagaggtcatgccacctcagaacctggaaagggcagatgaaatttgcattgctggctcccctttgactcccagaagggtgactgaagttcgtgctgatactggaggacttggaaggagcataacatctccaaccacattatacgataggtacagctccccaccagccagcactaccagaaggcggctatttgttgagaatgatagcccctctgatggagggacgcctgggcgcatgcccccacagcccctagtcaatgctgtccctgtgcagaatgtatctggggagactgtttctgtcacaccagttcctggacagactttggtcaccatggcaaccgccactgtcacagccaacaatgggcaaacggtaaccattcctgtgcaaggtattgccaatgaaaatggagggataacattcttccctgtccaagtcaatgttggggggcaggcacaagctgtgacaggctccatccagcccctcagtgctcaggccctggctggaagtctgagctctcaacaggtgacaggaacaactttgcaagtccctggtcaagtggccattcaacagatttccccaggtggccaacagcagaagcaaggccagtctgtaaccagcagtagtaatagacccaggaagaccagctctttatcgcttttctttagaaaggtataccatttagcagctgtccgccttcgggatctctgtgccaaactagatatttcagatgaattgaggaaaaaaatctggacctgctttgaattctccataattcagtgtcctgaacttatgatggacagacatctggaccagttattaatgtgtgccatttatgtgatggcaaaggtcacaaaagaagataagtccttccagaacattatgcgttgttataggactcagccgcaggcccggagccaggtgtatagaagtgttttgataaaagggaaaagaaaaagaagaaattctggcagcagtgatagcagaagccatcagaattctccaacagaactaaacaaagatagaaccagtagagactccagtccagttatgaggtcaagcagcaccttgccagttccacagcccagcagtgctcctcccacacctactcgcctcacaggtgccaacagtgacatggaagaagaggagaggggagacctcattcagttctacaacaacatctacatcaaacagattaagacatttgccatgaagtactcacaggcaaatatggatgctcctccactctctccctatccatttgtaagaacaggctcccctcgccgaatacagttgtctcaaaatcatcctgtctacatttccccacataaaaatgaaacaatgctttctcctcgagaaaagattttctattacttcagcaacagtccttcaaagagactgagagaaattaatagtatgatacgcacaggagaaactcctactaaaaagagaggaattcttttggaagatggaagtgaatcacctgcaaaaagaatttgcccagaaaatcattctgccttattacgccgtctccaagatgtagctaatgaccgtggttcccactgaggttagtctcttgtattaaactcttcacaaaatctgtttagcagcagcctttaatgcatctagattatggagcttttttccttaatccagctgatgagttacagcctgttagtaacatgaggggacattttggtgagaaatgggacttaactccttccagtgtccttagaacattttaattcatcccaactgtctttttttccctaccattcagtgattactgtcaaggctgcttagaatccaaacttggatttttgactctggcaaagcttttagaaatactgcaagaaaatgatgtgtacccaaacgtgagcataggaggcttctgttgacgtactccaacagaagaactgtgtttcaagttcaatcctacctgttttgtggtcagctgtagtcctcataaaaagcaaaacaaaaattaggtattttgtcctaaaacacctggtaggagtgtgtgattttttgcattcctgacaaaggagagcacacccaggtttggaggtcctaggtcattagccctcgtctcccgttccctttgtgcacatcttccctctccccattcggtgtggtgcagtgtgaaaagtccttgattgttcgggtgtgcaatgtctgagtgaacctgtataagtggaggcactttagggctgtaaaatgcatgattttgtaacccagattttgctgtatatttgtgatagcactttctacaatgtgaactttattaaatacaaaacttccaggctaaacatccaatattttctttaatgcttttatatttttttaaaatgttaaaacccctatagccaccttttgggaatgttttaaattctccagttttttgttatatagggatcaaccagctaagaaaagattttaatcaagttgaattgaggggattaatatgaaaacttatgacctcttcctttaggagggagttatctaaaagaaatgtctattaaggtgatatatttaaaaatatttttgggtgttcctggcagtttaaaaaaattggttggagaatttaggtttttattagtaccatagtaccatttatacaaattagaaaatgttatttaacagctgaattatctatacatatctttattaatcactattgttccagcagttttcaagtcaaattaataatcttattagggagaaaattcaattgtaaattgaatcagtataaacaaagttactaggtaacttcatattgctgagagaaatatggaacttacattgttcaattagaatagtgttctgcaaaaatatttataaaacttctcaagatactgctactgtaattttatatgaagataagtgtatttttcaataaagcatttataaat

SEQ ID NO: 3644 - DNA, 1995 bp, Homo sapiens
  source 1..1995: mol_type = genomic DNA
atttaaacctgaggccatttgatttctcaagtcgttttataattaatttgtagaaagagtcgggcaaataggtccaggatgcaaagcctaaccaagggaaatgatcttcattggttagcatgtgccttatatgtggcttgcagaaaatctgttccaactgtaagcaaagggacagtggaaggaaactatgtatctttaactagaatcctgaaatgttcagagcagagcttaatcgaattttttaataagatgaagaagtgggaagacatggcaaatctacccccacatttcagagaacgtactgagagattagaaagaaacttcactgtttctgctgtaatttttaagaaatatgaacccatttttcaggacatctttaaataccctcaagaggagcaacctcgtcagcagcgaggaaggaaacagcggcgacagccctgtactgtgtctgaaattttccatttttgttgggtgctttttatatatgcaaaaggtaatttccccatgattagtgatgatttggtcaattcttatcacctgctgctgtgtgctttggacttagtttatggaaatgcacttcagtgttctaatcgtaaagaacttgtgaaccctaattttaaaggcttatctgaagattttcatgctaaagattctaaaccttcctctgaccccccttgtatcattgagaaactgtgttccttacatgatggcctagttttggaagcaaaggggataaaggaacatttctggaaaccctatattaggaaactttatgaaaaaaagctccttaagggaaaagaagaaaatctcactgggtttctagaacctgggaactttggagagagttttaaagccatcaataaggcctatgaggagtatgttttatctgttgggaatttagatgagcggatatttcttggagaggatgctgaggaggaaattgggactctctcaaggtgtctgaacgctggttcaggaacagagactgctgaaagggtgcagatgaaaaacatcttacagcagcattttgacaagtccaaagcacttagaatctccacaccactaactggtgttaggtacattaaggagaatagcccttgtgtgactccagtttctacagctacgcatagcttgagtcgtcttcacaccatgctgacaggcctcaggaatgcaccaagtgagaaactggaacagattctcaggacatgttccagagatccaacccaggctattgctaacagactgaaagaaatgtttgaaatatattctcagcatttccagccagacgaggatttcagtaattgtgctaaagaaattgccagcaaacattttcgttttgcggagatgctttactataaagtattagaatctgttattgagcaggaacaaaaaagactaggagacatggatttatctggtattctggaacaagatgcgttccacagatctctcttggcctgctgccttgaggtcgtcactttttcttataagcctcctgggaattttccatttattactgaaatatttgatgtgcctctttatcatttttataaggtgatagaagtattcattagagcagaagatggcctttgtagagaggtggtaaaacaccttaatcagattgaagaacagatcttagatcatttggcatggaaaccagagtctccactctgggaaaaaattagagacaatgaaaacagagttcctacatgtgaagaggtcatgccacctcagaacctggaaagggcagatgaaatttgcattgctggctcccctttgactcccagaagggtgactgaagttcgtgctgatactggaggacttggaaggagcataacatctccaaccacattatacgataggtacagctccccaccagccagcactaccagaaggcggctatttgttgagaatgatagcccctctgatggagggacgcctgggcgcatgcccccacagcccctagtcaatgctgtccctgtgcagaatgtatct

SEQ ID NO: 3645 - DNA, 2098 bp, Homo sapiens
  source 1..2098: mol_type = genomic DNA
acacatgaggaaccaagtatattttaatattaaacctctttatagaagaaccaagcaagttggtttggctgtatcaatgcacagtttaatgtgttgattatcgtttgcctctttggcagagaagaatttttttttctctttagttcatttaagttgatttgttgaatgtttccatctatacaaaaaaagaattgctttgtatacgctgaggtaatttccccatgattagtgatgatttggtcaattcttatcacctgctgctgtgtgctttggacttagtttatggaaatgcacttcagtgttctaatcgtaaagaacttgtgaaccctaattttaaaggcttatctgaagattttcatgctaaagattctaaaccttcctctgaccccccttgtatcattgagaaactgtgttccttacatgatggcctagttttggaagcaaaggggataaaggaacatttctggaaaccctatattaggaaactttatgaaaaaaagctccttaagggaaaagaagaaaatctcactgggtttctagaacctgggaactttggagagagttttaaagccatcaataaggcctatgaggagtatgttttatctgttgggaatttagatgagcggatatttcttggagaggatgctgaggaggaaattgggactctctcaaggtgtctgaacgctggttcaggaacagagactgctgaaagggtgcagatgaaaaacatcttacagcagcattttgacaagtccaaagcacttagaatctccacaccactaactggtgttaggtacattaaggagaatagcccttgtgtgactccagtttctacagctacgcatagcttgagtcgtcttcacaccatgctgacaggcctcaggaatgcaccaagtgagaaactggaacagattctcaggacatgttccagagatccaacccaggctattgctaacagactgaaagaaatgtttgaaatatattctcagcatttccagccagacgaggatttcagtaattgtgctaaagaaattgccagcaaacattttcgttttgcggagatgctttactataaagtattagaatctgttattgagcaggaacaaaaaagactaggagacatggatttatctggtattctggaacaagatgcgttccacagatctctcttggcctgctgccttgaggtcgtcactttttcttataagcctcctgggaattttccatttattactgaaatatttgatgtgcctctttatcatttttataaggtgatagaagtattcattagagcagaagatggcctttgtagagaggtggtaaaacaccttaatcagattgaagaacagatcttagatcatttggcatggaaaccagagtctccactctgggaaaaaattagagacaatgaaaacagagttcctacatgtgaagaggtcatgccacctcagaacctggaaagggcagatgaaatttgcattgctggctcccctcgccgaatacagttgtctcaaaatcatcctgtctacatttccccacataaaaatgaaacaatgctttctcctcgagaaaagattttctattacttcagcaacagtccttcaaagagactgagagaaattaatagtatgatacgcacaggagaaactcctactaaaaagagaggaattcttttggaagatggaagtgaatcacctgcaaaaagaatttgcccagaaaatcattctgccttattacgccgtctccaagatgtagctaatgaccgtggttcccactgaggttagtctcttgtattaaactcttcacaaaatctgtttagcagcagcctttaatgcatctagattatggagcttttttccttaatccagctgatgagttacagcctgttagtaacatgaggggacattttggtgagaaatgggacttaactccttccagtgtccttagaacattttaattcatcccaactgtctttttttccctaccattcagtgattactgtcaaggctgcttagaatccaaacttggatttttgactctggcaaagcttttagaaatactgcaagaaaatgatgtgtacccaaacgtgagcatagga

SEQ ID NO: 3646 - DNA, 3084 bp, Homo sapiens
  source 1..3084: mol_type = genomic DNA
tctttgccaaaggggggaccagaattcccccatgcgagctgtttgaggactgggatgccgagaacgcgagcgatccgagcagggtttgtctgggcaccgtcggggtaggatccggaacgcattcggaaggctttttgcaagcatttacttggaaggagaacttgggatctttctgggaaccccccgccccggctggattggccgagcaagcctggaaaatggtaaatgatcatttggatcaattacaggcttttagctggcttgtctgtcataattcatgattcggggctgggaaaaagaccaacagcctacgtgccaaaaaaggggcagagtttgatggagttgggtggacttttctatgccatttgcctccacacctagaggataagcacttttgcagacattcagtgcaagggagatcatgtttgactgtatggatgttctgtcagtgagtcctgggcaaatcctggatttctacactgcgagtccgtcttcctgcatgctccaggagaaagctctcaaagcatgcttcagtggattgacccaaaccgaatggcagcatcggcacactgctcaatcaattgaaacacagagcaccagctctgaggaactcgtcccaagccccccatctccacttcctccccctcgagtgtacaaaccctgcttcgtctgccaggacaaatcatcagggtaccactatggggtcagcgcctgtgagggatgtaagggctttttccgcagaagtattcagaagaatatgatttacacttgtcaccgagataagaactgtgttattaataaagtcaccaggaatcgatgccaatactgtcgactccagaagtgctttgaagtgggaatgtccaaagaatctgtcaggaatgacaggaacaagaaaaagaaggagacttcgaagcaagaatgcacagagagctatgaaatgacagctgagttggacgatctcacagagaagatccgaaaagctcaccaggaaactttcccttcactctgccagctgggtaaatacaccacgaattccagtgctgaccatcgagtccgactggacctgggcctctgggacaaattcagtgaactggccaccaagtgcattattaagatcgtggagtttgctaaacgtctgcctggtttcactggcttgaccatcgcagaccaaattaccctgctgaaggccgcctgcctggacatcctgattcttagaatttgcaccaggtataccccagaacaagacaccatgactttctcagacggccttaccctaaatcgaactcagatgcacaatgctggatttggtcctctgactgaccttgtgttcacctttgccaaccagctcctgcctttggaaatggatgacacagaaacaggccttctcagtgccatctgcttaatctgtggagaccgccaggaccttgaggaaccgacaaaagtagataagctacaagaaccattgctggaagcactaaaaatttatatcagaaaaagacgacccagcaagcctcacatgtttccaaagatcttaatgaaaatcacagatctccgtagcatcagtgctaaaggtgcagagcgtgtaattaccttgaaaatggaaattcctggatcaatgccacctctcattcaagaaatgctggagaattctgaaggacatgaacccttgaccccaagttcaagtgggaacacagcagagcacagtcctagcatctcacccagctcagtggaaaacagtggggtcagtcagtcaccactcgtgcaataagacattttctagctacttcaaacattccccagtaccttcagttccaggatttaaaatgcaagaaaaaacatttttactgctgcttagtttttggactgaaaagatattaaaactcaagaaggaccaagaagttttcatatgtatcaatatatatactcctcactgtgtaacttacctagaaatacaaacttttccaattttaaaaaatcagccatttcatgcaaccagaaactagttaaaagcttctattttcctctttgaacactcaagattgcatggcaaagacccagtcaaaatgatttacccctggttaagtttctgaagactttgtacatacagaagtatggctctgttctttctatactgtatgtttggtgctttccttttgtcttgcatactcaaaataaccatgacaccaaggttatgaaatagactactgtacacgtctacctaggttcaaaaagataactgtcttgctttcatggaatagtcaagacatcaaggtaaggaaacaggactattgacaggactattgtacagtatgacaagataaggctgaagatattctactttagttagtatggaagcttgtctttgctctttctgatgctctcaaactgcatcttttatttcatgttgcccagtaaaagtatacaaattccctgcactagcagaagagaattctgtatcagtgtaactgccagttcagttaatcaaatgtcatttgttcaattgttaatgtcactttaaattaaaagtggtttattacttgtttaatgacataactacacagttagttaaaaaaaatttttttacagtaatgatagcctccaaggcagaaacacttttcagtgttaagtttttgtttacttgttcacaagccattagggaaatttcatgggataattagcaggctggtctaccacctggaccatgtaactctagtgtccttcctgattcatgcctgatattgggatttttttttccagccttcttgatgccaaggggctaattaatattaacaactcccaaagaaacaggcatagaatctgcctcctttgaccttgttcaatcactatgaagcagagtgaaagctgtggtagagtggttaacagatacaagtgtcagtttcttagttctcatttaagcactagtggaattttttttttttgatatattagcaagtctgtgatgtactttcactggctctgtttgtacattgagattgtttgtttaacaatgctttctatgttcatatactgtttacctttttccatggagtctcctggcaaagaataaaatatatttattttaaa

SEQ ID NO: 3647 - DNA, 1368 bp, Homo sapiens
  source 1..1368: mol_type = genomic DNA
atgaccaccagcggccacgcatgtccggtcccagcagtgaacggacacatgactcactatccagccacaccctacccgttactctttccacctgtcatcggaggactttccctgcctcccctccatggccttcatggacatccgcctccgagtggatgcagcaccccgtcgccggcaacaattgaaacacagagcaccagctctgaggaactcgtcccaagccccccatctccacttcctccccctcgagtgtacaaaccctgcttcgtctgccaggacaaatcatcagggtaccactatggggtcagcgcctgtgagggatgtaagggctttttccgcagaagtattcagaagaatatgatttacacttgtcaccgagataagaactgtgttattaataaagtcaccaggaatcgatgccaatactgtcgactccagaagtgctttgaagtgggaatgtccaaagaatctgtcaggaatgacaggaacaagaaaaagaaggagacttcgaagcaagaatgcacagagagctatgaaatgacagctgagttggacgatctcacagagaagatccgaaaagctcaccaggaaactttcccttcactctgccagctgggtaaatacaccacgaattccagtgctgaccatcgagtccgactggacctgggcctctgggacaaattcagtgaactggccaccaagtgcattattaagatcgtggagtttgctaaacgtctgcctggtttcactggcttgaccatcgcagaccaaattaccctgctgaaggccgcctgcctggacatcctgattcttagaatttgcaccaggtataccccagaacaagacaccatgactttctcagacggccttaccctaaatcgaactcagatgcacaatgctggatttggtcctctgactgaccttgtgttcacctttgccaaccagctcctgcctttggaaatggatgacacagaaacaggccttctcagtgccatctgcttaatctgtggagaccgccaggaccttgaggaaccgacaaaagtagataagctacaagaaccattgctggaagcactaaaaatttatatcagaaaaagacgacccagcaagcctcacatgtttccaaagatcttaatgaaaatcacagatctccgtagcatcagtgctaaaggtgcagagcgtgtaattaccttgaaaatggaaattcctggatcaatgccacctctcattcaagaaatgctggagaattctgaaggacatgaacccttgaccccaagttcaagtgggaacacagcagagcacagtcctagcatctcacccagctcagtggaaaacagtggggtcagtcagtcaccactcgtgcaataa

SEQ ID NO: 3648 - DNA, 2775 bp, Homo sapiens
  source 1..2775: mol_type = genomic DNA
gtgacagaagtagtaggaagtgagctgttcagaggcaggagggtctattctttgccaaaggggggaccagaattcccccatgcgagctgtttgaggactgggatgccgagaacgcgagcgatccgagcagggtttgtctgggcaccgtcggggtaggatccggaacgcattcggaaggctttttgcaagcatttacttggaaggagaacttgggatctttctgggaaccccccgccccggctggattggccgagcaagcctggaaaatgcaattgaaacacagagcaccagctctgaggaactcgtcccaagccccccatctccacttcctccccctcgagtgtacaaaccctgcttcgtctgccaggacaaatcatcagggtaccactatggggtcagcgcctgtgagggatgtaagggctttttccgcagaagtattcagaagaatatgatttacacttgtcaccgagataagaactgtgttattaataaagtcaccaggaatcgatgccaatactgtcgactccagaagtgctttgaagtgggaatgtccaaagaatctgtcaggaatgacaggaacaagaaaaagaaggagacttcgaagcaagaatgcacagagagctatgaaatgacagctgagttggacgatctcacagagaagatccgaaaagctcaccaggaaactttcccttcactctgccagctgggtaaatacaccacgaattccagtgctgaccatcgagtccgactggacctgggcctctgggacaaattcagtgaactggccaccaagtgcattattaagatcgtggagtttgctaaacgtctgcctggtttcactggcttgaccatcgcagaccaaattaccctgctgaaggccgcctgcctggacatcctgattcttagaatttgcaccaggtataccccagaacaagacaccatgactttctcagacggccttaccctaaatcgaactcagatgcacaatgctggatttggtcctctgactgaccttgtgttcacctttgccaaccagctcctgcctttggaaatggatgacacagaaacaggccttctcagtgccatctgcttaatctgtggagaccgccaggaccttgaggaaccgacaaaagtagataagctacaagaaccattgctggaagcactaaaaatttatatcagaaaaagacgacccagcaagcctcacatgtttccaaagatcttaatgaaaatcacagatctccgtagcatcagtgctaaaggtgcagagcgtgtaattaccttgaaaatggaaattcctggatcaatgccacctctcattcaagaaatgctggagaattctgaaggacatgaacccttgaccccaagttcaagtgggaacacagcagagcacagtcctagcatctcacccagctcagtggaaaacagtggggtcagtcagtcaccactcgtgcaataagacattttctagctacttcaaacattccccagtaccttcagttccaggatttaaaatgcaagaaaaaacatttttactgctgcttagtttttggactgaaaagatattaaaactcaagaaggaccaagaagttttcatatgtatcaatatatatactcctcactgtgtaacttacctagaaatacaaacttttccaattttaaaaaatcagccatttcatgcaaccagaaactagttaaaagcttctattttcctctttgaacactcaagattgcatggcaaagacccagtcaaaatgatttacccctggttaagtttctgaagactttgtacatacagaagtatggctctgttctttctatactgtatgtttggtgctttccttttgtcttgcatactcaaaataaccatgacaccaaggttatgaaatagactactgtacacgtctacctaggttcaaaaagataactgtcttgctttcatggaatagtcaagacatcaaggtaaggaaacaggactattgacaggactattgtacagtatgacaagataaggctgaagatattctactttagttagtatggaagcttgtctttgctctttctgatgctctcaaactgcatcttttatttcatgttgcccagtaaaagtatacaaattccctgcactagcagaagagaattctgtatcagtgtaactgccagttcagttaatcaaatgtcatttgttcaattgttaatgtcactttaaattaaaagtggtttattacttgtttaatgacataactacacagttagttaaaaaaaatttttttacagtaatgatagcctccaaggcagaaacacttttcagtgttaagtttttgtttacttgttcacaagccattagggaaatttcatgggataattagcaggctggtctaccacctggaccatgtaactctagtgtccttcctgattcatgcctgatattgggatttttttttccagccttcttgatgccaaggggctaattaatattaacaactcccaaagaaacaggcatagaatctgcctcctttgaccttgttcaatcactatgaagcagagtgaaagctgtggtagagtggttaacagatacaagtgtcagtttcttagttctcatttaagcactagtggaattttttttttttgatatattagcaagtctgtgatgtactttcactggctctgtttgtacattgagattgtttgtttaacaatgctttctatgttcatatactgtttacctttttccatggagtctcctggcaaagaataaaatatatttattttaaa

SEQ ID NO: 3649 - DNA, 2590 bp, Homo sapiens
  source 1..2590: mol_type = genomic DNA
agacaaacccaaaacatttatgtgcatagaaaaaaattctggaaggtcgtacacagtgaatttctctgagtgaaaagattgtggcaattgaaacacagagcaccagctctgaggaactcgtcccaagccccccatctccacttcctccccctcgagtgtacaaaccctgcttcgtctgccaggacaaatcatcagggtaccactatggggtcagcgcctgtgagggatgtaagggctttttccgcagaagtattcagaagaatatgatttacacttgtcaccgagataagaactgtgttattaataaagtcaccaggaatcgatgccaatactgtcgactccagaagtgctttgaagtgggaatgtccaaagaatctgtcaggaatgacaggaacaagaaaaagaaggagacttcgaagcaagaatgcacagagagctatgaaatgacagctgagttggacgatctcacagagaagatccgaaaagctcaccaggaaactttcccttcactctgccagctgggtaaatacaccacgaattccagtgctgaccatcgagtccgactggacctgggcctctgggacaaattcagtgaactggccaccaagtgcattattaagatcgtggagtttgctaaacgtctgcctggtttcactggcttgaccatcgcagaccaaattaccctgctgaaggccgcctgcctggacatcctgattcttagaatttgcaccaggtataccccagaacaagacaccatgactttctcagacggccttaccctaaatcgaactcagatgcacaatgctggatttggtcctctgactgaccttgtgttcacctttgccaaccagctcctgcctttggaaatggatgacacagaaacaggccttctcagtgccatctgcttaatctgtggagaccgccaggaccttgaggaaccgacaaaagtagataagctacaagaaccattgctggaagcactaaaaatttatatcagaaaaagacgacccagcaagcctcacatgtttccaaagatcttaatgaaaatcacagatctccgtagcatcagtgctaaaggtgcagagcgtgtaattaccttgaaaatggaaattcctggatcaatgccacctctcattcaagaaatgctggagaattctgaaggacatgaacccttgaccccaagttcaagtgggaacacagcagagcacagtcctagcatctcacccagctcagtggaaaacagtggggtcagtcagtcaccactcgtgcaataagacattttctagctacttcaaacattccccagtaccttcagttccaggatttaaaatgcaagaaaaaacatttttactgctgcttagtttttggactgaaaagatattaaaactcaagaaggaccaagaagttttcatatgtatcaatatatatactcctcactgtgtaacttacctagaaatacaaacttttccaattttaaaaaatcagccatttcatgcaaccagaaactagttaaaagcttctattttcctctttgaacactcaagattgcatggcaaagacccagtcaaaatgatttacccctggttaagtttctgaagactttgtacatacagaagtatggctctgttctttctatactgtatgtttggtgctttccttttgtcttgcatactcaaaataaccatgacaccaaggttatgaaatagactactgtacacgtctacctaggttcaaaaagataactgtcttgctttcatggaatagtcaagacatcaaggtaaggaaacaggactattgacaggactattgtacagtatgacaagataaggctgaagatattctactttagttagtatggaagcttgtctttgctctttctgatgctctcaaactgcatcttttatttcatgttgcccagtaaaagtatacaaattccctgcactagcagaagagaattctgtatcagtgtaactgccagttcagttaatcaaatgtcatttgttcaattgttaatgtcactttaaattaaaagtggtttattacttgtttaatgacataactacacagttagttaaaaaaaatttttttacagtaatgatagcctccaaggcagaaacacttttcagtgttaagtttttgtttacttgttcacaagccattagggaaatttcatgggataattagcaggctggtctaccacctggaccatgtaactctagtgtccttcctgattcatgcctgatattgggatttttttttccagccttcttgatgccaaggggctaattaatattaacaactcccaaagaaacaggcatagaatctgcctcctttgaccttgttcaatcactatgaagcagagtgaaagctgtggtagagtggttaacagatacaagtgtcagtttcttagttctcatttaagcactagtggaattttttttttttgatatattagcaagtctgtgatgtactttcactggctctgtttgtacattgagattgtttgtttaacaatgctttctatgttcatatactgtttacctttttccatggagtctcctggcaaagaataaaatatatttattttaaa

SEQ ID NO: 3650 - DNA, 1326 bp, Homo sapiens
  source 1..1326: mol_type = genomic DNA
atgaccaccagcggccacgcatgtccggtcccagcagtgaacggacacatgactcactatccagccacaccctacccgttactctttccacctgtcatcggaggactttccctgcctcccctccatggccttcatggacatccgcctccgagtggatgcagcaccccgtcgccggcaacaattgaaacacagagcaccagctctgaggaactcgtcccaagccccccatctccacttcctccccctcgagtgtacaaaccctgcttcgtctgccaggacaaatcatcagggtaccactatggggtcagcgcctgtgagggatgtaagggctttttccgcagaagtattcagaagaatatgatttacacttgtcaccgagataagaactgtgttattaataaagtcaccaggaatcgatgccaatactgtcgactccagaagtgctttgaagtgggaatgtccaaagaatctgtcaggaatgacaggaacaagaaaaagaaggagacttcgaagcaagaatgcacagagagctatgaaatgacagctgagttggacgatctcacagagaagatccgaaaagctcaccaggaaactttcccttcactctgccagctgggtaaatacaccacgaattccagtgctgaccatcgagtccgactggacctgggcctctgggacaaattcagtgaactggccaccaagtgcattattaagatcgtggagtttgctaaacgtctgcctggtttcactggcttgaccatcgcagaccaaattaccctgctgaaggccgcctgcctggacatcctgattcttagaatttgcaccaggtataccccagaacaagacaccatgactttctcagacggccttaccctaaatcgaactcagatgcacaatgctggatttggtcctctgactgaccttgtgttcacctttgccaaccagctcctgcctttggaaatggatgacacagaaacaggccttctcagtgccatctgcttaatctgtggagaccgccaggaccttgaggaaccgacaaaagtagataagctacaagaaccattgctggaagcactaaaaatttatatcagaaaaagacgacccagcaagcctcacatgtttccaaagatcttaatgaaaatcacagatctccgtagcatcagtgctaaaggtgcagagcgtgtaattaccttgaaaatggaaattcctgaaggacatgaacccttgaccccaagttcaagtgggaacacagcagagcacagtcctagcatctcacccagctcagtggaaaacagtggggtcagtcagtcaccactcgtgcaataa

SEQ ID NO: 3651 - DNA, 1935 bp, Homo sapiens
  source 1..1935: mol_type = genomic DNA
aatggatcctcccgcaggctttgtgcgcgctgggaatccagctgtcgccgccccgcagagccccctgtccccggagggcgctcatttccgggccgcccaccacccgcgtagcaccggcagccgctgtcccggcagtctccagccgtcccgcccgcttgtggccaactggctccagtcactccccgaaatgccagtcgacttcactgggtactggaagatgttggtcaacgagaatttcgaggagtacctgcgcgccctcgacgtcaatgtggccttgcgcaaaatcgccaacttgctgaagccagacaaagagatcgtgcaggacggtgaccatatgatcatccgcacgctgagcacttttaggaactacatcatggacttccaggttgggaaggagtttgaggaggatctgacaggcatagatgaccgcaagtgcatgagtgaaactggcttttcctcttgaatgtgctgacttttgattccagccccccaggaatggatcagagaagaggagccgctacccacccactcatcagcctggcctcaggggcagctcatggactttttagccagagagaaccgggttcaagttatggctcaagccctaaccccttggtgatgggctggttacttatagaagcctaatttttatcagctctaaagcttgaagatttagtgaaacattgtggaaagctcccagcacagtacctggcacctggcaggttctctgtcatctcccctacttttccctcctgatcacttatttaacacaagcaccagatgctgaaaaccctctaattgtcccaggaacacacataccctcaaagggagaagcacactttcaaatcaaactccaggatttgcatcttttagcaatttccattatgcggagaaagtatctactcactgtctggttttgaaattttaccccaaatcgaaagagcatgggttttggtgtcagacctgggtcggtcctggctctggcctttgcaggcagtatcaccacgggcaaggcttcacctctcataacctggctgtggaaccacagaaacaacagaattcagtcccagccctccagaggtggatccgtaaacagagggactactagggctgggtggagggctgtgagtgatccaacatcccctgctcttgagagtggtgttttagcatgggagtgttaatgaatgtcacaagtttcttgataccaaatagagttcctaccatttgcaggtcataccggtcactgccaagagatggcttatttagtgggaattgtctggcactcctagtataagtcacctaagtggggcaagtgggccttgaaacatccctgggagacactcactcaggctgcctgtgggagctgggctttttgtgtcactctcccatgcagcagtgacggctggggtttctaagtggtcagaggagctggaaaatggcttctgaagtaacagtcccttgtcatagtggtacaaagatgtcttcattcatctgttggcacatgtctctgggtaaactgccggcaaggccaaagtgatgggggttattattagtttttaatagaaaagttagactggcttcactttccaaccagcttccctagttccagcccatttgcagacttttgggtggtctgtgggatgaaaatttcttgtgaggaggtgagctgaagatggccatccctcctggttgctcttggattgtctgggcttcatttctaaggcggtcccagagcccatgtgggggttgggggaagcagcattgtctagcccctttggtttgtacccatgttcaccccacccccacagccacctgccttttctgtgggacttgaaaagcatcaggaatatcttcctacctgaaattcttccattagaccctgattaattggattaatctaggaaaccagattaaatgaccatttaacgacccttt

SEQ ID NO: 3652 - DNA, 898 bp, Homo sapiens
  source 1..898: mol_type = genomic DNA
aaacgaactgaacgtctgaaacgaaggtggcgcggcctggacaaacctgacccttcgacatcccccgcccctgcgcccgccctcgctaagcggggaggagcgaccgctacaatggatcctcccgcaggctttgtgcgcgctgggaatccagctgtcgccgccccgcagagccccctgtccccggagggcgctcatttccgggccgcccaccacccgcgtagcaccggcagccgctgtcccggcagtctccagccgtcccgcccgcttgtggccaactggctccagtcactccccgaaatgccagtcgacttcactgggtactggaagatgttggtcaacgagaatttcgaggagtacctgcgcgccctcgacgtcaatgtggccttgcgcaaaatcgccaacttgctgaagccagacaaagagatcgtgcaggacggtgaccatatgatcatccgcacgctgagcacttttaggaactacatcatggacttccaggttgggaaggagtttgaggaggatctgacaggcatagatgaccgcaagtgcatgacaacagtgagctgggacggagacaagctccagtgtgtgcagaagggtgagaaggaggggcgtggctggacccagtggatcgagggtgatgagctgcacctggagatgagagtggaaggtgtggtctgcaagcaagtattcaagaaggtgcagtgaggcccaggcagacaaccttgtcccaaggaatcagcaggatgtgtgggccaggatccccctctttgcacagcatgaggcaaaaatgtccagccacccccaggcatctgttagcagagtctgtctcttggctttgtcacttttccttttcttaaaacaaagccatgccaataaagtgatctgtgttcaaaacgtc

SEQ ID NO: 3653 - DNA, 1487 bp, Homo sapiens
  source 1..1487: mol_type = genomic DNA
aaacgaactgaacgtctgaaacgaaggtggcgcggcctggacaaacctgacccttcgacatcccccgcccctgcgcccgccctcgctaagcggggaggagcgaccgctacaatggatcctcccgcaggctttgtgcgcgctgggaatccagctgtcgccgccccgcagagccccctgtccccggagggcgctcatttccgggccgcccaccacccgcgtagcaccggcagccgctgtcccggcagtctccagccgtcccgcccgcttgtggccaactggctccagtcactccccgaaatgccagtcgacttcactgggtactggaagatgttggtcaacgagaatttcgaggagtacctgcgcgccctcgacgtcaatgtggccttgcgcaaaatcgccaacttgctgaagccagacaaagagatcgtgcaggacggtgaccatatgatcatccgcacgctgagcacttttaggaactacatcatggacttccaggttgggaaggagtttgaggaggatctgacaggcatagatgaccgcaagtgcatggctggagtgcaatcgcgtgatctcagctcactgtaacctctgcctcccgggttcaagcaattctcctgcctcagcctcccaagtagctgggattacagtcacacgccaccacacctggataattttgtatttttggtagagacagggtttcactatgttggtcaggctggtctcaaactcctgagctcaggtgatccatctgcctcagcctcccaaaatgctgggattacaagtgtgagccactacacctggttcttctttccactgtttgctaactcccatggtgttttctggcatcacttccagcattatttctagccttacctcttccaggaagccttccctgatgggcctctgtctctaccttaaaggctgtcgaggtgccttctgacttccataacctccagcatttgtctaccagtacttaccattctgctggaattctctgtcttcttaccttcttctcagataatctgtgagccctcaagagcaggccactgaccttacttccctctctccagcacctacagctggtgcataggaggtgtgaaacccatgattgctgaatgccgttcccttgcacagaaccacgtggtgaattcctattgctcagtcaagggtcagtttaaagcagggaactgcagagcacagtcatcaagagcatgagctctagagccaaatctcatctccccacttcacggctgggtgaacttcaggcctcagtctccacatttgtaaaatgatgagaagcatacctgctctaggaggttgtcaggagtcaactggtatgacatatactttgcctagtaccctgcccagcacataatgttgggcattatcattatcataacaacacatgttgttatgatattgattatggtgactgataatgacagcaatgctatcactcccaccagggagccttccctgacccccca

SEQ ID NO: 3654 - DNA, 4751 bp, Homo sapiens
  source 1..4751: mol_type = genomic DNA
cggagggggaggggcggagagccaccgcggagcgcgcgcggggttggttgccgcgagcgtgggggagcgtggaccgcggcgctgctcagcggtggggctgccttcccccggccctcctccctggtccctggcgagggcactggcggcggcggggccggggtccgcaaggccggagaaggccgccgggcccgggcatggtggtctggggcaacgcggaagaagctccaccatgaggcgaggtggatggaggaagcgagctgaaaatgatggctgggaaacatggggtgggtatatggctgccaaggtccagaaattggaggaacagtttcgatcagatgctgctatgcagaaggatgggacttcatctacaatttttagtggagttgccatctatgttaatggatacacagatccttccgctgaggaattgagaaaactaatgatgttgcatggaggtcaataccatgtatattattccagatctaaaacaacacatattattgccacaaatcttcccaatgccaaaattaaagaattaaagggggaaaaagtaattcgaccagaatggattgtggaaagcatcaaagctggacgactcctctcctacattccatatcagctgtacaccaagcagtccagtgtgcagaaaggtctcagctttaatcctgtatgcagacctgaggatcctctgccaggtccaagcaatatagccaaacagctcaacaacagggtaaatcacatcgttaagaagattgaaacggaaaatgaagtcaaagtcaatggcatgaacagttggaatgaagaagatgaaaataatgattttagttttgtggatctggagcagacctctccgggaaggaaacagaatggaattccgcatcccagagggagcactgccatttttaatggacacactcctagctctaatggtgccttaaagacacaggattgcttggtgcccatggtcaacagtgttgccagcaggctttctccagccttttcccaggaggaggataaggctgagaagagcagcactgatttcagagactgcactctgcagcagttgcagcaaagcaccagaaacacagatgctttgcggaatccacacagaactaattctttctcattatcacctttgcacagtaacactaaaatcaatggtgctcaccactccactgttcaggggccttcaagcacaaaaagcacttcttcagtatctacgtttagcaaggcagcaccttcagtgccatccaaaccttcagactgcaattttatttcaaacttctattctcattcaagactgcatcacatatcaatgtggaagtgtgaattgactgagtttgtcaataccctacaaagacaaagtaatggtatctttccaggaagggaaaagttaaaaaaaatgaaaacaggcaggtctgcacttgttgtaactgacacaggagatatgtcagtattgaattctcccagacatcagagctgtataatgcatgttgatatggattgcttctttgtatcagtgggtatacgaaatagaccagatctcaaaggaaaaccagtggctgttacaagtaacagaggcacaggaagggcacctttacgtcctggcgctaacccccagctggagtggcagtattaccagaataaaatcctgaaaggcaaagcagcagatataccagattcatcattgtgggagaatccagattctgcgcaagcaaatggaattgattctgttttgtcaagggctgaaattgcatcttgtagttatgaggccaggcaacttggcattaagaacggaatgttttttgggcatgctaaacaactatgtcctaatcttcaagctgttccatacgattttcatgcatataaggaagtcgcacaaacattgtatgaaacattggcaagctacactcataacattgaagctgtcagttgtgatgaagcgctggtagacattaccgaaatccttgcagagaccaaacttactcctgatgaatttgcaaatgctgttcgtatggaaatcaaagaccagacgaaatgtgctgcctctgttggaattggttctaatattctcctggctagaatggcaactagaaaagcaaaaccagatgggcagtaccacctaaaaccagaagaagtagatgattttatcagaggccagctagtgaccaatctaccaggagttggacattcaatggaatctaagttggcatctttgggaattaaaacttgtggagacttgcagtatatgaccatggcaaaactccaaaaagaatttggtcccaaaacaggtcagatgctttataggttctgccgtggcttggatgatagaccagttcgaactgaaaaggaaagaaaatctgtttcagctgagatcaactatggaataaggtttactcagccaaaagaggcagaagcttttcttctgagtctttcagaagaaattcaaagaagactagaagccactggcatgaagggtaaacgtctaactctcaaaatcatggtacgaaagcctggggctcctgtagaaactgcaaaatttggaggccatggaatttgtgataacattgccaggactgtaactcttgaccaggcaacagataatgcaaaaataattggaaaggcgatgctaaacatgtttcatacaatgaaactaaatatatcagatatgagaggggttgggattcacgtgaatcagttggttccaactaatctgaacccttccacatgtcccagtcgcccatcagttcagtcaagccactttcctagtgggtcatactctgtccgtgatgtcttccaagttcagaaagctaagaaatccaccgaagaggagcacaaagaagtatttcgggctgctgtggatctggaaatatcatctgcttctagaacttgcactttcttgccaccttttcctgcacatctgccgaccagtcctgatactaacaaggctgagtcttcagggaaatggaatggtctacatactcctgtcagtgtgcagtcgagacttaacctgagtatagaggtcccgtcaccttcccagctggatcagtctgttttagaagcacttccacctgatctccgggaacaagtagagcaagtctgtgctgtccagcaagcagagtcacatggcgacaaaaagaaagaaccagtaaatggctgtaatacaggaattttgccacaaccagttgggacagtcttgttgcaaataccagaacctcaagaatcgaacagtgacgcaggaataaatttaatagcccttccagcattttcacaggtggaccctgaggtatttgctgcccttcctgctgaacttcagagggagctgaaagcagcgtatgatcaaagacaaaggcagggcgagaacagcactcaccagcagtcagccagcgcatctgtgccaaagaatcctttacttcatctaaaggcagcagtgaaagaaaagaaaagaaacaagaagaaaaaaaccattggttcaccaaaaaggattcagagtcctttgaataacaagctgcttaacagtcctgcaaaaactctgccaggggcctgtggcagtccccagaagttaattgatgggtttctaaaacatgaaggacctcctgcagagaaacccctggaagaactctctgcttctacttcaggtgtgccaggcctttctagtttgcagtctgacccagctggctgtgtgagacctccagcacccaatctagctggagctgttgaattcaatgatgtgaagaccttgctcagagaatggataactacaatttcagatccaatggaagaagacattctccaagttgtgaaatactgtactgatctaatagaagaaaaagatttggaaaaactggatctagttataaaatacatgaaaaggctgatgcagcaatcggtggaatcggtttggaatatggcatttgactttattcttgacaatgtccaggtggttttacaacaaacttatggaagcacattaaaagttacataaatattaccagagagcctgatgctctctgatagctgtgccataagtgcttgtgaggtatttgcaaagtgcatgatagtaatgctcggagtttttataattttaaatttcttttaaagcaagtgttttgtacatttcttttcaaaaagtgccaaatttgtcagtattgcatgtaaataattgtgttaattattttactgtagcatagattctatttacaaaatgtttgtttataaagttttatggatttttacagtgaagtgtttacagttgtttaataaagaactgtatgtatattttgtacaggctcctttttgtgaatccttaaaaactcaactctaggaagcaactactgtttattatactaaaaggctgaaaaacctccaggccagactgctaagctctgaaattcctgagaggtctcagaccgggattctacttgttccaagaaagggtaaagcttctaaaccatcttattcttgtctccaagcatgaacacaggagcatgttaagaaaatctttactacttcttccatgcggagaaatctacatattttgaattagaaacaccctcacacccacttgaagatttttttcctgggaacattatgtcccgtagatcagaggtggtgttgtctttttgcttctactggccattgagaaactttgatgataaaaaagaacggtatagatttttcaaacgtatataaaatatttttatgttatatgttatgccataactttaaaataaaaatagtttaaaattcta

SEQ ID NO: 3655 - DNA, 4686 bp, Homo sapiens
  source 1..4686: mol_type = genomic DNA
gggagcgtggaccgcggcgctgctcagcggtggggctgccttcccccggccctcctccctggtccctggcgagggcactggcggcggcggggccggggtccgcaaggccggagaaggccgccgggcccgggcatggtggtctggggcaacgcggaagaagctccaccatgaggcgaggtggatggaggaagcgagctgaaaatgatggctgggaaacatggggtgggtatatggctgccaaggtccagaaattggaggaacagtttcgatcagatgctgctatgcagaaggatgggacttcatctacaatttttagtggagttgccatctatgttaatggatacacagatccttccgctgaggaattgagaaaactaatgatgttgcatggaggtcaataccatgtatattattccagatctaaaacaacacatattattgccacaaatcttcccaatgccaaaattaaagaattaaagggggaaaaagtaattcgaccagaatggattgtggaaagcatcaaagctggacgactcctctcctacattccatatcagctgtacaccaagcagtccagtgtgcagaaaggtctcagctttaatcctgtatgcagacctgaggatcctctgccaggtccaagcaatatagccaaacagctcaacaacagggtaaatcacatcgttaagaagattgaaacggaaaatgaagtcaaagtcaatggcatgaacagttggaatgaagaagatgaaaataatgattttagttttgtggatctggagcagacctctccgggaaggaaacagaatggaattccgcatcccagagggagcactgccatttttaatggacacactcctagctctaatggtgccttaaagacacaggattgcttggtgcccatggtcaacagtgttgccagcaggctttctccagccttttcccaggaggaggataaggctgagaagagcagcactgatttcagagactgcactctgcagcagttgcagcaaagcaccagaaacacagatgctttgcggaatccacacagaactaattctttctcattatcacctttgcacagtaacactaaaatcaatggtgctcaccactccactgttcaggggccttcaagcacaaaaagcacttcttcagtatctacgtttagcaaggcagcaccttcagtgccatccaaaccttcagactgcaattttatttcaaacttctattctcattcaagactgcatcacatatcaatgtggaagtgtgaattgactgagtttgtcaataccctacaaagacaaagtaatggtatctttccaggaagggaaaagttaaaaaaaatgaaaacaggcaggtctgcacttgttgtaactgacacaggagatatgtcagtattgaattctcccagacatcagagctgtataatgcatgttgatatggattgcttctttgtatcagtgggtatacgaaatagaccagatctcaaaggaaaaccagtggctgttacaagtaacagaggcacaggaagggcacctttacgtcctggcgctaacccccagctggagtggcagtattaccagaataaaatcctgaaaggcaaagcagatataccagattcatcattgtgggagaatccagattctgcgcaagcaaatggaattgattctgttttgtcaagggctgaaattgcatcttgtagttatgaggccaggcaacttggcattaagaacggaatgttttttgggcatgctaaacaactatgtcctaatcttcaagctgttccatacgattttcatgcatataaggaagtcgcacaaacattgtatgaaacattggcaagctacactcataacattgaagctgtcagttgtgatgaagcgctggtagacattaccgaaatccttgcagagaccaaacttactcctgatgaatttgcaaatgctgttcgtatggaaatcaaagaccagacgaaatgtgctgcctctgttggaattggttctaatattctcctggctagaatggcaactagaaaagcaaaaccagatgggcagtaccacctaaaaccagaagaagtagatgattttatcagaggccagctagtgaccaatctaccaggagttggacattcaatggaatctaagttggcatctttgggaattaaaacttgtggagacttgcagtatatgaccatggcaaaactccaaaaagaatttggtcccaaaacaggtcagatgctttataggttctgccgtggcttggatgatagaccagttcgaactgaaaaggaaagaaaatctgtttcagctgagatcaactatggaataaggtttactcagccaaaagaggcagaagcttttcttctgagtctttcagaagaaattcaaagaagactagaagccactggcatgaagggtaaacgtctaactctcaaaatcatggtacgaaagcctggggctcctgtagaaactgcaaaatttggaggccatggaatttgtgataacattgccaggactgtaactcttgaccaggcaacagataatgcaaaaataattggaaaggcgatgctaaacatgtttcatacaatgaaactaaatatatcagatatgagaggggttgggattcacgtgaatcagttggttccaactaatctgaacccttccacatgtcccagtcgcccatcagttcagtcaagccactttcctagtgggtcatactctgtccgtgatgtcttccaagttcagaaagctaagaaatccaccgaagaggagcacaaagaagtatttcgggctgctgtggatctggaaatatcatctgcttctagaacttgcactttcttgccaccttttcctgcacatctgccgaccagtcctgatactaacaaggctgagtcttcagggaaatggaatggtctacatactcctgtcagtgtgcagtcgagacttaacctgagtatagaggtcccgtcaccttcccagctggatcagtctgttttagaagcacttccacctgatctccgggaacaagtagagcaagtctgtgctgtccagcaagcagagtcacatggcgacaaaaagaaagaaccagtaaatggctgtaatacaggaattttgccacaaccagttgggacagtcttgttgcaaataccagaacctcaagaatcgaacagtgacgcaggaataaatttaatagcccttccagcattttcacaggtggaccctgaggtatttgctgcccttcctgctgaacttcagagggagctgaaagcagcgtatgatcaaagacaaaggcagggcgagaacagcactcaccagcagtcagccagcgcatctgtgccaaagaatcctttacttcatctaaaggcagcagtgaaagaaaagaaaagaaacaagaagaaaaaaaccattggttcaccaaaaaggattcagagtcctttgaataacaagctgcttaacagtcctgcaaaaactctgccaggggcctgtggcagtccccagaagttaattgatgggtttctaaaacatgaaggacctcctgcagagaaacccctggaagaactctctgcttctacttcaggtgtgccaggcctttctagtttgcagtctgacccagctggctgtgtgagacctccagcacccaatctagctggagctgttgaattcaatgatgtgaagaccttgctcagagaatggataactacaatttcagatccaatggaagaagacattctccaagttgtgaaatactgtactgatctaatagaagaaaaagatttggaaaaactggatctagttataaaatacatgaaaaggctgatgcagcaatcggtggaatcggtttggaatatggcatttgactttattcttgacaatgtccaggtggttttacaacaaacttatggaagcacattaaaagttacataaatattaccagagagcctgatgctctctgatagctgtgccataagtgcttgtgaggtatttgcaaagtgcatgatagtaatgctcggagtttttataattttaaatttcttttaaagcaagtgttttgtacatttcttttcaaaaagtgccaaatttgtcagtattgcatgtaaataattgtgttaattattttactgtagcatagattctatttacaaaatgtttgtttataaagttttatggatttttacagtgaagtgtttacagttgtttaataaagaactgtatgtatattttgtacaggctcctttttgtgaatccttaaaaactcaactctaggaagcaactactgtttattatactaaaaggctgaaaaacctccaggccagactgctaagctctgaaattcctgagaggtctcagaccgggattctacttgttccaagaaagggtaaagcttctaaaccatcttattcttgtctccaagcatgaacacaggagcatgttaagaaaatctttactacttcttccatgcggagaaatctacatattttgaattagaaacaccctcacacccacttgaagatttttttcctgggaacattatgtcccgtagatcagaggtggtgttgtctttttgcttctactggccattgagaaactttgatgataaaaaagaacggtatagatttttcaaacgtatataaaatatttttatgttatatgttatgccataactttaaaataaaaatagtttaaaattcta

SEQ ID NO: 3656 - DNA, 4888 bp, Homo sapiens
  source 1..4888: mol_type = genomic DNA
gatgaacccttgtcagggggccgtgtctgcgggaggccgaaggatcccgggtgacatgctttctttgggtgcgaggcagcgtctcggcagaaagaatattgcgagtattactgagggtacatgaaggagagaagcccctttggttcggccttggactaagcccttgttctcaggtgaacttgcagtgtgatcttgagtaaggtcagtctcctctctcacctcagtggcccgaaacctcaggaggtggcagaggttttctaatgactctcccagctctgacatcctctgacttcactctgggagaacgtgggctggtggactcctggcagaagccgacacacagttgggccataacaaagagccctggtacggggcacgttcccgcccccgggaggttttggaaacactgtgaggcagggggcggggcttgagcgggccgcagccagtcaccaaagggccgggcgctgggggcggggcctcgcgcgagcggcggcggtagcggcggcagcggctgcggccaagctgggtccgagcatcccgcggctctggagccgcccggcccggacatggcgaccgtccgggcctctctgcgaggtgcgctgctccttctgctggccgtggcgggggtcgcggaggtggcagggggcctggctccgggcagtgcgggtgcattgtgttgtaatcattcaaaggataaccaaatgtgccgtgatgtatgtgaacagattttctcctcaaaaagtgaatcccgactaaaacatctgttgcagcgagccccagattattgcccagagacaatggttgaaatttggaattgtatgaattcatctttgccaggtgtgtttaagaagtctgatggctgggttggcttaggctgctgtgaactggctattgccttggagtgtcgacaggcatgcaagcaggcatcttcaaagaatgatatttccaaagtttgcagaaaagaatatgagaatgctcttttcagttgcattagcagaaatgaaatgggctcggtttgttgcagttatgcaggtcatcacacaaactgccgagaatactgtcaagccatttttcgaacagactcttctcctggtccatctcagataaaagcagtggaaaattattgcgcctctattagtccacaattaatacattgtgtgaacaattatactcaatcttatccaatgaggaacccaacggatagtttatattgctgtgacagagctgaagaccatgcttgccaaaatgcctgcaagagaatcctgatgtccaagaaaacggaaatggagattgttgatggtctcatcgagggttgtaagacccagcccttgcctcaagatcctctttggcaatgttttcttgaaagctcacaatctgttcaccctggagtcactgtacaccctcctccctctacaggcctcgatggggctaaattgcattgttgttctaaagcaaacacttcaacatgtagggaactctgcactaaactttacagcatgagctggggcaatacacagagttggcaagagtttgatcgcttttgtgaatataatccagtggaagtgtccatgttgacctgtttagcggatgtccgggaaccttgccagttgggctgtagaaaccttacttactgtactaattttaacaacaggccaacagaacttttcaggagttgtaatgcacagtcagatcaaggagccatgaatgacatgaagttgtgggagaaaggaagcataaagatgccatttatcaatatacctgttcttgatattaaaaagtgccagccagagatgtggaaagcaatagcttgttcactgcagattaaaccttgtcatagtaaatctcggggaagtattatttgcaaatcagattgtgtggagattcttaaaaaatgtggagaccagaacaaattccctgaagaccacacagctgaaagtatttgtgagcttctgtcacctacagatgatctgaagaattgtatacctttggatacatacctcaggccaagtactttaggtaacattgtagaagaagtgactcatccctgtaacccaaatccttgccctgccaatgagctctgtgaagtaaaccgaaaaggatgtccatctggagatccctgtcttccatacttttgtgttcaaggttgcaaactgggagaagcttctgatttcattgtccgtcaagggacactaatccaggtgccatcatctgcaggggaagttggttgttataaaatctgttcatgtggacaaagtggactcttagaaaactgtatggaaatgcactgtatagacctccagaagtcttgtattgttggaggaaaaagaaaaagtcatggaacatcctttagtattgactgcaatgtctgttcttgttttgctggcaatttggtgtgctctacccgcctttgcctcagtgagcacagttcagaagatgaccgtcgtaccttcacaggtctgccctgtaactgtgcagatcagtttgtccctgtatgtgggcagaatgggcgcacttaccccagtgcctgcattgctcgctgtgtgggcctccaagaccatcagtttgagtttggatcatgcatgtcaaaggatccatgtaatcctaatccctgccaaaaaaaccaaaggtgcatacccaaaccacaggtctgcctgacgacttttgataaatttggatgtagccagtatgagtgtgtaccaagacagctcgcgtgtgaccaggtccaagatcctgtttgtgacacagaccacatggagcacaacaatctctgcactttataccaaagaggaaaaagcctctcttacaaaggtccctgccagcccttttgcagagcaaccgagcccgtatgtgggcacaatggtgagacctacagcagtgtgtgtgctgcctactcggatcgcgtggcagtcgattactatggggactgccaggccgtcggagtcctctcagagcacagctccgtcgccgagtgtgcttctgtcaagtgtccttcgctcttggcagctggatgcaaacccatcatcccaccgggtgcttgttgcccattatgtgctgggatgttaagagttttatttgacaaagaaaaactggatactattgctaaggtaacaaataaaaagccaataacagttctggaaatacttcagaaaatccgcatgcacgtgtctgtcccacagtgtgatgtgtttggatacttcagcattgaatcagaaattgtgatcctgatcattcccgtcgatcactatccaaaagctctgcagattgaagcctgcaataaagaagcagagaagattgagtcccttatcaactctgacagcccgactttggcgtcccatgtccctctctctgccctcatcatttcccaggtacaggtctccagcagtgtgccatcggccggtgtcagggccaggccttcttgccactccctcctccttcccctcagcttgggccttgccttgcacttgctctggacatataactgactgcccacggaaagtgcagaatgctcctccacctcactctcctgccttgaaaaagacattcaggactgctggtttgtagttgaatattggccaaggaaaggcacatgtcacctctattcgccacacagtatttttttttttaatccgccaatattagtaggatttttgttttgtttttacaaatgttaaaatgtgttgttccaaatactaatgaaaacagaatgtctcttcctggtagaccactgccatatgatttacatttcctcaccataagggtcccccactctaaagcaaatttatcgctgggaaatgagatgaccactttttagaaagataattcactgtactatcaggttcacaaacttcatttcagagttctttttgaagtatttaaggttcccgttgcatttgttttgtttacagataattacctactctggctagaagctaggggtcccagtgaagagccactgccattaaagaatatgaaacatagataaaacatctttgaaattatgtaaattatgtaaattatcaggcaaatttgcattaaattacagaaatttaattcagaaccccaactactgtgttatgcaaaagcaagctgattaaatgacactcatataattatatgttgtaagcaacaggctcactggtcacggatttgtgtctgtgacttttgtgaaagggagaagtgacattgcatcaaagcatcttgcattatgcaatttttatattaaccagatatatattcatcggtattcatccaagttaaatgtagagtttttaaacatcaatctttaaaccaattgctgctacttatataattgccaaaaagtgaaataatgtgtagttcatgtaaataatacattatatttctattttattatgaagaaggtgaatagccatatttgtaaaatgacaatcatgtgtgttaacccagtgctttccattcgtgaaaacacatttgctttttgtgatatgcacaatgtagataagtgttctgtctgactttcttttttgatatagaagtataaagaattgtggtttatatatttaaaagtgtcaagctgagtattaaaatgtatgcatgttgtctaagaaattgaatactttgaatgtgtttcacagtttgaaataagctatttgatgtaatacttcttgtgtgtatgcacatgaacttagattttacatgaagtattttttcagtattatatgtaccctctgaaatacatagggatatgcgtattataccaaaatgttgctgaaaaatgggcacttaaagctttcagaatatgtcagtgctgatgtagcatgcttgttgcaattgccttttttctgtataaatgtctttaatgcaatatactggaaagcttttctattttaataaaaataatttttatatg

SEQ ID NO: 3657 - DNA, 2711 bp, Homo sapiens
  source 1..2711: mol_type = genomic DNA
aaagccgcgcagagagcgtgaaacaaagcagtcggctcggaattggacttgggaggcgcggtgaggagtcaggcttaaaacttgttggaggggagtaaccagcctgctcctctcgctctcctcctcgtctgcgccgcgtttcagagagaaaattcctgttccaagagaaaataaggcaacatcaatgaaggagagaagagccagccagaaattatccagcaaatctatcatggatcctaatcagaacgtgaaatgcaagatagttgtggtgggagacagtcagtgtggaaaaactgcgctgctccatgtcttcgccaaggactgcttccccgagaattacgttcctacagtgtttgagaattacacggccagttttgaaatcgacacacaaagaatagagttgagcctgtgggacacttcgggttctccttactatgacaatgtccgccccctctcttaccctgattcggatgctgtgctgatttgctttgacatcagtagaccagagaccctggacagtgtcctcaaaaagtggaaaggtgaaatccaggaattttgtccaaataccaaaatgctcttggtcggctgcaagtctgatctgcggacagatgttagtacattagtagagctctccaatcacaggcagacgccagtgtcctatgaccagggggcaaatatggccaaacagattggagcagctacttatatcgaatgctcagctttacagtcggaaaatagcgtcagagacatttttcacgttgccaccttggcatgtgtaaataagacaaataaaaacgttaagcggaacaaatcacagagagccacaaagcggatttcacacatgcctagcagaccagaactctcggcagttgctacggacttacgaaaggacaaagcgaagagctgcactgtgatgtgaatctttcattatctttaatgaagacaaaggaatctagtgtaaaaaacaacagcaaacaaaaaggtgaagtctaaatgaagtgcacagccaaagtcatgtataccagaggcttaggaggcgtttgagaggatactcatctttttggaatcctgaccttaggttcggcatgtagaccaagtgatgagaagtgaatacatggaagagtttttaagtgtgacttgaaaaatatgccaaaaaatgagagatacaaatgagctagaggaagatgaggggggatgcgagtacctccaagaagaaaaatcacactctgaatggtgcttgcatttttgggttttttttttttgttataatctattcatggatctccactttgatttaatttttaaatgttttaatctcctttacaaaaagtatacgttaatataccgtcctcaagggggaactggcactgtgaccttagcatttagttttctagaggatgtgatctaatttctttctagctcatcattaaaaaggaaattgtatcaggacccatgggatatatccagaggcaaactttatgaggctttgaaatcttgccttcctgaagatagctgagtaggatggttctaaggaaagcctttgcaatcttgcaagatttgtagaccagcactacaaagatcgcatagatcaaataggaaaaaaaatgtcgatttttattcagtctgatggttctgttcttcattgtgattgtcattaaaaagtggtaaattgctcaatgtaatatttttgtgcgctgtttagaagttgtgtgattttttgccatcgttgataaaaatgcaaagtcaaataaaaggtgtcttggtttgatgtcatagaatgatccaaggagagaaaaaaggtagttactgttttcaccagaaaaggtaatgagtgaaggaaagaatagtagcagaaagcacagtttgtgagtaaagctgtctggaattaagttaccaaaaatacaaagcaaaaggactattattttgggttgaagctccaaaactgacagcatctgataatctgttggtttatttcacttttcattaaatgaacattgatgagagaagatgccacttacccaagctttagagaatccctagtggaagattatatgataaactttcagtcctgacataacactagggcatttctagagtgtcattgctaaaacctcactgaacagatgcagccaaggtctgtgttcagcacttggtctctgttgttacgtaaaataataagcatttaaaatagtttacagatatttttgaccagttccttttagagattctttcagagaagaaaccagatctgacctgtttattgttggcgcttgttgaaaacgagctttctttcccatgatagtgcttcgtttttgaagtgttgaagctgtgctccccttaaatcgtggcaggagagattaaggtaattacaacactcagttctatgtcttacaagcactttgtcttgtctctgcaagaaaattcgattccagtcatttcccataaaatacagacattttaccaacataatatgctttgattgatgcagcattatgctttgggcagtattacaaaatagctggcgagtgctttctgtatttaaatattgtaaaaagaaaataagttataactgttataaagcagaacttttgttgcattttttaaactgttgaagtcactgtgtatgtttgtttggtcaatgtttccgcagtatttattaaaacatactttttttttcttcaaataaaaaagtaaccatgtctttgtctaaa

SEQ ID NO: 3658 - DNA, 2777 bp, Homo sapiens
  source 1..2777: mol_type = genomic DNA
gcagtcggctcggaattggacttgggaggcgcggtgaggagtcaggcttaaaacttgttggaggggagtaaccagcctgctcctctcgctctcctcctcgtctgcgccgcgtttcagaggttgcccatcagccttgtgatttatttttatatctgctttttataaagagagaaatatatatatatatatatatttttttttttcttcttaagagaaaattcctgttccaagagaaaataaggcaacatcaatgaaggagagaagagccagccagaaattatccagcaaatctatcatggatcctaatcagaacgtgaaatgcaagatagttgtggtgggagacagtcagtgtggaaaaactgcgctgctccatgtcttcgccaaggactgcttccccgagaattacgttcctacagtgtttgagaattacacggccagttttgaaatcgacacacaaagaatagagttgagcctgtgggacacttcgggttctccttactatgacaatgtccgccccctctcttaccctgattcggatgctgtgctgatttgctttgacatcagtagaccagagaccctggacagtgtcctcaaaaagtggaaaggtgaaatccaggaattttgtccaaataccaaaatgctcttggtcggctgcaagtctgatctgcggacagatgttagtacattagtagagctctccaatcacaggcagacgccagtgtcctatgaccagggggcaaatatggccaaacagattggagcagctacttatatcgaatgctcagctttacagtcggaaaatagcgtcagagacatttttcacgttgccaccttggcatgtgtaaataagacaaataaaaacgttaagcggaacaaatcacagagagccacaaagcggatttcacacatgcctagcagaccagaactctcggcagttgctacggacttacgaaaggacaaagcgaagagctgcactgtgatgtgaatctttcattatctttaatgaagacaaaggaatctagtgtaaaaaacaacagcaaacaaaaaggtgaagtctaaatgaagtgcacagccaaagtcatgtataccagaggcttaggaggcgtttgagaggatactcatctttttggaatcctgaccttaggttcggcatgtagaccaagtgatgagaagtgaatacatggaagagtttttaagtgtgacttgaaaaatatgccaaaaaatgagagatacaaatgagctagaggaagatgaggggggatgcgagtacctccaagaagaaaaatcacactctgaatggtgcttgcatttttgggttttttttttttgttataatctattcatggatctccactttgatttaatttttaaatgttttaatctcctttacaaaaagtatacgttaatataccgtcctcaagggggaactggcactgtgaccttagcatttagttttctagaggatgtgatctaatttctttctagctcatcattaaaaaggaaattgtatcaggacccatgggatatatccagaggcaaactttatgaggctttgaaatcttgccttcctgaagatagctgagtaggatggttctaaggaaagcctttgcaatcttgcaagatttgtagaccagcactacaaagatcgcatagatcaaataggaaaaaaaatgtcgatttttattcagtctgatggttctgttcttcattgtgattgtcattaaaaagtggtaaattgctcaatgtaatatttttgtgcgctgtttagaagttgtgtgattttttgccatcgttgataaaaatgcaaagtcaaataaaaggtgtcttggtttgatgtcatagaatgatccaaggagagaaaaaaggtagttactgttttcaccagaaaaggtaatgagtgaaggaaagaatagtagcagaaagcacagtttgtgagtaaagctgtctggaattaagttaccaaaaatacaaagcaaaaggactattattttgggttgaagctccaaaactgacagcatctgataatctgttggtttatttcacttttcattaaatgaacattgatgagagaagatgccacttacccaagctttagagaatccctagtggaagattatatgataaactttcagtcctgacataacactagggcatttctagagtgtcattgctaaaacctcactgaacagatgcagccaaggtctgtgttcagcacttggtctctgttgttacgtaaaataataagcatttaaaatagtttacagatatttttgaccagttccttttagagattctttcagagaagaaaccagatctgacctgtttattgttggcgcttgttgaaaacgagctttctttcccatgatagtgcttcgtttttgaagtgttgaagctgtgctccccttaaatcgtggcaggagagattaaggtaattacaacactcagttctatgtcttacaagcactttgtcttgtctctgcaagaaaattcgattccagtcatttcccataaaatacagacattttaccaacataatatgctttgattgatgcagcattatgctttgggcagtattacaaaatagctggcgagtgctttctgtatttaaatattgtaaaaagaaaataagttataactgttataaagcagaacttttgttgcattttttaaactgttgaagtcactgtgtatgtttgtttggtcaatgtttccgcagtatttattaaaacatactttttttttcttcaaataaaaaagtaaccatgtctttgtctaaa

SEQ ID NO: 3659 - DNA, 2372 bp, Homo sapiens
  source 1..2372: mol_type = genomic DNA
gcttgaaccgctggagcccccgagggacgcgggggttcagagagcaagaggaaggaaccagactgacagggtcgccagaggcagtcccagcacaaaggttctccttactatgacaatgtccgccccctctcttaccctgattcggatgctgtgctgatttgctttgacatcagtagaccagagaccctggacagtgtcctcaaaaagtggaaaggtgaaatccaggaattttgtccaaataccaaaatgctcttggtcggctgcaagtctgatctgcggacagatgttagtacattagtagagctctccaatcacaggcagacgccagtgtcctatgaccagggggcaaatatggccaaacagattggagcagctacttatatcgaatgctcagctttacagtcggaaaatagcgtcagagacatttttcacgttgccaccttggcatgtgtaaataagacaaataaaaacgttaagcggaacaaatcacagagagccacaaagcggatttcacacatgcctagcagaccagaactctcggcagttgctacggacttacgaaaggacaaagcgaagagctgcactgtgatgtgaatctttcattatctttaatgaagacaaaggaatctagtgtaaaaaacaacagcaaacaaaaaggtgaagtctaaatgaagtgcacagccaaagtcatgtataccagaggcttaggaggcgtttgagaggatactcatctttttggaatcctgaccttaggttcggcatgtagaccaagtgatgagaagtgaatacatggaagagtttttaagtgtgacttgaaaaatatgccaaaaaatgagagatacaaatgagctagaggaagatgaggggggatgcgagtacctccaagaagaaaaatcacactctgaatggtgcttgcatttttgggttttttttttttgttataatctattcatggatctccactttgatttaatttttaaatgttttaatctcctttacaaaaagtatacgttaatataccgtcctcaagggggaactggcactgtgaccttagcatttagttttctagaggatgtgatctaatttctttctagctcatcattaaaaaggaaattgtatcaggacccatgggatatatccagaggcaaactttatgaggctttgaaatcttgccttcctgaagatagctgagtaggatggttctaaggaaagcctttgcaatcttgcaagatttgtagaccagcactacaaagatcgcatagatcaaataggaaaaaaaatgtcgatttttattcagtctgatggttctgttcttcattgtgattgtcattaaaaagtggtaaattgctcaatgtaatatttttgtgcgctgtttagaagttgtgtgattttttgccatcgttgataaaaatgcaaagtcaaataaaaggtgtcttggtttgatgtcatagaatgatccaaggagagaaaaaaggtagttactgttttcaccagaaaaggtaatgagtgaaggaaagaatagtagcagaaagcacagtttgtgagtaaagctgtctggaattaagttaccaaaaatacaaagcaaaaggactattattttgggttgaagctccaaaactgacagcatctgataatctgttggtttatttcacttttcattaaatgaacattgatgagagaagatgccacttacccaagctttagagaatccctagtggaagattatatgataaactttcagtcctgacataacactagggcatttctagagtgtcattgctaaaacctcactgaacagatgcagccaaggtctgtgttcagcacttggtctctgttgttacgtaaaataataagcatttaaaatagtttacagatatttttgaccagttccttttagagattctttcagagaagaaaccagatctgacctgtttattgttggcgcttgttgaaaacgagctttctttcccatgatagtgcttcgtttttgaagtgttgaagctgtgctccccttaaatcgtggcaggagagattaaggtaattacaacactcagttctatgtcttacaagcactttgtcttgtctctgcaagaaaattcgattccagtcatttcccataaaatacagacattttaccaacataatatgctttgattgatgcagcattatgctttgggcagtattacaaaatagctggcgagtgctttctgtatttaaatattgtaaaaagaaaataagttataactgttataaagcagaacttttgttgcattttttaaactgttgaagtcactgtgtatgtttgtttggtcaatgtttccgcagtatttattaaaacatactttttttttcttcaaataaaaaagtaacca

SEQ ID NO: 3660 - DNA, 505 bp, Homo sapiens
  source 1..505: mol_type = genomic DNA
aatgctgaaggcaaagcaaaagatggtgattttggataaatgagaaaaaggagagagtaataggaagacaagcaagaatcacaaaaggaagcacgctaggtaatatacgatcctcccagagaaaattcctgttccaagagaaaataaggcaacatcaatgaaggagagaagagccagccagaaattatccagcaaatctatcatggatcctaatcagaacgtgaaatgcaagatagttgtggtgggagacagtcagtgtggaaaaactgcgctgctccatgtcttcgccaaggactgcttccccgagaattacgttcctacagtgtttgagaattacacggccagttttgaaatcgacacacaaagaatagagttgagcctgtgggacacttcgggttctccttactatgacaatgtccgccccctctcttaccctgattcggatgctgtgctgatttgctttgacatcagtagaccagagaccctggacagtgtcctcaaaaag

SEQ ID NO: 3661 - DNA, 481 bp, Homo sapiens
  source 1..481: mol_type = genomic DNA
attgagaaagaagaggattggaaggccgggcgtataaagccgcgcagagagcgtgaaacaaagcagtcggctcggaattggacttgggaggcgcgagaaaattcctgttccaagagaaaataaggcaacatcaatgaaggagagaagagccagccagaaattatccagcaaatctatcatggatcctaatcagaacgtgaaatgcaagatagttgtggtgggagacagtcagtgtggaaaaactgcgctgctccatgtcttcgccaaggactgcttccccgagaattacgttcctacagtgtttgagaattacacggccagttttgaaatcgacacacaaagaatagagttgagcctgtgggacacttcgggttctccttactatgacaatgtccgccccctctcttaccctgattcggatgctgtgctgatttgctttgacatcagtagaccagagaccctggacagtgtcctcaaaaag

SEQ ID NO: 3662 - DNA, 1905 bp, Homo sapiens
  source 1..1905: mol_type = genomic DNA
gagcggaagtctcgtgaccccggaagtgacaggcagggcgggcggggcggccgacgacgttcgtcatttagtgcgggagggatcctgaaccgcgcggccgaaccctccggtgtcccgacccaggctaagcttgagcatggctgagcaggagcccacagccgagcagctggcccagattgcagcggagaacgaggaggatgagcactcggtcaactacaagcccccggcccagaagagcatccaggagatccaggagctggacaaggacgacgagagcctgcgaaagtacaaggaggccctgctgggccgcgtggccgtttccgcagaccccaacgtccccaacgtcgtggtgactggcctgaccctggtgtgcagctcggccccgggccccctggagctggacctgacgggcgacctggagagcttcaagaagcagtcgtttgtgctgaaggagggtgtggagtaccggataaaaatctctttccgggttaaccgagagatagtgtccggcatgaagtacatccagcatacgtacaggaaaggcgtcaagattgacaagactgactacatggtaggcagctatgggccccgggccgaggagtacgagttcctgacccccgtggaggaggcacccaagggtatgctggcccggggcagctacagcatcaagtcccgcttcacagacgacgacaagaccgaccacctgtcctgggagtggaatctcaccatcaagaaggactggaaggactgagcccagccagaggcgggcagggcagactgacggacggacgacggacaggcggatgtgtcccccccagcccctcccctccccataccaaagtgctgacaggccctccgtgcccctcccaccctggtccgcctccctggcctggctcaaccgagtgcctccgacccccctcctcagccctcccccacccacaggcccagcctcctcggtctcctgtctcgttgctgcttctgcctgtgctgtgggggagagaggccgcagccaggcctctgctgccctttctgtgccccccaggttctatctccccgtcacacccgaggcctggcttcaggagggagcggagcagccattctccaggccccgtggttgcccctggacgtgtgcgtctgctgctccggggtggagctggggtgtgggatgcacggcctcgtgggggccgggccgtcctccagccccgctgctccctggccagcccccttgtcgctgtcggtcccgtctaaccatgatgccttaacatgtggagtgtaccgtggggcctcactagcctctaactccctgtgtctgcatgagcatgtggcctccccgtcccttccccggtggcgaacccagtgacccagggacacgtggggtgtgctgctgctgctccccagcccaccagtgcctggccagcctgcccccttccctggacagggctgtggagatggctccggcggcttggggaaagccaaattgccaaaactcaagtcacctcagtaccatccaggaggctgggtattgtcctgcctctgccttttctgtctcagcgggcagtgcccagagcccacacccccccaagagccctcgatggacagcctcactcaccccacctgggcccagccaggagccccgcctggccatcagtatttattgcctccgtccgtgccgtccctgggccactggcctggcgcctgttcccccaggctctcagtgccaccacccccggcaggccttccctgacccagccaggaacaaacaagggaccaagtgcacacattgctgagagccgtctcctgtgcctcccccgccccatccccggtcttcgtgttgtgtctgccaggctcaggcagaggcgcctgtccctgcttcttttctgaccgggaaataaatgcccctgaagg

SEQ ID NO: 3663 - DNA, 1482 bp, Homo sapiens
  source 1..1482: mol_type = genomic DNA
acgttcgtcatttagtgcgggagggatcctgaaccgcgcggccgaaccctccggtgtcccgacccaggctaagcttgagcatggctgagcaggagcccacagccgagcagctggcccagattgcagcggagaacgaggaggatgagcactcggtcaactacaagcccccggcccagaagagcatccaggagatccaggagctggacaaggacgacgagagcctgcgaaagtacaaggaggccctgctgggccgcgtggccgtttccgcagaccccaacgtccccaacgtcgtggtgactggcctgaccctggtgtgcagctcggccccgggccccctggagctggacctgacgggcgacctggagagcttcaagaagcagtcgtttgtgctgaaggagggtgtggagtaccggataaaaatctctttccgggttaaccgagagatagtgtccggcatgaagtacatccagcatacgtacaggaaaggcgtcaagattgacaagactgactacatggtaggcagctacagcatcaagtcccgcttcacagacgacgacaagaccgaccacctgtcctgggagtggaatctcaccatcaagaaggactggaaggactgagcccagccagaggcgggcagggcagactgacggacggacgacggacaggcggatgtgtcccccccagcccctcccctccccataccaaagtgctgacaggccctccgtgcccctcccaccctggtccgcctccctggcctggctcaaccgagtgcctccgacccccctcctcagccctcccccacccacaggcccagcctcctcggtctcctgtctcgttgctgcttctgcctgtgctgtgggggagagaggccgcagccaggcctctgctgccctttctgtgccccccaggttctatctccccgtcacacccgaggcctggcttcaggagggagcggagcagccattctccaggccccgtggttgcccctggacgtgtgcgtctgctgctccggggtggagctggggtgtgggatgcacggcctcgtgggggccgggccgtcctccagccccgctgctccctggccagcccccttgtcgctgtcggtcccgtctaaccatgatgccttaacatgtggagtgtaccgtggggcctcactagcctctaactccctgtgtctgcatgagcatgtggcctccccgtcccttccccggtggcgaacccagtgacccagggacacgtggggtgtgctgctgctgctccccagcccaccagtgcctggccagcctgcccccttccctggacagggctgtggagatggctccggcggcttggggaaagccaaattgccaaaactcaagtcacctcagtaccatccaggaggctgggtattgtcctgcctctgccttttctgtctcagcgggcagtgcccagagcccacacccccccaagagccctcgatggacagcctcactcaccccacct

SEQ ID NO: 3664 - DNA, 2075 bp, Homo sapiens
  source 1..2075: mol_type = genomic DNA
ggcagccgcggtccatcgcgttcgggggcgacgcggggattggggcgcggcctcccccagcgcccgggccacgcccggcacggattgcgggccctgcggaagtgcgggccgcgccctaggatcccggcgcctacggctatcctcgcgcggcgcggaggccccagcccctggaggaagcagggcggcctggaccccggcctgggtgtcccgggtgtgctgctccctgacccacctcccacgctgccgggaaggatctgagcctgacagatcccctgccgggtgtcccgacccaggctaagcttgagcatggctgagcaggagcccacagccgagcagctggcccagattgcagcggagaacgaggaggatgagcactcggtcaactacaagcccccggcccagaagagcatccaggagatccaggagctggacaaggacgacgagagcctgcgaaagtacaaggaggccctgctgggccgcgtggccgtttccgcagaccccaacgtccccaacgtcgtggtgactggcctgaccctggtgtgcagctcggccccgggccccctggagctggacctgacgggcgacctggagagcttcaagaagcagtcgtttgtgctgaaggagggtgtggagtaccggataaaaatctctttccgggttaaccgagagatagtgtccggcatgaagtacatccagcatacgtacaggaaaggcgtcaagattgacaagactgactacatggtaggcagctatgggccccgggccgaggagtacgagttcctgacccccgtggaggaggcacccaagggtatgctggcccggggcagctacagcatcaagtcccgcttcacagacgacgacaagaccgaccacctgtcctgggagtggaatctcaccatcaagaaggactggaaggactgagcccagccagaggcgggcagggcagactgacggacggacgacggacaggcggatgtgtcccccccagcccctcccctccccataccaaagtgctgacaggccctccgtgcccctcccaccctggtccgcctccctggcctggctcaaccgagtgcctccgacccccctcctcagccctcccccacccacaggcccagcctcctcggtctcctgtctcgttgctgcttctgcctgtgctgtgggggagagaggccgcagccaggcctctgctgccctttctgtgccccccaggttctatctccccgtcacacccgaggcctggcttcaggagggagcggagcagccattctccaggccccgtggttgcccctggacgtgtgcgtctgctgctccggggtggagctggggtgtgggatgcacggcctcgtgggggccgggccgtcctccagccccgctgctccctggccagcccccttgtcgctgtcggtcccgtctaaccatgatgccttaacatgtggagtgtaccgtggggcctcactagcctctaactccctgtgtctgcatgagcatgtggcctccccgtcccttccccggtggcgaacccagtgacccagggacacgtggggtgtgctgctgctgctccccagcccaccagtgcctggccagcctgcccccttccctggacagggctgtggagatggctccggcggcttggggaaagccaaattgccaaaactcaagtcacctcagtaccatccaggaggctgggtattgtcctgcctctgccttttctgtctcagcgggcagtgcccagagcccacacccccccaagagccctcgatggacagcctcactcaccccacctgggcccagccaggagccccgcctggccatcagtatttattgcctccgtccgtgccgtccctgggccactggcctggcgcctgttcccccaggctctcagtgccaccacccccggcaggccttccctgacccagccaggaacaaacaagggaccaagtgcacacattgctgagagccgtctcctgtgcctcccccgccccatccccggtcttcgtgttgtgtctgccaggctcaggcagaggcgcctgtccctgcttcttttctgaccgggaaataaatgcccctgaagg

SEQ ID NO: 3665 - DNA, 6189 bp, Homo sapiens
  source 1..6189: mol_type = genomic DNA
gaggcgcgtgtccgtgcactagaggcccccgtgcgtgacacaggccgatgagctcctgcgggctgcacccacgcggagtcacagaccgaaaagcccgcggtgtcgagcgcaggcggaggtacatggccccgacgggaggcgcgcggcgagcacccggagctcggctccctgcctgagcacggcagccgcgcctccgcccgcgcgtcctcgcccctccggccggcagcccgcggacatgatcgtgtagcctcctcctgggctgggatttgtttgaagattttcttcatggaagcgatgtccccccagcaggagactctagggggacagccggggcgctcctcttccctgacaggagtgtctcggctcgcgggaggcagctgcaccaagaagaaaatgaaaacactagcagaaaggaggaggagcgctccatctcttatcctggataaagccctacaaaaacggcctactaccagggacagtccttctgctagtgttgacacatgcacatttctgtcatcattagtgtgctccaataggactctgctgattgatggccgggcagaactcaaaagaggcctccagaggcaggagcggcatcttttcctattcaatgatctgtttgttgtggccaaaatcaaatataacaataactttaagataaaaaataaaattaaattaactgatatgtggacagcaagctgtgtggatgaagtgggagaaggcaacaccaatgccatgaaatcctttgttttgggctggcccacagtgaactttgtggccactttcagttctccagaacaaaaggacaaatggctctctctccttcagagatacatcaatctagagaaagaaaaggactacccgaagagcattcccctcaaaatcttcgccaaggacattgggaattgtgcctactctaaaactataacagtaatgaattcagatacagcgaatgaagttatcaacatgtcattaccaatgctagggataactggctctgagagagattaccagttgtgggtcaattctggcaaagaagaggctccatacccactcattgggcatgaatatccatatggaattaaaatgagccatcttcgagactctgcactcctgacaccgggatcaaaggactctaccacccctttcaacctccaggagcccttccttatggaacagctcccccgagagatgcagtgccagttcatcctgaagcccagccgcctggctgcagcccagcaactgagtgattcaggtcataagacatttaaaaggagaagatctatcataaactgggccttctggcgaggttctagcactcacctggacaacttgccctcatcgccaacatcacctatgccaggacagctctttggaatttctctgccaaatatttgtgagaatgacaatctgcccaaacctgtcttggatatgcttttctttcttaatcaaaaaggacctctcaccaaaggtatcttcaggcaatcagccaatgtgaaatcctgcagagaactaaaagagaaattgaattctggagtcgaagtacacctagactgtgaatctatttttgtgatagcatctgtcttaaaggattttctgcgaaatattccaggaagtattttttcatcagatctctatgatcactgggtctctgtaatggatcaaggaaatgatgaagagaaaataaatactgttcaaaggctattagaccagcttccgagagccaatgttgttctcctaaggtatctttttggggtgttacacaacattgagcaacattcctcatccaatcagatgactgcatttaatttagctgtgtgtgtcgctccaagtattctttggcctcctgcttcctccagcccagaactagaaaacgaatttacaaaaaaggtttccctgcttatacaatttctgattgagaattgccttaggatatttggagaagaaatcacttccctcttcagagaggtttcagtgagatgtgacactagagagaatgcctcagatatttcttgctttcaactgaatgactcctcctatgacagcttggaaaatgagctaaatgaggatgttgatgcaccatgcagtgacttggtaaagaaacttggccaggggagcagaagcatggactctgtcttaaccctcagtgactatgatcttgaccagcccgaggtggaaggccttttaaccctaagcgactttgacttggcccattctaaagatgaagatgttcaaatgaaacggcctcttgaatccaagccggtgaacattttagtgtacacaaagatcccactgcgggatcatgccagggccccatctgccatgtgcacacccagctacctgtccacagctgcagcaaatgctgcaaaaagcctgaggcgacaccggcgttgctcagagcccagcatcgactatctggattcaaagctttcctacctcagggagttttatcagaaaaagctacgcaagtccagctgtgatgcaattctttctcaaaaagatgaagactatctgaagcagaatcaacccctccaggaggaaggaaagacatgttttaaacagagtttagtcacaggcactgatgtcagcaagaaaaatgccactactcaaaacactaagaagaaaagcttgtctggtagtgaaggaaatcacgtgaaacttttccctaagtctaagccagtggccatttctgtggcatcttatagtcctatgtcctcacaggatcattccaagaaccagccctttgatgtgaatacatctggatactccccaccacacacagcagatgccctcaagggtccaaggacacatcggcgctgctcagagcccaacatagaagaccagaaccgcaagctgacctatctcaggggaatttattcaaagaaacaacataaaaccagctgtgaagctggtctcttgcatggagaggaggattatctcaaacggcataagtctttgcaaatggaggggcagaagctcattaatcagagtttagtcatggggattgaggtgggcaagagtagtgccacaaaccaaaacactgagaaggttttacccccaagattaaacctttgcccaaggaccagctattccagcttatcctccccaggcacttccccatccggctcatcagtaagctcccaagacagtgctttttctcagatttctgaacactctgtgtttacacccactgagacttcctctccaatagattgcacttttcaggctcagagaaaacgggaagacctttctcctgactttagcaatgccagccatgtttccggaatgcccggtccctcatcagggcaggcttgcagccgcccagcctatacaaagaaggacaccatggagtggcattcacaaatgcattctgtaactcttcatcccagcacatggttgagaaatggtgtggccagtttgaaaaactggtccctcaaaaagaaagcaaaggcagccagaccagaggaagagaaaatagcttctccaaaaggacccttagagccacccccacatgcttctggtgttccagaagccaactcactgcaagaggaacaaaaagacttgcccttaagggcagctgaaggactgtcccctgtgcagtcagcccaaaggtgtagttcttctcccttccaggactcagagagacactgtagctctccattcagcctggtggagagcagacttaagctgtgcatgaagtcacatgaggaaatagagcctggtagtcagagctcttctggttctctgccttgggaaagagcctcagccagctcttggactctagaggatgcgaccagcccagactcagggcctacagtggtctgcgacattgaggacaggtatttaaccaaagacatttaagcatagtaagaatctgatgtccacaagaacaggaactgggttaataataatagacaataattattatgacccctttgtataagatacctgggagaggtagcataaggattatcattgctaatacttaggacaacgaaataattctctttattgagactacttgacaaatactttatgctaaaaattttgtcacctaagtgtttgggaggctttttcttattaaaggttgggattggtcctgtcatgtggttttagagatactaacagagggctagagaaagcatcttctgcagaggaagcacttatgggaacagtctgtgagattgatgtcctgagaagaccaagatatcaggaatgaggaataggggcctgaggagagaggggaagggtacagagaaaccatctacattccatggaatgtttttaataagtaggcaagaaaaatgccactaatcaaagcattaagtgtgtccagtaatgaagaacatcatataaaatctttccctaaatctaagccagtggccatttttgtgggatcttactaatcacgtgtccttacagaatcattccaagaaccagcccattgctacagctagagtggagaaaaacagagtgactcaaaagccatgggtaccatgatatcagttttgttggttgtatttgtcggtttgttttttcattcatgttgaagtgctttgcaaggcttcaggaaacagagttgtgaggagaaagaagaaaatggctgcccatttcagtaccctttcaaaggtatctctgcctaggaacattcttcagaaatgcaacttcttctatttagaaggtgacctcctgacagcgttcactctcaatatggaggaaaagaccacaacaactgtcctttctcaattacacaaatgctgttaaaatgtgatcaaaccatggcatcactttgctgaaatgtttctgcacagtcctgcctcttagattacagtcagccagaaaaacatacttataaatcatcccttttctgatttttgtagtttggcaattgagagagcaatattgaggttggccggttataaggagtcccacaatagaatacccaacaaagtggctgccaggccttctcagacagccatttgctttgggttttgcttccagacgttgttccatatttttgccccaaatgtttcatggcttataccccattggtttattttatatccatggacctttctttctctgctttcttgacttaaaggttgcagcagtacatctcgtcacctaggaatagattatcaggccttgccaactagtatgcagggatggcactaaaaatggatgtgcatcttctttcacattaactactaacctataagaagttgctctgagcccatttatttaaactctttagttcaccatcagatggacctttctctcacaagctagcttattccaaattatttgtcttattaatcaccagaaaatggtcatatcaaatgttctttcttttttgttctaaaggttgcattttcagttataggggaaaaaatattttctctaagatagaagaagttatttcagtattagctataggtgctacctacctcttggggacatggccctgtttgcgctaaccattacaatgatcttttagaactctgtatccaaagagctacttcgtgacactggccatctgagtcacagatgtgaagtcgatttcactttataactaaccagtcctacatattaagacttctaagtgtccatatgcatcttttttggtataatatataaagtcagcagggactcccctttcccttagggcatactactgtcagtcagaactgcaagatgtgaatgaagctcttaacggcttggagtgtctttctggaagaaattgccttttttttttttttcatgttagcaggtaaaaaatcattcacccaatttgaagcatagaagaaaatagttgctgaggttttttaataaccattcctactatctgtgttcccttagatactcctgtaattcttaatgtgaatagtttgttaatattgctgtaaagtattatattgtatgatttgaagacagactatatgtcattttattatactccatcaatctataatatattagactgatgctttatctaaaatgctttgagtttgtataatatatcttgacaaattttactaccatatgttatgtaataaatgtgtatttttgtacttgcagaaactgctgctaacttttaaagttgtttggttttcaaggcactgataatggatatgtatgaagtccatgctgtctgttaaataaaatgccattctgcagaattaaccatcc

SEQ ID NO: 3666 - DNA, 5826 bp, Homo sapiens
  source 1..5826: mol_type = genomic DNA
atgacattttggattataataaataagaaaatgaaaacactagcagaaaggaggaggagcgctccatctcttatcctggataaagccctacaaaaacggcctactaccagggacagtccttctgctagtgttgacacatgcacatttctgtcatcattagtgtgctccaataggactctgctgattgatggccgggcagaactcaaaagaggcctccagaggcaggagcggcatcttttcctattcaatgatctgtttgttgtggccaaaatcaaatataacaataactttaagataaaaaataaaattaaattaactgatatgtggacagcaagctgtgtggatgaagtgggagaaggcaacaccaatgccatgaaatcctttgttttgggctggcccacagtgaactttgtggccactttcagttctccagaacaaaaggacaaatggctctctctccttcagagatacatcaatctagagaaagaaaaggactacccgaagagcattcccctcaaaatcttcgccaaggacattgggaattgtgcctactctaaaactataacagtaatgaattcagatacagcgaatgaagttatcaacatgtcattaccaatgctagggataactggctctgagagagattaccagttgtgggtcaattctggcaaagaagaggctccatacccactcattgggcatgaatatccatatggaattaaaatgagccatcttcgagactctgcactcctgacaccgggatcaaaggactctaccacccctttcaacctccaggagcccttccttatggaacagctcccccgagagatgcagtgccagttcatcctgaagcccagccgcctggctgcagcccagcaactgagtgattcaggtcataagacatttaaaaggagaagatctatcataaactgggccttctggcgaggttctagcactcacctggacaacttgccctcatcgccaacatcacctatgccaggacagctctttggaatttctctgccaaatatttgtgagaatgacaatctgcccaaacctgtcttggatatgcttttctttcttaatcaaaaaggacctctcaccaaaggtatcttcaggcaatcagccaatgtgaaatcctgcagagaactaaaagagaaattgaattctggagtcgaagtacacctagactgtgaatctatttttgtgatagcatctgtcttaaaggattttctgcgaaatattccaggaagtattttttcatcagatctctatgatcactgggtctctgtaatggatcaaggaaatgatgaagagaaaataaatactgttcaaaggctattagaccagcttccgagagccaatgttgttctcctaaggtatctttttggggtgttacacaacattgagcaacattcctcatccaatcagatgactgcatttaatttagctgtgtgtgtcgctccaagtattctttggcctcctgcttcctccagcccagaactagaaaacgaatttacaaaaaaggtttccctgcttatacaatttctgattgagaattgccttaggatatttggagaagaaatcacttccctcttcagagaggtttcagtgagatgtgacactagagagaatgcctcagatatttcttgctttcaactgaatgactcctcctatgacagcttggaaaatgagctaaatgaggatgttgatgcaccatgcagtgacttggtaaagaaacttggccaggggagcagaagcatggactctgtcttaaccctcagtgactatgatcttgaccagcccgaggtggaaggccttttaaccctaagcgactttgacttggcccattctaaagatgaagatgttcaaatgaaacggcctcttgaatccaagccggtgaacattttagtgtacacaaagatcccactgcgggatcatgccagggccccatctgccatgtgcacacccagctacctgtccacagctgcagcaaatgctgcaaaaagcctgaggcgacaccggcgttgctcagagcccagcatcgactatctggattcaaagctttcctacctcagggagttttatcagaaaaagctacgcaagtccagctgtgatgcaattctttctcaaaaagatgaagactatctgaagcagaatcaacccctccaggaggaaggaaagacatgttttaaacagagtttagtcacaggcactgatgtcagcaagaaaaatgccactactcaaaacactaagaagaaaagcttgtctggtagtgaaggaaatcacgtgaaacttttccctaagtctaagccagtggccatttctgtggcatcttatagtcctatgtcctcacaggatcattccaagaaccagccctttgatgtgaatacatctggatactccccaccacacacagcagatgccctcaagggtccaaggacacatcggcgctgctcagagcccaacatagaagaccagaaccgcaagctgacctatctcaggggaatttattcaaagaaacaacataaaaccagctgtgaagctggtctcttgcatggagaggaggattatctcaaacggcataagtctttgcaaatggaggggcagaagctcattaatcagagtttagtcatggggattgaggtgggcaagagtagtgccacaaaccaaaacactgagaaggttttacccccaagattaaacctttgcccaaggaccagctattccagcttatcctccccaggcacttccccatccggctcatcagtaagctcccaagacagtgctttttctcagatttctgaacactctgtgtttacacccactgagacttcctctccaatagattgcacttttcaggctcagagaaaacgggaagacctttctcctgactttagcaatgccagccatgtttccggaatgcccggtccctcatcagggcaggcttgcagccgcccagcctatacaaagaaggacaccatggagtggcattcacaaatgcattctgtaactcttcatcccagcacatggttgagaaatggtgtggccagtttgaaaaactggtccctcaaaaagaaagcaaaggcagccagaccagaggaagagaaaatagcttctccaaaaggacccttagagccacccccacatgcttctggtgttccagaagccaactcactgcaagaggaacaaaaagacttgcccttaagggcagctgaaggactgtcccctgtgcagtcagcccaaaggtgtagttcttctcccttccaggactcagagagacactgtagctctccattcagcctggtggagagcagacttaagctgtgcatgaagtcacatgaggaaatagagcctggtagtcagagctcttctggttctctgccttgggaaagagcctcagccagctcttggactctagaggatgcgaccagcccagactcagggcctacagtggtctgcgacattgaggacaggtatttaaccaaagacatttaagcatagtaagaatctgatgtccacaagaacaggaactgggttaataataatagacaataattattatgacccctttgtataagatacctgggagaggtagcataaggattatcattgctaatacttaggacaacgaaataattctctttattgagactacttgacaaatactttatgctaaaaattttgtcacctaagtgtttgggaggctttttcttattaaaggttgggattggtcctgtcatgtggttttagagatactaacagagggctagagaaagcatcttctgcagaggaagcacttatgggaacagtctgtgagattgatgtcctgagaagaccaagatatcaggaatgaggaataggggcctgaggagagaggggaagggtacagagaaaccatctacattccatggaatgtttttaataagtaggcaagaaaaatgccactaatcaaagcattaagtgtgtccagtaatgaagaacatcatataaaatctttccctaaatctaagccagtggccatttttgtgggatcttactaatcacgtgtccttacagaatcattccaagaaccagcccattgctacagctagagtggagaaaaacagagtgactcaaaagccatgggtaccatgatatcagttttgttggttgtatttgtcggtttgttttttcattcatgttgaagtgctttgcaaggcttcaggaaacagagttgtgaggagaaagaagaaaatggctgcccatttcagtaccctttcaaaggtatctctgcctaggaacattcttcagaaatgcaacttcttctatttagaaggtgacctcctgacagcgttcactctcaatatggaggaaaagaccacaacaactgtcctttctcaattacacaaatgctgttaaaatgtgatcaaaccatggcatcactttgctgaaatgtttctgcacagtcctgcctcttagattacagtcagccagaaaaacatacttataaatcatcccttttctgatttttgtagtttggcaattgagagagcaatattgaggttggccggttataaggagtcccacaatagaatacccaacaaagtggctgccaggccttctcagacagccatttgctttgggttttgcttccagacgttgttccatatttttgccccaaatgtttcatggcttataccccattggtttattttatatccatggacctttctttctctgctttcttgacttaaaggttgcagcagtacatctcgtcacctaggaatagattatcaggccttgccaactagtatgcagggatggcactaaaaatggatgtgcatcttctttcacattaactactaacctataagaagttgctctgagcccatttatttaaactctttagttcaccatcagatggacctttctctcacaagctagcttattccaaattatttgtcttattaatcaccagaaaatggtcatatcaaatgttctttcttttttgttctaaaggttgcattttcagttataggggaaaaaatattttctctaagatagaagaagttatttcagtattagctataggtgctacctacctcttggggacatggccctgtttgcgctaaccattacaatgatcttttagaactctgtatccaaagagctacttcgtgacactggccatctgagtcacagatgtgaagtcgatttcactttataactaaccagtcctacatattaagacttctaagtgtccatatgcatcttttttggtataatatataaagtcagcagggactcccctttcccttagggcatactactgtcagtcagaactgcaagatgtgaatgaagctcttaacggcttggagtgtctttctggaagaaattgccttttttttttttttcatgttagcaggtaaaaaatcattcacccaatttgaagcatagaagaaaatagttgctgaggttttttaataaccattcctactatctgtgttcccttagatactcctgtaattcttaatgtgaatagtttgttaatattgctgtaaagtattatattgtatgatttgaagacagactatatgtcattttattatactccatcaatctataatatattagactgatgctttatctaaaatgctttgagtttgtataatatatcttgacaaattttactaccatatgttatgtaataaatgtgtatttttgtacttgcagaaactgctgctaacttttaaagttgtttggttttcaaggcactgataatggatatgtatgaagtccatgctgtctgttaaataaaatgccattctgcagaattaaccatcc

SEQ ID NO: 3667 - DNA, 6180 bp, Homo sapiens
  source 1..6180: mol_type = genomic DNA
acagcagcgcgctaggcggacgccgcgggaatttgacgctcgaggctcgcggcccctaatgagagtcccagaacacttcccgcccttgacggccagcggcagcgccgccgcctcccgcagagcgcccgcttctccgtttctagagccttagtctctcctcgagcgacctcgcagcctccctcccgtctccatccgccgccggttctgcagcccggctcctccctcagtctaggcgcgcgggctgtagtgggcgatcgcctttccccgacccctcgccgtgcccctgggcctcccgaagtggcctgggcgagcactgactgccctttggcggtgtcagccccaaagtcagggccggcgatgtctgcccgggagcggcagccggcgctgaagaagaaaatgaaaacactagcagaaaggaggaggagcgctccatctcttatcctggataaagccctacaaaaacggcctactaccagggacagtccttctgctagtgttgacacatgcacatttctgtcatcattagtgtgctccaataggactctgctgattgatggccgggcagaactcaaaagaggcctccagaggcaggagcggcatcttttcctattcaatgatctgtttgttgtggccaaaatcaaatataacaataactttaagataaaaaataaaattaaattaactgatatgtggacagcaagctgtgtggatgaagtgggagaaggcaacaccaatgccatgaaatcctttgttttgggctggcccacagtgaactttgtggccactttcagttctccagaacaaaaggacaaatggctctctctccttcagagatacatcaatctagagaaagaaaaggactacccgaagagcattcccctcaaaatcttcgccaaggacattgggaattgtgcctactctaaaactataacagtaatgaattcagatacagcgaatgaagttatcaacatgtcattaccaatgctagggataactggctctgagagagattaccagttgtgggtcaattctggcaaagaagaggctccatacccactcattgggcatgaatatccatatggaattaaaatgagccatcttcgagactctgcactcctgacaccgggatcaaaggactctaccacccctttcaacctccaggagcccttccttatggaacagctcccccgagagatgcagtgccagttcatcctgaagcccagccgcctggctgcagcccagcaactgagtgattcaggtcataagacatttaaaaggagaagatctatcataaactgggccttctggcgaggttctagcactcacctggacaacttgccctcatcgccaacatcacctatgccaggacagctctttggaatttctctgccaaatatttgtgagaatgacaatctgcccaaacctgtcttggatatgcttttctttcttaatcaaaaaggacctctcaccaaaggtatcttcaggcaatcagccaatgtgaaatcctgcagagaactaaaagagaaattgaattctggagtcgaagtacacctagactgtgaatctatttttgtgatagcatctgtcttaaaggattttctgcgaaatattccaggaagtattttttcatcagatctctatgatcactgggtctctgtaatggatcaaggaaatgatgaagagaaaataaatactgttcaaaggctattagaccagcttccgagagccaatgttgttctcctaaggtatctttttggggtgttacacaacattgagcaacattcctcatccaatcagatgactgcatttaatttagctgtgtgtgtcgctccaagtattctttggcctcctgcttcctccagcccagaactagaaaacgaatttacaaaaaaggtttccctgcttatacaatttctgattgagaattgccttaggatatttggagaagaaatcacttccctcttcagagaggtttcagtgagatgtgacactagagagaatgcctcagatatttcttgctttcaactgaatgactcctcctatgacagcttggaaaatgagctaaatgaggatgttgatgcaccatgcagtgacttggtaaagaaacttggccaggggagcagaagcatggactctgtcttaaccctcagtgactatgatcttgaccagcccgaggtggaaggccttttaaccctaagcgactttgacttggcccattctaaagatgaagatgttcaaatgaaacggcctcttgaatccaagccggtgaacattttagtgtacacaaagatcccactgcgggatcatgccagggccccatctgccatgtgcacacccagctacctgtccacagctgcagcaaatgctgcaaaaagcctgaggcgacaccggcgttgctcagagcccagcatcgactatctggattcaaagctttcctacctcagggagttttatcagaaaaagctacgcaagtccagctgtgatgcaattctttctcaaaaagatgaagactatctgaagcagaatcaacccctccaggaggaaggaaagacatgttttaaacagagtttagtcacaggcactgatgtcagcaagaaaaatgccactactcaaaacactaagaagaaaagcttgtctggtagtgaaggaaatcacgtgaaacttttccctaagtctaagccagtggccatttctgtggcatcttatagtcctatgtcctcacaggatcattccaagaaccagccctttgatgtgaatacatctggatactccccaccacacacagcagatgccctcaagggtccaaggacacatcggcgctgctcagagcccaacatagaagaccagaaccgcaagctgacctatctcaggggaatttattcaaagaaacaacataaaaccagctgtgaagctggtctcttgcatggagaggaggattatctcaaacggcataagtctttgcaaatggaggggcagaagctcattaatcagagtttagtcatggggattgaggtgggcaagagtagtgccacaaaccaaaacactgagaaggttttacccccaagattaaacctttgcccaaggaccagctattccagcttatcctccccaggcacttccccatccggctcatcagtaagctcccaagacagtgctttttctcagatttctgaacactctgtgtttacacccactgagacttcctctccaatagattgcacttttcaggctcagagaaaacgggaagacctttctcctgactttagcaatgccagccatgtttccggaatgcccggtccctcatcagggcaggcttgcagccgcccagcctatacaaagaaggacaccatggagtggcattcacaaatgcattctgtaactcttcatcccagcacatggttgagaaatggtgtggccagtttgaaaaactggtccctcaaaaagaaagcaaaggcagccagaccagaggaagagaaaatagcttctccaaaaggacccttagagccacccccacatgcttctggtgttccagaagccaactcactgcaagaggaacaaaaagacttgcccttaagggcagctgaaggactgtcccctgtgcagtcagcccaaaggtgtagttcttctcccttccaggactcagagagacactgtagctctccattcagcctggtggagagcagacttaagctgtgcatgaagtcacatgaggaaatagagcctggtagtcagagctcttctggttctctgccttgggaaagagcctcagccagctcttggactctagaggatgcgaccagcccagactcagggcctacagtggtctgcgacattgaggacaggtatttaaccaaagacatttaagcatagtaagaatctgatgtccacaagaacaggaactgggttaataataatagacaataattattatgacccctttgtataagatacctgggagaggtagcataaggattatcattgctaatacttaggacaacgaaataattctctttattgagactacttgacaaatactttatgctaaaaattttgtcacctaagtgtttgggaggctttttcttattaaaggttgggattggtcctgtcatgtggttttagagatactaacagagggctagagaaagcatcttctgcagaggaagcacttatgggaacagtctgtgagattgatgtcctgagaagaccaagatatcaggaatgaggaataggggcctgaggagagaggggaagggtacagagaaaccatctacattccatggaatgtttttaataagtaggcaagaaaaatgccactaatcaaagcattaagtgtgtccagtaatgaagaacatcatataaaatctttccctaaatctaagccagtggccatttttgtgggatcttactaatcacgtgtccttacagaatcattccaagaaccagcccattgctacagctagagtggagaaaaacagagtgactcaaaagccatgggtaccatgatatcagttttgttggttgtatttgtcggtttgttttttcattcatgttgaagtgctttgcaaggcttcaggaaacagagttgtgaggagaaagaagaaaatggctgcccatttcagtaccctttcaaaggtatctctgcctaggaacattcttcagaaatgcaacttcttctatttagaaggtgacctcctgacagcgttcactctcaatatggaggaaaagaccacaacaactgtcctttctcaattacacaaatgctgttaaaatgtgatcaaaccatggcatcactttgctgaaatgtttctgcacagtcctgcctcttagattacagtcagccagaaaaacatacttataaatcatcccttttctgatttttgtagtttggcaattgagagagcaatattgaggttggccggttataaggagtcccacaatagaatacccaacaaagtggctgccaggccttctcagacagccatttgctttgggttttgcttccagacgttgttccatatttttgccccaaatgtttcatggcttataccccattggtttattttatatccatggacctttctttctctgctttcttgacttaaaggttgcagcagtacatctcgtcacctaggaatagattatcaggccttgccaactagtatgcagggatggcactaaaaatggatgtgcatcttctttcacattaactactaacctataagaagttgctctgagcccatttatttaaactctttagttcaccatcagatggacctttctctcacaagctagcttattccaaattatttgtcttattaatcaccagaaaatggtcatatcaaatgttctttcttttttgttctaaaggttgcattttcagttataggggaaaaaatattttctctaagatagaagaagttatttcagtattagctataggtgctacctacctcttggggacatggccctgtttgcgctaaccattacaatgatcttttagaactctgtatccaaagagctacttcgtgacactggccatctgagtcacagatgtgaagtcgatttcactttataactaaccagtcctacatattaagacttctaagtgtccatatgcatcttttttggtataatatataaagtcagcagggactcccctttcccttagggcatactactgtcagtcagaactgcaagatgtgaatgaagctcttaacggcttggagtgtctttctggaagaaattgccttttttttttttttcatgttagcaggtaaaaaatcattcacccaatttgaagcatagaagaaaatagttgctgaggttttttaataaccattcctactatctgtgttcccttagatactcctgtaattcttaatgtgaatagtttgttaatattgctgtaaagtattatattgtatgatttgaagacagactatatgtcattttattatactccatcaatctataatatattagactgatgctttatctaaaatgctttgagtttgtataatatatcttgacaaattttactaccatatgttatgtaataaatgtgtatttttgtacttgcagaaactgctgctaacttttaaagttgtttggttttcaaggcactgataatggatatgtatgaagtccatgctgtctgttaaataaaatgccattctgcag

SEQ ID NO: 3668 - DNA, 5998 bp, Homo sapiens
  source 1..5998: mol_type = genomic DNA
gtagccttctcaatagcttagccaaatttcggcgtcctcgctctgtctgcattttccttcattgctctttcacgtttggaatgcccccgtctctgcagcctgcagacagcggaaaccgcgggtgcaaatgtgcaggggccgctgacatgaccggctgcagaagcccactcagggttacccgaacaggctagcgttcgggattgcacaagagaaaatgaaaacactagcagaaaggaggaggagcgctccatctcttatcctggataaagccctacaaaaacggcctactaccagggacagtccttctgctagtgttgacacatgcacatttctgtcatcattagtgtgctccaataggactctgctgattgatggccgggcagaactcaaaagaggcctccagaggcaggagcggcatcttttcctattcaatgatctgtttgttgtggccaaaatcaaatataacaataactttaagataaaaaataaaattaaattaactgatatgtggacagcaagctgtgtggatgaagtgggagaaggcaacaccaatgccatgaaatcctttgttttgggctggcccacagtgaactttgtggccactttcagttctccagaacaaaaggacaaatggctctctctccttcagagatacatcaatctagagaaagaaaaggactacccgaagagcattcccctcaaaatcttcgccaaggacattgggaattgtgcctactctaaaactataacagtaatgaattcagatacagcgaatgaagttatcaacatgtcattaccaatgctagggataactggctctgagagagattaccagttgtgggtcaattctggcaaagaagaggctccatacccactcattgggcatgaatatccatatggaattaaaatgagccatcttcgagactctgcactcctgacaccgggatcaaaggactctaccacccctttcaacctccaggagcccttccttatggaacagctcccccgagagatgcagtgccagttcatcctgaagcccagccgcctggctgcagcccagcaactgagtgattcaggtcataagacatttaaaaggagaagatctatcataaactgggccttctggcgaggttctagcactcacctggacaacttgccctcatcgccaacatcacctatgccaggacagctctttggaatttctctgccaaatatttgtgagaatgacaatctgcccaaacctgtcttggatatgcttttctttcttaatcaaaaaggacctctcaccaaaggtatcttcaggcaatcagccaatgtgaaatcctgcagagaactaaaagagaaattgaattctggagtcgaagtacacctagactgtgaatctatttttgtgatagcatctgtcttaaaggattttctgcgaaatattccaggaagtattttttcatcagatctctatgatcactgggtctctgtaatggatcaaggaaatgatgaagagaaaataaatactgttcaaaggctattagaccagcttccgagagccaatgttgttctcctaaggtatctttttggggtgttacacaacattgagcaacattcctcatccaatcagatgactgcatttaatttagctgtgtgtgtcgctccaagtattctttggcctcctgcttcctccagcccagaactagaaaacgaatttacaaaaaaggtttccctgcttatacaatttctgattgagaattgccttaggatatttggagaagaaatcacttccctcttcagagaggtttcagtgagatgtgacactagagagaatgcctcagatatttcttgctttcaactgaatgactcctcctatgacagcttggaaaatgagctaaatgaggatgttgatgcaccatgcagtgacttggtaaagaaacttggccaggggagcagaagcatggactctgtcttaaccctcagtgactatgatcttgaccagcccgaggtggaaggccttttaaccctaagcgactttgacttggcccattctaaagatgaagatgttcaaatgaaacggcctcttgaatccaagccggtgaacattttagtgtacacaaagatcccactgcgggatcatgccagggccccatctgccatgtgcacacccagctacctgtccacagctgcagcaaatgctgcaaaaagcctgaggcgacaccggcgttgctcagagcccagcatcgactatctggattcaaagctttcctacctcagggagttttatcagaaaaagctacgcaagtccagctgtgatgcaattctttctcaaaaagatgaagactatctgaagcagaatcaacccctccaggaggaaggaaagacatgttttaaacagagtttagtcacaggcactgatgtcagcaagaaaaatgccactactcaaaacactaagaagaaaagcttgtctggtagtgaaggaaatcacgtgaaacttttccctaagtctaagccagtggccatttctgtggcatcttatagtcctatgtcctcacaggatcattccaagaaccagccctttgatgtgaatacatctggatactccccaccacacacagcagatgccctcaagggtccaaggacacatcggcgctgctcagagcccaacatagaagaccagaaccgcaagctgacctatctcaggggaatttattcaaagaaacaacataaaaccagctgtgaagctggtctcttgcatggagaggaggattatctcaaacggcataagtctttgcaaatggaggggcagaagctcattaatcagagtttagtcatggggattgaggtgggcaagagtagtgccacaaaccaaaacactgagaaggttttacccccaagattaaacctttgcccaaggaccagctattccagcttatcctccccaggcacttccccatccggctcatcagtaagctcccaagacagtgctttttctcagatttctgaacactctgtgtttacacccactgagacttcctctccaatagattgcacttttcaggctcagagaaaacgggaagacctttctcctgactttagcaatgccagccatgtttccggaatgcccggtccctcatcagggcaggcttgcagccgcccagcctatacaaagaaggacaccatggagtggcattcacaaatgcattctgtaactcttcatcccagcacatggttgagaaatggtgtggccagtttgaaaaactggtccctcaaaaagaaagcaaaggcagccagaccagaggaagagaaaatagcttctccaaaaggacccttagagccacccccacatgcttctggtgttccagaagccaactcactgcaagaggaacaaaaagacttgcccttaagggcagctgaaggactgtcccctgtgcagtcagcccaaaggtgtagttcttctcccttccaggactcagagagacactgtagctctccattcagcctggtggagagcagacttaagctgtgcatgaagtcacatgaggaaatagagcctggtagtcagagctcttctggttctctgccttgggaaagagcctcagccagctcttggactctagaggatgcgaccagcccagactcagggcctacagtggtctgcgacattgaggacaggtatttaaccaaagacatttaagcatagtaagaatctgatgtccacaagaacaggaactgggttaataataatagacaataattattatgacccctttgtataagatacctgggagaggtagcataaggattatcattgctaatacttaggacaacgaaataattctctttattgagactacttgacaaatactttatgctaaaaattttgtcacctaagtgtttgggaggctttttcttattaaaggttgggattggtcctgtcatgtggttttagagatactaacagagggctagagaaagcatcttctgcagaggaagcacttatgggaacagtctgtgagattgatgtcctgagaagaccaagatatcaggaatgaggaataggggcctgaggagagaggggaagggtacagagaaaccatctacattccatggaatgtttttaataagtaggcaagaaaaatgccactaatcaaagcattaagtgtgtccagtaatgaagaacatcatataaaatctttccctaaatctaagccagtggccatttttgtgggatcttactaatcacgtgtccttacagaatcattccaagaaccagcccattgctacagctagagtggagaaaaacagagtgactcaaaagccatgggtaccatgatatcagttttgttggttgtatttgtcggtttgttttttcattcatgttgaagtgctttgcaaggcttcaggaaacagagttgtgaggagaaagaagaaaatggctgcccatttcagtaccctttcaaaggtatctctgcctaggaacattcttcagaaatgcaacttcttctatttagaaggtgacctcctgacagcgttcactctcaatatggaggaaaagaccacaacaactgtcctttctcaattacacaaatgctgttaaaatgtgatcaaaccatggcatcactttgctgaaatgtttctgcacagtcctgcctcttagattacagtcagccagaaaaacatacttataaatcatcccttttctgatttttgtagtttggcaattgagagagcaatattgaggttggccggttataaggagtcccacaatagaatacccaacaaagtggctgccaggccttctcagacagccatttgctttgggttttgcttccagacgttgttccatatttttgccccaaatgtttcatggcttataccccattggtttattttatatccatggacctttctttctctgctttcttgacttaaaggttgcagcagtacatctcgtcacctaggaatagattatcaggccttgccaactagtatgcagggatggcactaaaaatggatgtgcatcttctttcacattaactactaacctataagaagttgctctgagcccatttatttaaactctttagttcaccatcagatggacctttctctcacaagctagcttattccaaattatttgtcttattaatcaccagaaaatggtcatatcaaatgttctttcttttttgttctaaaggttgcattttcagttataggggaaaaaatattttctctaagatagaagaagttatttcagtattagctataggtgctacctacctcttggggacatggccctgtttgcgctaaccattacaatgatcttttagaactctgtatccaaagagctacttcgtgacactggccatctgagtcacagatgtgaagtcgatttcactttataactaaccagtcctacatattaagacttctaagtgtccatatgcatcttttttggtataatatataaagtcagcagggactcccctttcccttagggcatactactgtcagtcagaactgcaagatgtgaatgaagctcttaacggcttggagtgtctttctggaagaaattgccttttttttttttttcatgttagcaggtaaaaaatcattcacccaatttgaagcatagaagaaaatagttgctgaggttttttaataaccattcctactatctgtgttcccttagatactcctgtaattcttaatgtgaatagtttgttaatattgctgtaaagtattatattgtatgatttgaagacagactatatgtcattttattatactccatcaatctataatatattagactgatgctttatctaaaatgctttgagtttgtataatatatcttgacaaattttactaccatatgttatgtaataaatgtgtatttttgtacttgcagaaactgctgctaacttttaaagttgtttggttttcaaggcactgataatggatatgtatgaagtccatgctgtctgttaaataaaatgccattctgcag

SEQ ID NO: 3669 - DNA, 5880 bp, Homo sapiens
  source 1..5880: mol_type = genomic DNA
gaggcgcgtgtccgtgcactagaggcccccgtgcgtgacacaggccgatgagctcctgcgggctgcacccacgcggagtcacagaccgaaaagaaaatgaaaacactagcagaaaggaggaggagcgctccatctcttatcctggataaagccctacaaaaacggcctactaccagggacagtccttctgctagtgttgacacatgcacatttctgtcatcattagtgtgctccaataggactctgctgattgatggccgggcagaactcaaaagaggcctccagaggcaggagcggcatcttttcctattcaatgatctgtttgttgtggccaaaatcaaatataacaataactttaagataaaaaataaaattaaattaactgatatgtggacagcaagctgtgtggatgaagtgggagaaggcaacaccaatgccatgaaatcctttgttttgggctggcccacagtgaactttgtggccactttcagttctccagaacaaaaggacaaatggctctctctccttcagagatacatcaatctagagaaagaaaaggactacccgaagagcattcccctcaaaatcttcgccaaggacattgggaattgtgcctactctaaaactataacagtaatgaattcagatacagcgaatgaagttatcaacatgtcattaccaatgctagggataactggctctgagagagattaccagttgtgggtcaattctggcaaagaagaggctccatacccactcattgggcatgaatatccatatggaattaaaatgagccatcttcgagactctgcactcctgacaccgggatcaaaggactctaccacccctttcaacctccaggagcccttccttatggaacagctcccccgagagatgcagtgccagttcatcctgaagcccagccgcctggctgcagcccagcaactgagtgattcaggtcataagacatttaaaaggagaagatctatcataaactgggccttctggcgaggttctagcactcacctggacaacttgccctcatcgccaacatcacctatgccaggacagctctttggaatttctctgccaaatatttgtgagaatgacaatctgcccaaacctgtcttggatatgcttttctttcttaatcaaaaaggacctctcaccaaaggtatcttcaggcaatcagccaatgtgaaatcctgcagagaactaaaagagaaattgaattctggagtcgaagtacacctagactgtgaatctatttttgtgatagcatctgtcttaaaggattttctgcgaaatattccaggaagtattttttcatcagatctctatgatcactgggtctctgtaatggatcaaggaaatgatgaagagaaaataaatactgttcaaaggctattagaccagcttccgagagccaatgttgttctcctaaggtatctttttggggtgttacacaacattgagcaacattcctcatccaatcagatgactgcatttaatttagctgtgtgtgtcgctccaagtattctttggcctcctgcttcctccagcccagaactagaaaacgaatttacaaaaaaggtttccctgcttatacaatttctgattgagaattgccttaggatatttggagaagaaatcacttccctcttcagagaggtttcagtgagatgtgacactagagagaatgcctcagatatttcttgctttcaactgaatgactcctcctatgacagcttggaaaatgagctaaatgaggatgttgatgcaccatgcagtgacttggtaaagaaacttggccaggggagcagaagcatggactctgtcttaaccctcagtgactatgatcttgaccagcccgaggtggaaggccttttaaccctaagcgactttgacttggcccattctaaagatgaagatgttcaaatgaaacggcctcttgaatccaagccggtgaacattttagtgtacacaaagatcccactgcgggatcatgccagggccccatctgccatgtgcacacccagctacctgtccacagctgcagcaaatgctgcaaaaagcctgaggcgacaccggcgttgctcagagcccagcatcgactatctggattcaaagctttcctacctcagggagttttatcagaaaaagctacgcaagtccagctgtgatgcaattctttctcaaaaagatgaagactatctgaagcagaatcaacccctccaggaggaaggaaagacatgttttaaacagagtttagtcacaggcactgatgtcagcaagaaaaatgccactactcaaaacactaagaagaaaagcttgtctggtagtgaaggaaatcacgtgaaacttttccctaagtctaagccagtggccatttctgtggcatcttatagtcctatgtcctcacaggatcattccaagaaccagccctttgatgtgaatacatctggatactccccaccacacacagcagatgccctcaagggtccaaggacacatcggcgctgctcagagcccaacatagaagaccagaaccgcaagctgacctatctcaggggaatttattcaaagaaacaacataaaaccagctgtgaagctggtctcttgcatggagaggaggattatctcaaacggcataagtctttgcaaatggaggggcagaagctcattaatcagagtttagtcatggggattgaggtgggcaagagtagtgccacaaaccaaaacactgagaaggttttacccccaagattaaacctttgcccaaggaccagctattccagcttatcctccccaggcacttccccatccggctcatcagtaagctcccaagacagtgctttttctcagatttctgaacactctgtgtttacacccactgagacttcctctccaatagattgcacttttcaggctcagagaaaacgggaagacctttctcctgactttagcaatgccagccatgtttccggaatgcccggtccctcatcagggcaggcttgcagccgcccagcctatacaaagaaggacaccatggagtggcattcacaaatgcattctgtaactcttcatcccagcacatggttgagaaatggtgtggccagtttgaaaaactggtccctcaaaaagaaagcaaaggcagccagaccagaggaagagaaaatagcttctccaaaaggacccttagagccacccccacatgcttctggtgttccagaagccaactcactgcaagaggaacaaaaagacttgcccttaagggcagctgaaggactgtcccctgtgcagtcagcccaaaggtgtagttcttctcccttccaggactcagagagacactgtagctctccattcagcctggtggagagcagacttaagctgtgcatgaagtcacatgaggaaatagagcctggtagtcagagctcttctggttctctgccttgggaaagagcctcagccagctcttggactctagaggatgcgaccagcccagactcagggcctacagtggtctgcgacattgaggacaggtatttaaccaaagacatttaagcatagtaagaatctgatgtccacaagaacaggaactgggttaataataatagacaataattattatgacccctttgtataagatacctgggagaggtagcataaggattatcattgctaatacttaggacaacgaaataattctctttattgagactacttgacaaatactttatgctaaaaattttgtcacctaagtgtttgggaggctttttcttattaaaggttgggattggtcctgtcatgtggttttagagatactaacagagggctagagaaagcatcttctgcagaggaagcacttatgggaacagtctgtgagattgatgtcctgagaagaccaagatatcaggaatgaggaataggggcctgaggagagaggggaagggtacagagaaaccatctacattccatggaatgtttttaataagtaggcaagaaaaatgccactaatcaaagcattaagtgtgtccagtaatgaagaacatcatataaaatctttccctaaatctaagccagtggccatttttgtgggatcttactaatcacgtgtccttacagaatcattccaagaaccagcccattgctacagctagagtggagaaaaacagagtgactcaaaagccatgggtaccatgatatcagttttgttggttgtatttgtcggtttgttttttcattcatgttgaagtgctttgcaaggcttcaggaaacagagttgtgaggagaaagaagaaaatggctgcccatttcagtaccctttcaaaggtatctctgcctaggaacattcttcagaaatgcaacttcttctatttagaaggtgacctcctgacagcgttcactctcaatatggaggaaaagaccacaacaactgtcctttctcaattacacaaatgctgttaaaatgtgatcaaaccatggcatcactttgctgaaatgtttctgcacagtcctgcctcttagattacagtcagccagaaaaacatacttataaatcatcccttttctgatttttgtagtttggcaattgagagagcaatattgaggttggccggttataaggagtcccacaatagaatacccaacaaagtggctgccaggccttctcagacagccatttgctttgggttttgcttccagacgttgttccatatttttgccccaaatgtttcatggcttataccccattggtttattttatatccatggacctttctttctctgctttcttgacttaaaggttgcagcagtacatctcgtcacctaggaatagattatcaggccttgccaactagtatgcagggatggcactaaaaatggatgtgcatcttctttcacattaactactaacctataagaagttgctctgagcccatttatttaaactctttagttcaccatcagatggacctttctctcacaagctagcttattccaaattatttgtcttattaatcaccagaaaatggtcatatcaaatgttctttcttttttgttctaaaggttgcattttcagttataggggaaaaaatattttctctaagatagaagaagttatttcagtattagctataggtgctacctacctcttggggacatggccctgtttgcgctaaccattacaatgatcttttagaactctgtatccaaagagctacttcgtgacactggccatctgagtcacagatgtgaagtcgatttcactttataactaaccagtcctacatattaagacttctaagtgtccatatgcatcttttttggtataatatataaagtcagcagggactcccctttcccttagggcatactactgtcagtcagaactgcaagatgtgaatgaagctcttaacggcttggagtgtctttctggaagaaattgccttttttttttttttcatgttagcaggtaaaaaatcattcacccaatttgaagcatagaagaaaatagttgctgaggttttttaataaccattcctactatctgtgttcccttagatactcctgtaattcttaatgtgaatagtttgttaatattgctgtaaagtattatattgtatgatttgaagacagactatatgtcattttattatactccatcaatctataatatattagactgatgctttatctaaaatgctttgagtttgtataatatatcttgacaaattttactaccatatgttatgtaataaatgtgtatttttgtacttgcagaaactgctgctaacttttaaagttgtttggttttcaaggcactgataatggatatgtatgaagtccatgctgtctgttaaataaaatgccattctgcag

SEQ ID NO: 3670 - DNA, 2623 bp, Homo sapiens
  source 1..2623: mol_type = genomic DNA
gttttctgcccccacattcttggaaatgctctacatttttggaaacacctacagtcaaaatgagctttaagcagagcttttgaccttagcagtatcttctgcagacctgtgtcaggctctcacctcccaaaggattggaatgcaccagagctaggggtcgagacaaggccccagcctgtatctcaggctgaaacgtgaaaaccaagttaaggaaaatatggtgaagaagattcttgcatacccctactccagctgagtgcccaggattttctgcgaaatattccaggaagtattttttcatcagatctctatgatcactgggtctctgtaatggatcaaggaaatgatgaagagaaaataaatactgttcaaaggctattagaccagcttccgagagccaatgttgttctcctaaggtatctttttggggtgttacacaacattgagcaacattcctcatccaatcagatgactgcatttaatttagctgtgtgtgtcgctccaagtattctttggcctcctgcttcctccagcccagaactagaaaacgaatttacaaaaaaggtttccctgcttatacaatttctgattgagaattgccttaggatatttggagaagaaatcacttccctcttcagagaggtttcagtgagatgtgacactagagagaatgcctcagatatttcttgctttcaactgaatgactcctcctatgacagcttggaaaatgagctaaatgaggatgttgatgcaccatgcagtgacttggtaaagaaacttggccaggggagcagaagcatggactctgtcttaaccctcagtgactatgatcttgaccagcccgaggtggaaggccttttaaccctaagcgactttgacttggcccattctaaagatgaagatgttcaaatgaaacggcctcttgaatccaagccggtgaacattttagtgtacacaaagatcccactgcgggatcatgccagggccccatctgccatgtgcacacccagctacctgtccacagctgcagcaaatgctgcaaaaagcctgaggcgacaccggcgttgctcagagcccagcatcgactatctggattcaaagctttcctacctcagggagttttatcagaaaaagctacgcaagtccagctgtgatgcaattctttctcaaaaagatgaagactatctgaagcagaatcaacccctccaggaggaaggaaagacatgttttaaacagagtttagtcacaggcactgatgtcagcaagaaaaatgccactactcaaaacactaagaagaaaagcttgtctggtagtgaaggaaatcacgtgaaacttttccctaagtctaagccagtggccatttctgtggcatcttatagtcctatgtcctcacaggatcattccaagaaccagccctttgatgtgaatacatctggatactccccaccacacacagcagatgccctcaagggtccaaggacacatcggcgctgctcagagcccaacatagaagaccagaaccgcaagctgacctatctcaggggaatttattcaaagaaacaacataaaaccagctgtgaagctggtctcttgcatggagaggaggattatctcaaacggcataagtctttgcaaatggaggggcagaagctcattaatcagagtttagtcatggggattgaggtgggcaagagtagtgccacaaaccaaaacactgagaaggttttacccccaagattaaacctttgcccaaggaccagctattccagcttatcctccccaggcacttccccatccggctcatcagtaagctcccaagacagtgctttttctcagatttctgaacactctgtgtttacacccactgagacttcctctccaatagattgcacttttcaggctcagagaaaacgggaagacctttctcctgactttagcaatgccagccatgtttccggaatgcccggtccctcatcagggcaggcttgcagccgcccagcctatacaaagaaggacaccatggagtggcattcacaaatgcattctgtaactcttcatcccagcacatggttgagaaatggtgtggccagtttgaaaaactggtccctcaaaaagaaagcaaaggcagccagaccagaggaagagaaaatagcttctccaaaaggacccttagagccacccccacatgcttctggtgttccagaagccaactcactgcaagaggaacaaaaagacttgcccttaagggcagctgaaggactgtcccctgtgcagtcagcccaaaggtgtagttcttctcccttccaggactcagagagacactgtagctctccattcagcctggtggagagcagacttaagctgtgcatgaagtcacatgaggaaatagagcctggtagtcagagctcttctggttctctgccttgggaaagagcctcagccagctcttggactctagaggatgcgaccagcccagactcagggcctacagtggtctgcgacattgaggacagaaactgctgctaacttttaaagttgtttggttttcaaggcactgataatggatatgtatgaagtccatgctgtctgttaaataaaatgccattctgcagaattaaccatc

SEQ ID NO: 3671 - DNA, 6066 bp, Homo sapiens
  source 1..6066: mol_type = genomic DNA
gtagccttctcaatagcttagccaaatttcggcgtcctcgctctgtctgcattttccttcattgctctttcacgtttggaatgcccccgtctctgcagcctgcagacagcggaaaccgcgggtgcaaatgtgcaggggccgctgacatgaccggctgcagaagcccactcagggttacccgaacaggctagcgttcgggattgcacaagagccaaatttgcctgtgaaataaagatagtagtatctacccggatgacattttggattataataaataagaaaatgaaaacactagcagaaaggaggaggagcgctccatctcttatcctggataaagccctacaaaaacggcctactaccagggacagtccttctgctagtgttgacacatgcacatttctgtcatcattagtgtgctccaataggactctgctgattgatggccgggcagaactcaaaagaggcctccagaggcaggagcggcatcttttcctattcaatgatctgtttgttgtggccaaaatcaaatataacaataactttaagataaaaaataaaattaaattaactgatatgtggacagcaagctgtgtggatgaagtgggagaaggcaacaccaatgccatgaaatcctttgttttgggctggcccacagtgaactttgtggccactttcagttctccagaacaaaaggacaaatggctctctctccttcagagatacatcaatctagagaaagaaaaggactacccgaagagcattcccctcaaaatcttcgccaaggacattgggaattgtgcctactctaaaactataacagtaatgaattcagatacagcgaatgaagttatcaacatgtcattaccaatgctagggataactggctctgagagagattaccagttgtgggtcaattctggcaaagaagaggctccatacccactcattgggcatgaatatccatatggaattaaaatgagccatcttcgagactctgcactcctgacaccgggatcaaaggactctaccacccctttcaacctccaggagcccttccttatggaacagctcccccgagagatgcagtgccagttcatcctgaagcccagccgcctggctgcagcccagcaactgagtgattcaggtcataagacatttaaaaggagaagatctatcataaactgggccttctggcgaggttctagcactcacctggacaacttgccctcatcgccaacatcacctatgccaggacagctctttggaatttctctgccaaatatttgtgagaatgacaatctgcccaaacctgtcttggatatgcttttctttcttaatcaaaaaggacctctcaccaaaggtatcttcaggcaatcagccaatgtgaaatcctgcagagaactaaaagagaaattgaattctggagtcgaagtacacctagactgtgaatctatttttgtgatagcatctgtcttaaaggattttctgcgaaatattccaggaagtattttttcatcagatctctatgatcactgggtctctgtaatggatcaaggaaatgatgaagagaaaataaatactgttcaaaggctattagaccagcttccgagagccaatgttgttctcctaaggtatctttttggggtgttacacaacattgagcaacattcctcatccaatcagatgactgcatttaatttagctgtgtgtgtcgctccaagtattctttggcctcctgcttcctccagcccagaactagaaaacgaatttacaaaaaaggtttccctgcttatacaatttctgattgagaattgccttaggatatttggagaagaaatcacttccctcttcagagaggtttcagtgagatgtgacactagagagaatgcctcagatatttcttgctttcaactgaatgactcctcctatgacagcttggaaaatgagctaaatgaggatgttgatgcaccatgcagtgacttggtaaagaaacttggccaggggagcagaagcatggactctgtcttaaccctcagtgactatgatcttgaccagcccgaggtggaaggccttttaaccctaagcgactttgacttggcccattctaaagatgaagatgttcaaatgaaacggcctcttgaatccaagccggtgaacattttagtgtacacaaagatcccactgcgggatcatgccagggccccatctgccatgtgcacacccagctacctgtccacagctgcagcaaatgctgcaaaaagcctgaggcgacaccggcgttgctcagagcccagcatcgactatctggattcaaagctttcctacctcagggagttttatcagaaaaagctacgcaagtccagctgtgatgcaattctttctcaaaaagatgaagactatctgaagcagaatcaacccctccaggaggaaggaaagacatgttttaaacagagtttagtcacaggcactgatgtcagcaagaaaaatgccactactcaaaacactaagaagaaaagcttgtctggtagtgaaggaaatcacgtgaaacttttccctaagtctaagccagtggccatttctgtggcatcttatagtcctatgtcctcacaggatcattccaagaaccagccctttgatgtgaatacatctggatactccccaccacacacagcagatgccctcaagggtccaaggacacatcggcgctgctcagagcccaacatagaagaccagaaccgcaagctgacctatctcaggggaatttattcaaagaaacaacataaaaccagctgtgaagctggtctcttgcatggagaggaggattatctcaaacggcataagtctttgcaaatggaggggcagaagctcattaatcagagtttagtcatggggattgaggtgggcaagagtagtgccacaaaccaaaacactgagaaggttttacccccaagattaaacctttgcccaaggaccagctattccagcttatcctccccaggcacttccccatccggctcatcagtaagctcccaagacagtgctttttctcagatttctgaacactctgtgtttacacccactgagacttcctctccaatagattgcacttttcaggctcagagaaaacgggaagacctttctcctgactttagcaatgccagccatgtttccggaatgcccggtccctcatcagggcaggcttgcagccgcccagcctatacaaagaaggacaccatggagtggcattcacaaatgcattctgtaactcttcatcccagcacatggttgagaaatggtgtggccagtttgaaaaactggtccctcaaaaagaaagcaaaggcagccagaccagaggaagagaaaatagcttctccaaaaggacccttagagccacccccacatgcttctggtgttccagaagccaactcactgcaagaggaacaaaaagacttgcccttaagggcagctgaaggactgtcccctgtgcagtcagcccaaaggtgtagttcttctcccttccaggactcagagagacactgtagctctccattcagcctggtggagagcagacttaagctgtgcatgaagtcacatgaggaaatagagcctggtagtcagagctcttctggttctctgccttgggaaagagcctcagccagctcttggactctagaggatgcgaccagcccagactcagggcctacagtggtctgcgacattgaggacaggtatttaaccaaagacatttaagcatagtaagaatctgatgtccacaagaacaggaactgggttaataataatagacaataattattatgacccctttgtataagatacctgggagaggtagcataaggattatcattgctaatacttaggacaacgaaataattctctttattgagactacttgacaaatactttatgctaaaaattttgtcacctaagtgtttgggaggctttttcttattaaaggttgggattggtcctgtcatgtggttttagagatactaacagagggctagagaaagcatcttctgcagaggaagcacttatgggaacagtctgtgagattgatgtcctgagaagaccaagatatcaggaatgaggaataggggcctgaggagagaggggaagggtacagagaaaccatctacattccatggaatgtttttaataagtaggcaagaaaaatgccactaatcaaagcattaagtgtgtccagtaatgaagaacatcatataaaatctttccctaaatctaagccagtggccatttttgtgggatcttactaatcacgtgtccttacagaatcattccaagaaccagcccattgctacagctagagtggagaaaaacagagtgactcaaaagccatgggtaccatgatatcagttttgttggttgtatttgtcggtttgttttttcattcatgttgaagtgctttgcaaggcttcaggaaacagagttgtgaggagaaagaagaaaatggctgcccatttcagtaccctttcaaaggtatctctgcctaggaacattcttcagaaatgcaacttcttctatttagaaggtgacctcctgacagcgttcactctcaatatggaggaaaagaccacaacaactgtcctttctcaattacacaaatgctgttaaaatgtgatcaaaccatggcatcactttgctgaaatgtttctgcacagtcctgcctcttagattacagtcagccagaaaaacatacttataaatcatcccttttctgatttttgtagtttggcaattgagagagcaatattgaggttggccggttataaggagtcccacaatagaatacccaacaaagtggctgccaggccttctcagacagccatttgctttgggttttgcttccagacgttgttccatatttttgccccaaatgtttcatggcttataccccattggtttattttatatccatggacctttctttctctgctttcttgacttaaaggttgcagcagtacatctcgtcacctaggaatagattatcaggccttgccaactagtatgcagggatggcactaaaaatggatgtgcatcttctttcacattaactactaacctataagaagttgctctgagcccatttatttaaactctttagttcaccatcagatggacctttctctcacaagctagcttattccaaattatttgtcttattaatcaccagaaaatggtcatatcaaatgttctttcttttttgttctaaaggttgcattttcagttataggggaaaaaatattttctctaagatagaagaagttatttcagtattagctataggtgctacctacctcttggggacatggccctgtttgcgctaaccattacaatgatcttttagaactctgtatccaaagagctacttcgtgacactggccatctgagtcacagatgtgaagtcgatttcactttataactaaccagtcctacatattaagacttctaagtgtccatatgcatcttttttggtataatatataaagtcagcagggactcccctttcccttagggcatactactgtcagtcagaactgcaagatgtgaatgaagctcttaacggcttggagtgtctttctggaagaaattgccttttttttttttttcatgttagcaggtaaaaaatcattcacccaatttgaagcatagaagaaaatagttgctgaggttttttaataaccattcctactatctgtgttcccttagatactcctgtaattcttaatgtgaatagtttgttaatattgctgtaaagtattatattgtatgatttgaagacagactatatgtcattttattatactccatcaatctataatatattagactgatgctttatctaaaatgctttgagtttgtataatatatcttgacaaattttactaccatatgttatgtaataaatgtgtatttttgtacttgcagaaactgctgctaacttttaaagttgtttggttttcaaggcactgataatggatatgtatgaagtccatgctgtctgttaaataaaatgccattctgcag

SEQ ID NO: 3672 - DNA, 4542 bp, Homo sapiens
  source 1..4542: mol_type = genomic DNA
atgatgatggcaagaaagcaagatgtccgaattcccacctacaacatcagtgtggtgggattatctgggaccgagaaggaaaagggccagtgtgggattggaaagtcttgtttgtgcaaccgcttcgtgcgcccgagtgctgacgagtttcacttggaccatacctccgtcctcagcaccagtgactttggagggcgagtggtcaataatgaccactttctctactggggagaagttagccgctccctggaggattgtgtggaatgtaagatgcacattgtggagcagactgaatttattgatgatcagacttttcaacctcatcgaagcacggccctgcagccctatatcaagagagctgctgcgaccaagcttgcatcagctgaaaaactcatgtacttttgcactgaccagctggggctggagcaggactttgagcagaaacaaatgccagacggaaagctgctggttgatggttttcttcttggtattgatgttagcaggggcatgaataggaactttgatgaccagctcaagtttgtctccaatctctacaatcagcttgcaaaaacaaaaaagcccatagtggtggtcctgactaagtgtgacgaaggtgttgagcggtacattagagatgcacatacttttgccttaagcaaaaagaacctccaggttgtggagacctcagcgagatccaatgtaaacgtggacttggctttcagcaccttagtgcaactcattgataaaagtcggggaaagacaaaaatcattccttattttgaagctctcaagcagcagagtcagcagatagctacagcaaaagacaagtatgagtggctggtgagtcgcattgtgaaaaaccacaatgagaactggctgagtgtcagccgaaagatgcaggcctctccagaataccaggactatgtctacctggaagggactcagaaagccaagaagctgtttctacagcacatccaccgcctcaagcatgagcatatcgagcgtaggagaaagctgtacctggcagccctgccattagcttttgaagctcttatacctaatctagatgaaatagaccacctaagctgcataaaagccaaaaagctcttagaaaccaagccagaattcttgaagtggtttgttgtgcttgaagagaccccatgggatgccaccagtcacattgacaacatggaaaacgaacggattccctttgatttaatggataccgtccctgcagagcagctatacgaggcccacttagagaagctgaggaacgaaaggaaaagagttgagatgcgaagggcgtttaaagaaaacctggagacttctcctttcataactcccggaaagccttgggaagaggcccgtagttttattatgaatgaggatttctaccagtggctggaggaatctgtatacatggatatttatggcaaacaccaaaagcaaattatagataaagcaaaggaagaatttcaggagttgcttttggaatattcagaattgttttatgaactggagctggatgctaagcccagcaaggagaagatgggtgttattcaggatgttctgggagaggaacagcgatttaaagcattacaaaagctccaagcagagcgtgatgcccttattctgaaacacattcattttgtgtaccacccaacaaaggagacatgccccagctgcccagcttgtgtggacgctaagattgagcacttgattagttctcggtttatccggccgtctgaccggaatcagaaaaattcactctctgaccctaacattgatagaatcaacttggttatattgggcaaagacggccttgcccgagagttggccaatgagattcgagctctttgtacaaatgatgacaagtatgtgatagatggtaaaatgtatgagctttccctgaggccaatagaggggaatgtcaggcttcctgtgaactctttccagacgccaacatttcagccccacggctgtctctgcctttacaattcaaaggaatcgctatcctatgtagtggaaagtatagagaagagtagagagtccacgctgggccggcgggataatcatttagtccatctcccccttacattaattttggttaacaagagaggagacaccagtggagagactctgcatagcttaatacagcaaggtcaacaaattgctagcaaacttcagtgtgtctttctcgaccctgcttctgctggcattggttacggacgcaacattaatgaaaagcaaatcagtcaagttttgaagggactcctggactctaagcgtaacttaaacctggtcagttctactgctagcatcaaagatttggctgatgttgatctgcgaattgttatgtgtctgatgtgtggagatccttttagtgcagatgacatactttttcctgtccttcagtcccaaacctgtaaatcttcccattgtggaagcaacaactctgttttacttgaactaccaatcggactgcacaagaagcggattgaactgtctgttctttcataccattcctcctttagcatcagaaagagccggttggttcatgggtacattgttttttattcagccaaacgtaaggcctctttggctatgttacgtgcctttctttgtgaagtgcaggatattatccctattcagcttgtagcactcactgatggcgctgtagatgtcctggacaatgacttaagtagggaacagctaactgagggggaggagattgctcaagaaattgacggaaggttcacaagcatcccctgtagccaaccccagcataaacttgagatctttcacccattttttaaagatgtggtggaaaaaaagaacataatcgaggctactcatatgtacgataatgctgccgaggcctgtagcaccaccgaagaggtgtttaactccccccgggcaggatcaccgctctgcaactcaaacctgcaggattcagaagaagatatcgagccatcttacagcctgtttcgagaagacacatcactgccttctctgtccaaagaccattctaagctctctatggaactggagggaaatgatgggctgtctttcattatgagcaattttgagagtaaactgaacaacaaagtacctccgccagtcaaaccaaagcctcctgtccattttgaaattacaaagggggatctatcttatttagaccaaggccatagggatggacagaggaagtctgtgtcttctagcccctggctgcctcaggatgggtttgatccttctgactatgctgaacccatggatgctgtggtgaagccaaggaatgaagaagaaaacatatactccgtgccccatgacagcacccaaggcaaaatcatcaccattcggaatatcaacaaagcccagtccaacggcagcgggaatggttctgacagtgaaatggacaccagctctctagagcgagggcgcaaggtttccatcgtgagcaagccagtgctgtacaggacgagatgcacccggctggggcggtttgctagttaccggaccagcttcagcgtggggagtgatgatgagctggggcccatccggaagaaagaggaggatcaggcatcccagggttataaaggggacaatgctgtcattccatacgaaacagacgaagacccgcggaggaggaatattcttcgcagcctaaggaggaacactaagaaaccaaagcccaaaccccggccatccatcacaaaggcaacctgggagagtaactattttggggtgcccttaacaactgtcgtgactccagagaagccgatccccatttttattgaaagatgtattgagtacattgaagccacaggactgagcacggaaggcatctaccgggtcagcgggaacaagtctgagatggagagtctgcagagacagtttgatcaagaccacaacctggacctggcagagaaagactttacggtgaataccgtggctggtgccatgaagagctttttctcagaactgcctgaccccctggtcccgtataacatgcagatcgacttggtggaagcacacaaaatcaacgaccgggagcagaagttgcatgcccttaaggaggtattaaagaaatttccaaaggaaaaccacgaagtcttcaagtatgtcatctctcacctaaacaaggtcagccacaacaacaaggtgaatctcatgaccagcgagaacctctccatctgcttctggcccaccttgatgagacctgatttcagcactatggacgccctcacagccacgcgcacctaccagacaatcattgaactctttatccagcagtgccccttcttcttctacaatcggcccatcaccgagccccccggcgccaggcccagctccccctctgccgtggcttccaccgtccccttcctcacttccacgcctgtcacaagtcagccgtcgcccccacagtcgcctccacccaccccccagtccccaatgcagccactgcttccctccccgcttcatccccaccgtcccactccacagccttcccgaaacattccctggcaaacaaaggaacactag

SEQ ID NO: 3673 - DNA, 8878 bp, Homo sapiens
  source 1..8878: mol_type = genomic DNA
atgatgatggcaagaaagcaagatgtccgaattcccacctacaacatcagtgtggtgggattatctgggaccgagaaggaaaagggccagtgtgggattggaaagtcttgtttgtgcaaccgcttcgtgcgcccgagtgctgacgagtttcacttggaccatacctccgtcctcagcaccagtgactttggagggcgagtggtcaataatgaccactttctctactggggagaagttagccgctccctggaggattgtgtggaatgtaagatgcacattgtggagcagactgaatttattgatgatcagacttttcaacctcatcgaagcacggccctgcagccctatatcaagagagctgctgcgaccaagcttgcatcagctgaaaaactcatgtacttttgcactgaccagctggggctggagcaggactttgagcagaaacaaatgccagacggaaagctgctggttgatggttttcttcttggtattgatgttagcaggggcatgaataggaactttgatgaccagctcaagtttgtctccaatctctacaatcagcttgcaaaaacaaaaaagcccatagtggtggtcctgactaagtgtgacgaaggtgttgagcggtacattagagatgcacatacttttgccttaagcaaaaagaacctccaggttgtggagacctcagcgagatccaatgtaaacgtggacttggctttcagcaccttagtgcaactcattgataaaagtcggggaaagacaaaaatcattccttattttgaagctctcaagcagcagagtcagcagatagctacagcaaaagacaagtatgagtggctggtgagtcgcattgtgaaaaaccacaatgagaactggctgagtgtcagccgaaagatgcaggcctctccagaataccaggactatgtctacctggaagggactcagaaagccaagaagctgtttctacagcacatccaccgcctcaagcatgagcatatcgagcgtaggagaaagctgtacctggcagccctgccattagcttttgaagctcttatacctaatctagatgaaatagaccacctaagctgcataaaagccaaaaagctcttagaaaccaagccagaattcttgaagtggtttgttgtgcttgaagagaccccatgggatgccaccagtcacattgacaacatggaaaacgaacggattccctttgatttaatggataccgtccctgcagagcagctatacgaggcccacttagagaagctgaggaacgaaaggaaaagagttgagatgcgaagggcgtttaaagaaaacctggagacttctcctttcataactcccggaaagccttgggaagaggcccgtagttttattatgaatgaggatttctaccagtggctggaggaatctgtatacatggatatttatggcaaacaccaaaagcaaattatagataaagcaaaggaagaatttcaggagttgcttttggaatattcagaattgttttatgaactggagctggatgctaagcccagcaaggagaagatgggtgttattcaggatgttctgggagaggaacagcgatttaaagcattacaaaagctccaagcagagcgtgatgcccttattctgaaacacattcattttgtgtaccacccaacaaaggagacatgccccagctgcccagcttgtgtggacgctaagattgagcacttgattagttctcggtttatccggccgtctgaccggaatcagaaaaattcactctctgaccctaacattgatagaatcaacttggttatattgggcaaagacggccttgcccgagagttggccaatgagattcgagctctttgtacaaatgatgacaagtatgtgatagatggtaaaatgtatgagctttccctgaggccaatagaggggaatgtcaggcttcctgtgaactctttccagacgccaacatttcagccccacggctgtctctgcctttacaattcaaaggaatcgctatcctatgtagtggaaagtatagagaagagtagagagtccacgctgggccggcgggataatcatttagtccatctcccccttacattaattttggttaacaagagaggagacaccagtggagagactctgcatagcttaatacagcaaggtcaacaaattgctagcaaacttcagtgtgtctttctcgaccctgcttctgctggcattggttacggacgcaacattaatgaaaagcaaatcagtcaagttttgaagggactcctggactctaagcgtaacttaaacctggtcagttctactgctagcatcaaagatttggctgatgttgatctgcgaattgttatgtgtctgatgtgtggagatccttttagtgcagatgacatactttttcctgtccttcagtcccaaacctgtaaatcttcccattgtggaagcaacaactctgttttacttgaactaccaatcggactgcacaagaagcggattgaactgtctgttctttcataccattcctcctttagcatcagaaagagccggttggttcatgggtacattgttttttattcagccaaacgtaaggcctctttggctatgttacgtgcctttctttgtgaagtgcaggatattatccctattcagcttgtagcactcactgatggcgctgtagatgtcctggacaatgacttaagtagggaacagctaactgagggggaggagattgctcaagaaattgacggaaggttcacaagcatcccctgtagccaaccccagcataaacttgagatctttcacccattttttaaagatgtggtggaaaaaaagaacataatcgaggctactcatatgtacgataatgctgccgaggcctgtagcaccaccgaagaggtgtttaactccccccgggcaggatcaccgctctgcaactcaaacctgcaggattcagaagaagatatcgagccatcttacagcctgtttcgagaagacacatcactgccttctctgtccaaagaccattctaagctctctatggaactggagggaaatgatgggctgtctttcattatgagcaattttgagagtaaactgaacaacaaagtacctccgccagtcaaaccaaagcctcctgtccattttgaaattacaaagggggatctatcttatttagaccaaggccatagggatggacagaggaagtctgtgtcttctagcccctggctgcctcaggatgggtttgatccttctgactatgctgaacccatggatgctgtggtgaagccaaggaatgaagaagaaaacatatactccgtgccccatgacagcacccaaggcaaaatcatcaccattcggaatatcaacaaagcccagtccaacggcagcgggaatggttctgacagtgaaatggacaccagctctctagagcgagggcgcaaggtttccatcgtgagcaagccagtgctgtacaggacgagatgcacccggctggggcggtttgctagttaccggaccagcttcagcgtggggagtgatgatgagctggggcccatccggaagaaagaggaggatcaggcatcccagggttataaaggggacaatgctgtcattccatacgaaacagacgaagacccgcggaggaggaatattcttcgcagcctaaggaggaacactaagaaaccaaagcccaaaccccggccatccatcacaaaggcaacctgggagagtaactattttggggtgcccttaacaactgtcgtgactccagagaagccgatccccatttttattgaaagatgtattgagtacattgaagccacaggactgagcacggaaggcatctaccgggtcagcgggaacaagtctgagatggagagtctgcagagacagtttgatcaagaccacaacctggacctggcagagaaagactttacggtgaataccgtggctggtgccatgaagagctttttctcagaactgcctgaccccctggtcccgtataacatgcagatcgacttggtggaagcacacaaaatcaacgaccgggagcagaagttgcatgcccttaaggaggtattaaagaaatttccaaaggaaaaccacgaagtcttcaagtatgtcatctctcacctaaacaaggtcagccacaacaacaaggtgaatctcatgaccagcgagaacctctccatctgcttctggcccaccttgatgagacctgatttcagcactatggacgccctcacagccacgcgcacctaccagacaatcattgaactctttatccagcagtgccccttcttcttctacaatcggcccatcaccgagccccccggcgccaggcccagctccccctctgccgtggcttccaccgtccccttcctcacttccacgcctgtcacaagtcagccgtcgcccccacagtcgcctccacccaccccccagtccccaatgcagccactgcttccctcccagcttcaagccgaacacacgctgtgagccaccaagacctggggcgacaggagaaccggtcctctctctgacggggtggcatttggccttgaacaaaaccaagtccactggggacagaggcaggggcaagtggctctccccattaccttctcaagacctcagtgggagcaccagccaatggtaccatcggctgggctgccaggtaccctgggcctggcgctgcagacctgagctggcttggacccatttgaggactgaactaggcaggcaatggctccagtgccctccctctgttccctggaccaccaccccacgtagctgctcacaccagcctccgggtgcctccctctgcttgtacagagcccatggtcgggacagtgccctggcctttgccggggaggaggatgctctgagattcagggtggggctggcaacccctgaagagaacacttcctgttggtctgtctcttcccaccttccatctgcacacacccccaaggtaagggtacagcccggctggcggcctccttgggaacgtgtaggccacggctctgccaccactaggtacctgctgagggcgctggctctgcagatcagaacaacggaggatagctttgtgcctggacccagagagtgtgggactccccgcttcatccccaccgtcccactccacagccttcccgaaacattccctggcaaacaaaggaacactaggagaaaaaatggaaaaacccttccagtaattaaaaaggaagaaaccacagaaagaaaactacagacctcaagattccactctgtgcccgcctctgccgggagggagggaggcacacaggtggagctgaccctcgtctttgtggcagcaaaaccaggatgcctggagctgtggcctgagggcctgctggggtcccactcacccacttaggtctagtcgctagatcccccgttttcccaagaagagggttcgagcccttggtggggacagctggggagatggcagtgcaggctggaacctgggctgccccagaacacagtccattacgatagaaacactaattgagcatgtgcgtggggtgggggtgtgtgtgcacatgtgagtgtgagtgtgtgtgggcgcttggtggggggttggggacagctggaaggtgccaggtgcacttggggttggggttggtgtgttgggtgttgaagtggaatcgtttcatcccagccatggaggccaccagcaggagtgttcatggggatgtgggcgaggtggggcactttgaaggaatggcggtctgctggtgccctcgaaggggcatccttcctggtcttcgctgacccagaggcgctgtgcctgcatatcatccaccaccaccctagcccagccttcccactgccccaggaaaagctcttctcctggccacctctgccccccagcacctcaaacttgcatggctgggctgtggcctctgcggccaggaagcctgacactaggcaccccccaggcgagagctagtggggtgcagagggccccatgccagacagcccttggggctcgttgcactttaagaaataggatctgtggtgtattccagggggcctgatggacacctttcccgggcgtctgcagctgccctgcccgtgcccgcctgcagtggttggagacgggagtggcccttcggctcccgagctccctctggggacggctggctcactgtctccagttctcaatggccaacgaaggtgcttggaaacacctaaccttgcaagttttaccgccttttgaggaacacaaatcggagaacaaacccagggttcaggcgtgttttctgtgaatgttggatgatgaatttttgtctcttctggtggagctgtgcctggccctgtaggcccagggttggctggaaggtgacatctgtgtttcgttttagctgaggttggcagaaacgttcccaaactcccccagccctggaccccagcagatgaggaaacggccccatttactgaccccgcccccttttcgaggttatgctcacctggtcagctcctcacgtaattgggggtggagggaaagcatggtggtgccctgggccgtccctgtgtgaacgcaggcaaaagcagcccagtccccctcactgcttgagctaacactgccacctcttttgtgtgagcacaaaagccacgtcccaagccacctggcccgattccacagatgtatgtgcggccagtgacttccccaggagtgtggagggggtggtgaggaggagcacctgggctctctacccctctcctcacagaagtacctgaaactaggtctggggcactcccaatgcagcgccttgtcagccaaggtgggcaggcagggactgtggcagcttatgtccaaagggagcccccatgcacaggaagccacagggttcctcttgtttcccccgctaacttcagcctctcatctgctgctccgggctgagggactagaggacatctcggtcgtttgaggggcatggccagtcgtggcaggccggccttcagcgtccggtcagggaagcgtgcagcccaaatgggcacttgcatgggagccacagaggagcgtccctggggattgttgggaccatgctgcccccactcccgcttttgttggggctctaagttctggaaggtgtgtgcacagagggtgctcatgggactcgcatgcagctctcagcactgggtgggagggcgttggcttgtccagaatggggacgtggggcagccacccctgcccagcgagagcgcagacaccgtgtgaggggacagcagcccttggtgcaaagccagagactgatcctggctctgacggctgaagagggaagacccaaggctgggtggcgtggctcgtgaatccacttagaattcttggcttgtgtcgcatactgggtgtcacggcacacatttactctgcattgtccccgtctttcccatcgcctagcgtttggggaggaacagggagagagcttcggggcgtctgtctccgtgctctcctgcctccaccgccttggttttgcttcctgctggaggcagggcacctgctgcgacccagattcttctgcaggatgtgtctgtctttgtcacggtggacagagggtgacatcataggagcagctcgctggccagaaggggatgggggcatccctgtgcctcactcagctcctgctgctcttagggaaaggaggcctgggtcaagccagcatccccttggtaaagacccccgcaggccaccaggcattctggacacgcacacacacacacacacacacacacacacacaaaacttcacagcaggccagctgcagtgacttgtcatcaagagtcacctcagctgcgcccccctcccatcctttcctatgagaagccactgctttgggggcgccggctagaaaaagtagggtgcggtggccaggagggcccctgccgcgcggggggctgggtctggttgagtcgctgctttcccgagggcagcgcagggatccggggaagctgcggcagggagcgggcgccggcttcgtggctctgaggtgtaacgggggtgggctccctccctcggaggacatcgtctgtgtccaggtcagaaagtggcccaggaagggggcagtttctgtcgcgggtccggtgggggcgcggccgcggtgcggtcggtgcagcgtggccaatgcgcggcgcgcgcgggggacagagcaggaggcggtctgtcacctcggccactgctgacctgggctggcctcccccagccctcccgtggcggagccggcagcgatgctacaggcctaagttattgtttgcataaaaagaatcatgttccctgtgtacatttaagaaaaaaacaaaaaaacggaaatgtcagaattgtatggaaataaaacttgtttgaaaatttggaatagtgctgctgccagcttatttttctggtacttgtattttcacatgttaaatgatctttatatatgttgaattaacaaatattttgagtttctgagaaaaaacaaaacatattaatggtattgaaatgtgttagtagtctggctgtgtgcccaaaattctgtttcgcagcaaaagtgaagacctgtatgtaaagaaagtataacaattatttctttgtattttaggggctttaaccggaacatcgtctagctggtgttaggaatgtttgcttaatttccagacttttttttaaaaacacatcgtgggttttttgaggctccaacctgattagtgcatggtcagccctcaatgaaggctgaggcatctctgactgaggtgtttttgtttggttttgttttttaaaatcatgtatttgctacaaagtattgtacttgtctcaatgggaatggtgtaaaaaacaaaaggccttatgtgatctgtatcatagttaataaatgaatcttgt

SEQ ID NO: 3674 - DNA, 2713 bp, Homo sapiens
  source 1..2713: mol_type = genomic DNA
atgatgatggcaagaaagcaagatgtccgaattcccacctacaacatcagtgtggtgggattatctgggaccgagaaggaaaagggccagtgtgggattggaaagtcttgtttgtgcaaccgcttcgtgcgcccgagtgctgacgagtttcacttggaccatacctccgtcctcagcaccagtgactttggagggcgagtggtcaataatgaccactttctctactggggagaagttagccgctccctggaggattgtgtggaatgtaagatgcacattgtggagcagactgaatttattgatgatcagacttttcaacctcatcgaagcacggccctgcagccctatatcaagagagctgctgcgaccaagcttgcatcagctgaaaaactcatgtacttttgcactgaccagctggggctggagcaggactttgagcagaaacaaatgccagacggaaagctgctggttgatggttttcttcttggtattgatgttagcaggggcatgaataggaactttgatgaccagctcaagtttgtctccaatctctacaatcagcttgcaaaaacaaaaaagcccatagtggtggtcctgactaagtgtgacgaaggtgttgagcggtacattagagatgcacatacttttgccttaagcaaaaagaacctccaggttgtggagacctcagcgagatccaatgtaaacgtggacttggctttcagcaccttagtgcaactcattgataaaagtcggggaaagacaaaaatcattccttattttgaagctctcaagcagcagagtcagcagatagctacagcaaaagacaagtatgagtggctggtgagtcgcattgtgaaaaaccacaatgagaactggctgagtgtcagccgaaagatgcaggcctctccagaataccaggactatgtctacctggaagggactcagaaagccaagaagctgtttctacagcacatccaccgcctcaagcatgagcatatcgagcgtaggagaaagctgtacctggcagccctgccattagcttttgaagctcttatacctaatctagatgaaatagaccacctaagctgcataaaagccaaaaagctcttagaaaccaagccagaattcttgaagtggtttgttgtgcttgaagagaccccatgggatgccaccagtcacattgacaacatggaaaacgaacggattccctttgatttaatggataccgtccctgcagagcagctatacgaggcccacttagagaagctgaggaacgaaaggaaaagagttgagatgcgaagggcgtttaaagaaaacctggagacttctcctttcataactcccggaaagccttgggaagaggcccgtagttttattatgaatgaggatttctaccagtggctggaggaatctgtatacatggatatttatggcaaacaccaaaagcaaattatagataaagcaaaggaagaatttcaggagttgcttttggaatattcagaattgttttatgaactggagctggatgctaagcccagcaaggagaagatgggtgttattcaggatgttctgggagaggaacagcgatttaaagcattacaaaagctccaagcagagcgtgatgcccttattctgaaacacattcattttgtgtaccacccaacaaaggagacatgccccagctgcccagcttgtgtggacgctaagattgagcacttgattagttctcggtttatccggccgtctgaccggaatcagaaaaattcactctctgaccctaacattgatagaatcaacttggttatattgggcaaagacggccttgcccgagagttggccaatgagattcgagctctttgtacaaatgatgacaagtatgtgatagatggtaaaatgtatgagctttccctgaggccaatagaggggaatgtcaggcttcctgtgaactctttccagacgccaacatttcagccccacggctgtctctgcctttacaattcaaaggaatcgctatcctatgtagtggaaagtatagagaagagtagagagtccacgctgggccggcgggataatcatttagtccatctcccccttacattaattttggttaacaagagaggagacaccagtggagagactctgcatagcttaatacagcaaggtcaacaaattgctagcaaacttcagtgtgtctttctcgaccctgcttctgctggcgctgcagacctgagctggcttggacccatttgaggactgaactaggcaggcaatggctccagtgccctccctctgttccctggaccaccaccccacgtagctgctcacaccagcctccgggtgcctccctctgcttgtacagagcccatggtcgggacagtgccctggcctttgccggggaggaggatgctctgagattcagggtggggctggcaacccctgaagagaacacttcctgttggtctgtctcttcccaccttccatctgcacacacccccaaggtaagggtacagcccggctggcggcctccttgggaacgtgtaggccacggctctgccaccactaggtacctgctgagggcgctggctctgcagatcagaacaacggaggatagctttgtgcctggacccagagagtgtgggactccccgcttcatccccaccgtcccactccacagccttcccgaaacattccctggcaaacaaaggaacactag

SEQ ID NO: 3675 - DNA, 5233 bp, Homo sapiens
  source 1..5233: mol_type = genomic DNA
aaaaaagggtgaggagaagcagcggctgagcgggttggcatctggggcagcgggctcgctccaggccgtcgggggccgctcgccagcgtcgcccgctgtgttgggagcgcgggccgtgggcgtcgctcggccttgtccgcggcgtccccgctgccggccacggcgctcagcgcttgtgctctgtattgcaggtctaccccgagccccggagcgagagcgagtgcctgagcaacatccgcgagttcctgcgcggctgcggggcttccctgcggctggagacgtttgatgcaaatgatttgtatcaggggcagaattttaacaaggtcctcagttccttagtgactctaaataaagtaacagcagacatcgggctggggagtgactccgtgtgtgcccggccctcgtctcaccgcataaagtcttttgactcccttggatcacagtctttgcacactcggacttcaaaactgttccagggccagtatcggagtttggacatgaccgataatagcaacaatcaactggtagtaagagcaaagtttaacttccagcagaccaatgaggacgagctttccttctcaaaaggagacgtcatccatgtcacccgtgtggaagagggaggctggtgggagggcacactcaacggccggaccggctggttccccagcaactacgtgcgcgaggtcaaggccagcgagaagcctgtgtctcccaaatcaggaacactgaagagccctcccaaaggatttgatacgactgccataaacaaaagctattacaatgtggtgctacagaatattttagaaacagaaaatgaatattctaaagaacttcagactgtgctttcaacgtacctacggccattgcagaccagtgagaagttaagttcagcaaacatttcatatttaatgggaaatctagaagaaatatgttctttccagcaaatgctcgtacagtctttagaagaatgcaccaagttgcccgaagctcagcagagagtcggaggctgctttttaaacctgatgccacagatgaaaaccctgtacctcacgtattgtgccaatcacccttctgcagtgaatgtcctcacggaacacagtgaggagttgggggagttcatggagaccaaaggtgccagcagccctgggattctcgtgctgaccacgggcctgagcaaacccttcatgcgcctggataaataccctacgctgctcaaagagctcgagagacacatggaggattatcatacagatagacaagatattcaaaaatccatggctgccttcaaaaacctttcagcccaatgtcaagaagtccggaagaggaaagagcttgagctgcagatcctgacggaagccatccggaactgggagggcgatgacattaaaactctgggcaacgtcacttacatgtcccaggtcctgattcagtgtgccggaagtgaggaaaagaatgaaagatatcttctactcttcccaaatgttttgctaatgttgtctgccagtcctaggatgagtggctttatctatcagggaaagcttccaacgacaggaatgacaatcacaaagcttgaggacagtgaaaatcatagaaatgcatttgaaatatcagggagcatgattgagcggatattagtgtcgtgcaacaaccagcaggatctgcaggaatgggtggagcacctacagaagcaaacgaaggtcacgtctgtgggaaaccccaccataaagcctcattcagtgccatctcataccctcccctcccacccggtcactccgtccagcaagcacgcagacagcaagcccgcgccgctgacgcccgcctaccacacgctgccccacccctcccaccacggcaccccgcacaccaccatcaactggggacccctggagcctccgaaaacacccaagccctggagcctgagctgcctgcggcccgcgcctcccctccggccctcagctgctctctgctacaaggaggatcttagtaagagccctaagaccatgaaaaagctgctgcccaagcgcaaacctgaacggaagccttcagatgaggagttcgcgtcccggaaaagcacagctgctttggaagaagatgctcagattctgaaagtcattgaagcttactgcaccagcgccaaaacaaggcaaacactcaattcaacatggcaaggcactgacctgatgcataatcacgtcttggctgatgatgaccaaccaagcctagactccctggggcgtcgcagtagcctttctcgtttggagccttcagacctctcggaagactctgactatgacagtatatggacagcccatagttacagaatgggttctacatctcgttcacgcaaagaatctgctccacaagttttgcttccagaagaagagaaaattatagtggaagaaactaaaagtaatggtcagacagtgatagaagaaaagagtcttgtggataccgtatatgcattaaaggatgaagttcaagaattaagacaggacaacaaaaagatgaagaaatctctagaggaagaacagagagcccgcaaagacctggagaagctggtgaggaaagtcctgaagaacatgaatgatcctgcctgggatgagaccaatctataagggatgtcctcagttctttctgttgaagaccagttctgaggtgaagctgggcacccctgacccaagtcggggtgcactcaggaccacagggcagggctgggtggggcgccaccttgctctctgtatatagaaaagctggagcttattctgcgaatggagacgatcaaaccatgactgatgaatccagacaggagggattgactctgaggacctgagctacatcaatccactctgtgaacatctcagttacctcattctgcaataagttcagtgactgactaaaagtcttgtttttccagactttgaattgaatatataaatattatatatacatgtttcttgtaaatatcccattttgaatgcatacctgtggtggttctgtccgggctaatccccatgctagaatgtcctttccagctacgtgaataagaagtcccatgcccgcatccaccggaagcagaagcctggtggatgcctggttcgttccgcagcaccagggcctccaccgtgctgtggcagcaccccccatgtcggtatttctaaataaccttatttatacctgcagagatacacttcagtcccattcagaagtcttctcttaaagcagcattacagtcccagacctgcgggtttctgagggcaacttgctggctgacagactcagtcttgacctcaaggaaggcccatacggcactgccgcatccacctagaggtgtttgctcttgtccgctgtctgagtactgtgattctcagatgagtttgctgcgttttgggaggacacagacggttctgtataggctagttcagtaacaacaaaatacactgttttgtcttccctcaaagagagatcttactagaacctgtaaatagaatgtattatttattataagtcactgcagctgatgaaaacagatggaggccatgctgcaggctgatactgatgggtggagttttgtcatcaggccagcctcatcccgaggtctcctccaccattggccgtagccagcaggcttcagtgctcaccgaaagtaaaatcccctccttcagcaagaataaagcaatatacaccttaggttccactaagtaacataggcataagcagggaacgtttcccccactgtgttccagtgcagaggagacgaagcctgtcctcaccgcggctcgctgggcccaggctggctctggaaagcctgtgcggtcctgggcaggaagcccggcccgtggagcaggttttcgttctgcttcagcaataaataagggtgaccacagggactttgcttttggtttcctttcctgtgaaaaggttggttttaaagtgagatacacttttccgtagaacaagtgttctatctttaaaaacccaaattgcagcaccgtggattactggtctcagaacaactcattgcgcatcagatttgactctctgattttctgtctattggccaaattgccctttaactgcacctgaatcctttgtgtactgatgcctttgagctgggcaccttgggagagtgttgtgttgctgtttacggttcttccttgcccttgctaattacagtctctggtgcccagcaagcccctttggcttccttccgtgactggtcacgttgtctgcctgggctcagcgtggacctgccccatgctgcagaacctggcctcacctggacttttcactagaattgccagcttcctcaacttagcagatcattcactcatgcgggcacaagcaaagatcaacactttcttttttggtaagcttgagttttacaagttattttttggtgatgcgtaagacattgcagtgggaaaccattcaacttgagtttattggagtttgctgttgtagcaggttttaactcaggaacaactcttgtctgatctctccgcccctctgccgggaggcgacattaactgtcctctcggagccggtagcgttgctgtccgagtccccaggacggatctcctgcagacctgccttaatgctcagatcgaagtatttcacaagaatacttgtgtttttaacagcccttcccctggacggtgcggccatgagggcctcatgttacggcattgccttttctttctgtggatccagtatcttcctcggctttttagggagcaggaaaaatgcgtctgagagcaactctttttaaaaacctgccctgttgtatataactgtgtctgtttcaccgtgtgacctcccaagggggtgggaacttgatataaacgtttaaaggggccacgatttgcccgagggttactcctttgctctcaccttgtatggatgaggagatgaagccatttcttatcctgtagatgtgaagcactttcagttttcagcgatgttggaatgtagcatcagaagctcgttccttcacactcagtggcgtctgtgcttgtccacatgcgctgggcgtctgggaccttgaatgcctgccctggttgtgtggactccttaatgccaatcatttcttcacttctctgggacacccagggcgcctgttgacaagtgtggagaaactcctaatttaaatgtcacagacaatgtcctagtgttgactactacaatgttgatgctacactgttgtaattattaaactgattatttttcttatgtc

SEQ ID NO: 3676 - DNA, 4361 bp, Homo sapiens
  source 1..4361: mol_type = genomic DNA
ccccgagacgcagccaggcgcccggcccggcccggcccggccctctgcacagccccacttcaggccacgccgtttccttgaccttcccccggcagggtctgaagcgtcaccgtccgtctagagcagagtcgcgcaggcccctgccctgccggtgaggtcggcgccgcgctccggagagtcggttcctcccgattcagacccatatggcttcagatggaaccatcatttctgttccgtcatgaccggcttgcaaggtagcaaagcgaaacaaacgtctcgttttcagcctgtccccgccaccttgaaataaaaccggcaaaaataaaaagagcattctgggaagtacttcatcatttcaacgctcacgaattcaaaacataaacaaaggcttccgagtgccccggccaggggcgcggggcgcacggcgggcccggggcaggtaagcgcaggtgcgcgcccgcccccacccccggctccctccccatccgctccccgctccccttcccctttcccttccccgcccgctcccagccgccgccgccgccccgcgcacggcctggagcggaggctgcgcagggcgcggggcggcgcgggccgggcgcgggccgggcggacggccgcgtctttcttctcctggcggtgatgtcattgggcgacggcggccgaggccggggggcggcggcgggcgcccgcaggttcccgagccgctcctgagaaggcgcctgacagcgggccggggcgcacggagaagcgggccgggccggacctgctgggccgcgccgagccaatcgccggcgccggccgctcgatgggcgaggcggcggcggcggcggcgggggccgcgggccgggccgccgctccgaggtgaaggcgcgcgcccctccccgcctgcctcccgggccgcagcgatgaattccgccgagcaaaccgttacgtggctcatcactctgggggtgctggagtcgcccaaaaaaaccatctcggacccggagggctttctgcaggcgtcgctgaaggatggggtggtcctctgcaggctgctggagcgcctgctccccgggaccatcgagaaagtctaccccgagccccggagcgagagcgagtgcctgagcaacatccgcgagttcctgcgcggctgcggggcttccctgcggctggagacgtttgatgcaaatgatttgtatcaggggcagaattttaacaaggtcctcagttccttagtgactctaaataaagtaacagcagacatcgggctggggagtgactccgtgtgtgcccggccctcgtctcaccgcataaagtcttttgactcccttggatcacagtctttgcacactcggacttcaaaactgttccagggccagtatcggagtttggacatgaccgataatagcaacaatcaactggtagtaagagcaaagtttaacttccagcagaccaatgaggacgagctttccttctcaaaaggagacgtcatccatgtcacccgtgtggaagagggaggctggtgggagggcacactcaacggccggaccggctggttccccagcaactacgtgcgcgaggtcaaggccagcgagaagcctgtgtctcccaaatcaggaacactgaagagccctcccaaaggatttgatacgactgccataaacaaaagctattacaatgtggtgctacagaatattttagaaacagaaaatgaatattctaaagaacttcagactgtgctttcaacgtacctacggccattgcagaccagtgagaagttaagttcagcaaacatttcatatttaatgggaaatctagaagaaatatgttctttccagcaaatgctcgtacagtctttagaagaatgcaccaagttgcccgaagctcagcagagagtcggaggctgctttttaaacctgatgccacagatgaaaaccctgtacctcacgtattgtgccaatcacccttctgcagtgaatgtcctcacggaacacagtgaggagttgggggagttcatggagaccaaaggtgccagcagccctgggattctcgtgctgaccacgggcctgagcaaacccttcatgcgcctggataaataccctacgctgctcaaagagctcgagagacacatggaggattatcatacagatagacaagatattcaaaaatccatggctgccttcaaaaacctttcagcccaatgtcaagaagtccggaagaggaaagagcttgagctgcagatcctgacggaagccatccggaactgggagggcgatgacattaaaactctgggcaacgtcacttacatgtcccaggtcctgattcagtgtgccggaagtgaggaaaagaatgaaagatatcttctactcttcccaaatgttttgctaatgttgtctgccagtcctaggatgagtggctttatctatcagggaaagcttccaacgacaggaatgacaatcacaaagcttgaggacagtgaaaatcatagaaatgcatttgaaatatcagggagcatgattgagcggatattagtgtcgtgcaacaaccagcaggatctgcaggaatgggtggagcacctacagaagcaaacgaaggtcacgtctgtgggaaaccccaccataaagcctcattcagtgccatctcataccctcccctcccacccggtcactccgtccagcaagcacgcagacagcaagcccgcgccgctgacgcccgcctaccacacgctgccccacccctcccaccacggcaccccgcacaccaccatcaactggggacccctggagcctccgaaaacacccaagccctggagcctgagctgcctgcggcccgcgcctcccctccggccctcagctgctctctgctacaaggaggatcttagtaagagccctaagaccatgaaaaagctgctgcccaagcgcaaacctgaacggaagccttcagatgaggagttcgcgtcccggaaaagcacagctgctttggaagaagatgctcagattctgaaagtcattgaagcttactgcaccagcgccaaaacaaggcaaacactcaattcaacatggcaaggcactgacctgatgcataatcacgtcttggctgatgatgaccaaccaagcctagactccctggggcgtcgcagtagcctttctcgtttggagccttcagacctctcggaagactctgactatgacagtatatggacagcccatagttacagaatgggttctacatctcgtaagagctgttgctcatatatctctcaccagaactaatgcacttctgagcttttcttaacaaatgcttgttgtatcgcagcctgcttttcttagatgttttcttgctgttccttgtctcttttatgtgatattttaacaacttttgagagtgttcctgatatttcccattgtactttgtggaggcttaactgccgatgcgagtatacattcgaatgactgactattggagggaggtggtgtgttcacgtgagcctacatccgagggtgctcttcgtaaggggtagttgttgttttatagctccaaatggtttttttattctcagtgtagcaactgtttgatttctttctggatacagctgtatgaacacttttctattttatactgaaatcacacaggtttgtgatctaagtgccagaaccatggaggagactctggccttatctgtagggacctaaattttttaagtgctatgaacactgatcaagtagttgtggagagatgagaagaatatatgcagcaaaggtgctgtgagcccagttccaacggctgtgttctggtaatcgtgcagaacagcatgtgggctctgggccttggcaggtgcacagacgggcgggcgtcacgtgtgttcagagcttgtctccacctcacggctctgtgctcttctgtgtgctgcgttgtggccgtgaagtgggagctctcctttccaaaggcagagcttactgtcatggctcagatgttcactcgcatcttcaccccaaacttccctgaattgcagtgatttctgttataaggcacatagcaagcctgtaccactctacagtaaaatctctacactaacagtttaaagcccgaaagctgaagcattcagcctctgcaagtgtagactactggactgtagtagaggcatttggaatacttacaaagtcaagtgctgtggcttcagttcccccggctccccacccctgacatccatacttatgttgtctggaagagccatggacacatcattattttcagcaaccagctgcagtgaaactccatttacagcaaccccatagtataaaaccacaatgcctcattgtaatgggatattgaagttcattgaagaattactaggttgccatgtggctcacttattt

SEQ ID NO: 3677 - DNA, 4814 bp, Homo sapiens
  source 1..4814: mol_type = genomic DNA
atgaattccgccgagcaaaccgttacgtggctcatcactctgggggtgctggagtcgcccaaaaaaaccatctcggacccggagggctttctgcaggcgtcgctgaaggatggggtggtcctctgcaggctgctggagcgcctgctccccgggaccatcgagaaagtctaccccgagccccggagcgagagcgagtgcctgagcaacatccgcgagttcctgcgcggctgcggggcttccctgcggctggaggacatgaccgataatagcaacaatcaactggtagtaagagcaaagtttaacttccagcagaccaatgaggacgagctttccttctcaaaaggagacgtcatccatgtcacccgtgtggaagagggaggctggtgggagggcacactcaacggccggaccggctggttccccagcaactacgtgcgcgaggtcaaggccagcgagaagcctgtgtctcccaaatcaggaacactgaagagccctcccaaaggatttgatacgactgccataaacaaaagctattacaatgtggtgctacagaatattttagaaacagaaaatgaatattctaaagaacttcagactgtgctttcaacgtacctacggccattgcagaccagtgagaagttaagttcagcaaacatttcatatttaatgggaaatctagaagaaatatgttctttccagcaaatgctcgtacagtctttagaagaatgcaccaagttgcccgaagctcagcagagagtcggaggctgctttttaaacctgatgccacagatgaaaaccctgtacctcacgtattgtgccaatcacccttctgcagtgaatgtcctcacggaacacagtgaggagttgggggagttcatggagaccaaaggtgccagcagccctgggattctcgtgctgaccacgggcctgagcaaacccttcatgcgcctggataaataccctacgctgctcaaagagctcgagagacacatggaggattatcatacagatagacaagatattcaaaaatccatggctgccttcaaaaacctttcagcccaatgtcaagaagtccggaagaggaaagagcttgagctgcagatcctgacggaagccatccggaactgggagggcgatgacattaaaactctgggcaacgtcacttacatgtcccaggtcctgattcagtgtgccggaagtgaggaaaagaatgaaagatatcttctactcttcccaaatgttttgctaatgttgtctgccagtcctaggatgagtggctttatctatcagggaaagcttccaacgacaggaatgacaatcacaaagcttgaggacagtgaaaatcatagaaatgcatttgaaatatcagggagcatgattgagcggatattagtgtcgtgcaacaaccagcaggatctgcaggaatgggtggagcacctacagaagcaaacgaaggtcacgtctgtgggaaaccccaccataaagcctcattcagtgccatctcataccctcccctcccacccggtcactccgtccagcaagcacgcagacagcaagcccgcgccgctgacgcccgcctaccacacgctgccccacccctcccaccacggcaccccgcacaccaccatcaactggggacccctggagcctccgaaaacacccaagccctggagcctgagctgcctgcggcccgcgcctcccctccggccctcagctgctctctgctacaaggaggatcttagtaagagccctaagaccatgaaaaagctgctgcccaagcgcaaacctgaacggaagccttcagatgaggagttcgcgtcccggaaaagcacagctgctttggaagaagatgctcagattctgaaagtcattgaagcttactgcaccagcgccaaaacaaggcaaacactcaattcaagttcacgcaaagaatctgctccacaagttttgcttccagaagaagagaaaattatagtggaagaaactaaaagtaatggtcagacagtgatagaagaaaagagtcttgtggataccgtatatgcattaaaggatgaagttcaagaattaagacaggacaacaaaaagatgaagaaatctctagaggaagaacagagagcccgcaaagacctggagaagctggtgaggaaagtcctgaagaacatgaatgatcctgcctgggatgagaccaatctataagggatgtcctcagttctttctgttgaagaccagttctgaggtgaagctgggcacccctgacccaagtcggggtgcactcaggaccacagggcagggctgggtggggcgccaccttgctctctgtatatagaaaagctggagcttattctgcgaatggagacgatcaaaccatgactgatgaatccagacaggagggattgactctgaggacctgagctacatcaatccactctgtgaacatctcagttacctcattctgcaataagttcagtgactgactaaaagtcttgtttttccagactttgaattgaatatataaatattatatatacatgtttcttgtaaatatcccattttgaatgcatacctgtggtggttctgtccgggctaatccccatgctagaatgtcctttccagctacgtgaataagaagtcccatgcccgcatccaccggaagcagaagcctggtggatgcctggttcgttccgcagcaccagggcctccaccgtgctgtggcagcaccccccatgtcggtatttctaaataaccttatttatacctgcagagatacacttcagtcccattcagaagtcttctcttaaagcagcattacagtcccagacctgcgggtttctgagggcaacttgctggctgacagactcagtcttgacctcaaggaaggcccatacggcactgccgcatccacctagaggtgtttgctcttgtccgctgtctgagtactgtgattctcagatgagtttgctgcgttttgggaggacacagacggttctgtataggctagttcagtaacaacaaaatacactgttttgtcttccctcaaagagagatcttactagaacctgtaaatagaatgtattatttattataagtcactgcagctgatgaaaacagatggaggccatgctgcaggctgatactgatgggtggagttttgtcatcaggccagcctcatcccgaggtctcctccaccattggccgtagccagcaggcttcagtgctcaccgaaagtaaaatcccctccttcagcaagaataaagcaatatacaccttaggttccactaagtaacataggcataagcagggaacgtttcccccactgtgttccagtgcagaggagacgaagcctgtcctcaccgcggctcgctgggcccaggctggctctggaaagcctgtgcggtcctgggcaggaagcccggcccgtggagcaggttttcgttctgcttcagcaataaataagggtgaccacagggactttgcttttggtttcctttcctgtgaaaaggttggttttaaagtgagatacacttttccgtagaacaagtgttctatctttaaaaacccaaattgcagcaccgtggattactggtctcagaacaactcattgcgcatcagatttgactctctgattttctgtctattggccaaattgccctttaactgcacctgaatcctttgtgtactgatgcctttgagctgggcaccttgggagagtgttgtgttgctgtttacggttcttccttgcccttgctaattacagtctctggtgcccagcaagcccctttggcttccttccgtgactggtcacgttgtctgcctgggctcagcgtggacctgccccatgctgcagaacctggcctcacctggacttttcactagaattgccagcttcctcaacttagcagatcattcactcatgcgggcacaagcaaagatcaacactttcttttttggtaagcttgagttttacaagttattttttggtgatgcgtaagacattgcagtgggaaaccattcaacttgagtttattggagtttgctgttgtagcaggttttaactcaggaacaactcttgtctgatctctccgcccctctgccgggaggcgacattaactgtcctctcggagccggtagcgttgctgtccgagtccccaggacggatctcctgcagacctgccttaatgctcagatcgaagtatttcacaagaatacttgtgtttttaacagcccttcccctggacggtgcggccatgagggcctcatgttacggcattgccttttctttctgtggatccagtatcttcctcggctttttagggagcaggaaaaatgcgtctgagagcaactctttttaaaaacctgccctgttgtatataactgtgtctgtttcaccgtgtgacctcccaagggggtgggaacttgatataaacgtttaaaggggccacgatttgcccgagggttactcctttgctctcaccttgtatggatgaggagatgaagccatttcttatcctgtagatgtgaagcactttcagttttcagcgatgttggaatgtagcatcagaagctcgttccttcacactcagtggcgtctgtgcttgtccacatgcgctgggcgtctgggaccttgaatgcctgccctggttgtgtggactccttaatgccaatcatttcttcacttctctgggacacccagggcgcctgttgacaagtgtggagaaactcctaatttaaatgtcacagacaatgtcctagtgttgactactacaatgttgatgctacactgttgtaattattaaactgattatttttcttatgtc

SEQ ID NO: 3678 - DNA, 4957 bp, Homo sapiens
  source 1..4957: mol_type = genomic DNA
acgtttgatgcaaatgatttgtatcaggggcagaattttaacaaggtcctcagttccttagtgactctaaataaagtaacagcagacatcgggctggggagtgactccgtgtgtgcccggccctcgtctcaccgcataaagtcttttgactcccttggatcacagtctttgcacactcggacttcaaaactgttccagggccagtatcggagtttggacatgaccgataatagcaacaatcaactggtagtaagagcaaagtttaacttccagcagaccaatgaggacgagctttccttctcaaaaggagacgtcatccatgtcacccgtgtggaagagggaggctggtgggagggcacactcaacggccggaccggctggttccccagcaactacgtgcgcgaggtcaaggccagcgagaagcctgtgtctcccaaatcaggaacactgaagagccctcccaaaggatttgatacgactgccataaacaaaagctattacaatgtggtgctacagaatattttagaaacagaaaatgaatattctaaagaacttcagactgtgctttcaacgtacctacggccattgcagaccagtgagaagttaagttcagcaaacatttcatatttaatgggaaatctagaagaaatatgttctttccagcaaatgctcgtacagtctttagaagaatgcaccaagttgcccgaagctcagcagagagtcggaggctgctttttaaacctgatgccacagatgaaaaccctgtacctcacgtattgtgccaatcacccttctgcagtgaatgtcctcacggaacacagtgaggagttgggggagttcatggagaccaaaggtgccagcagccctgggattctcgtgctgaccacgggcctgagcaaacccttcatgcgcctggataaataccctacgctgctcaaagagctcgagagacacatggaggattatcatacagatagacaagatattcaaaaatccatggctgccttcaaaaacctttcagcccaatgtcaagaagtccggaagaggaaagagcttgagctgcagatcctgacggaagccatccggaactgggagggcgatgacattaaaactctgggcaacgtcacttacatgtcccaggtcctgattcagtgtgccggaagtgaggaaaagaatgaaagatatcttctactcttcccaaatgttttgctaatgttgtctgccagtcctaggatgagtggctttatctatcagggaaagcttccaacgacaggaatgacaatcacaaagcttgaggacagtgaaaatcatagaaatgcatttgaaatatcagggagcatgattgagcggatattagtgtcgtgcaacaaccagcaggatctgcaggaatgggtggagcacctacagaagcaaacgaaggtcacgtctgtgggaaaccccaccataaagcctcattcagtgccatctcataccctcccctcccacccggtcactccgtccagcaagcacgcagacagcaagcccgcgccgctgacgcccgcctaccacacgctgccccacccctcccaccacggcaccccgcacaccaccatcaactggggacccctggagcctccgaaaacacccaagccctggagcctgagctgcctgcggcccgcgcctcccctccggccctcagctgctctctgctacaaggaggatcttagtaagagccctaagaccatgaaaaagctgctgcccaagcgcaaacctgaacggaagccttcagatgaggagttcgcgtcccggaaaagcacagctgctttggaagaagatgctcagattctgaaagtcattgaagcttactgcaccagcgccaaaacaaggcaaacactcaattcaacatggcaaggcactgacctgatgcataatcacgtcttggctgatgatgaccaaccaagcctagactccctggggcgtcgcagtagcctttctcgtttggagccttcagacctctcggaagactctgactatgacagtatatggacagcccatagttacagaatgggttctacatctcgtaagagctgttgctcatatatctctcaccagaactaatgcacttctgagcttttcttaacaaatgcttgttgtatcgcagcctgcttttcttagatgttttcttgctgttccttgtctcttttatgtgatattttaacaacttttgagagtgttcctgatatttcccattgtactttgtggaggcttaactgccgatgcgagtatacattcgaatgactgactattggagggaggtggtgtgttcacgtgagcctacatccgagggtgctcttcgtaaggggtagttgttgttttatagctccaaatggtttttttattctcagtgtagcaactgtttgatttctttctggatacagctgtatgaacacttttctattttatactgaaatcacacaggtttgtgatctaagtgccagaaccatggaggagactctggccttatctgtagggacctaaattttttaagtgctatgaacactgatcaagtagttgtggagagatgagaagaatatatgcagcaaaggtgctgtgagcccagttccaacggctgtgttctggtaatcgtgcagaacagcatgtgggctctgggccttggcaggtgcacagacgggcgggcgtcacgtgtgttcagagcttgtctccacctcacggctctgtgctcttctgtgtgctgcgttgtggccgtgaagtgggagctctcctttccaaaggcagagcttactgtcatggctcagatgttcactcgcatcttcaccccaaacttccctgaattgcagtgatttctgttataaggcacatagcaagcctgtaccactctacagtaaaatctctacactaacagtttaaagcccgaaagctgaagcattcagcctctgcaagtgtagactactggactgtagtagaggcatttggaatacttacaaagtcaagtgctgtggcttcagttcccccggctccccacccctgacatccatacttatgttgtctggaagagccatggacacatcattattttcagcaaccagctgcagtgaaactccatttacagcaaccccatagtataaaaccacaatgcctcattgtaatgggatattgaagttcattgaagaattactaggttgccatgtggctcacttatttaaaaaaaaaaaaaaaaaactcacccgttttcctgggatttgttgtaaggagttttcactggcctcactcagaccaatttctgcttcaaaaagcactgaatgtgacctgttgcattcagttgtagcatcaaatccacacctagtcattgcttgaggggccaaattgtgttctgtcccatgcacgctctatttggtgttaaaatggaaccttacggttgtgttttaagtattcattgaaaccagcttcagaaaacaagatgccatagtaaattgagaataacattttttccttcttcagggtggctgtaattccaggtggccgtgatttctttcttccccactgcccactccttcgccaaacccacgtattcagtgttctgatcttgtttgtgcagagtgaactctgatgcagtatcagtcttgtcctgggagccgggtcctgctgctcacaagcccagagctgccagggagctcctggcagtagcacgttgtttagaaagttgggtggcttcattcagcatggaacaagctaatggcacaggagacatcagggcagctgttaattccaaatatttgttcccaagtagctactgaactgctcacaccattggaagattttgtattttcataccaattagtaaaaataagaacattgaggagcagtcagagcccagtgttaatctccggcagagatggggtttatgtatgttcagccagatagtaaatgggatttttggagaaataagataactacaaagtttctatacttactataagtggatttagaagcgattttggttttgtattacatacggtagtcctctgcgtcagggagcacttttttgtttgcctcgagactactcattagcgcactggctaagctgcctttgccttctcgtaggcgtgggttgcctgtgtcatgggctgtgtagaccacaacactcaaacacagttgctgcacttggattttcctttaataccaagtatcatttggttatcttactgggacattttcattgatattctatacaccaaagttttgacggtttaccatcattccattttgtaccagttaaaggcattttgatgatgctttttcttgatgctaagatcactgcagaagaataacctgaccttttctttgcatttgttttgaatgtctaacaccattagcttttgtgatctggttaagaagtattagtgccacaagcctgaaaagacagttctcctgtggcagtggcgatgtggcatccagagggccattgtttctacttttgtgggacttcagtcatgctgataatagaatcttctgttcatacaattctgtaatatttatttgtacagttagtattctaatgaaaggatgaagagtctgaactagaaggtaggtttaagccatcaccaggcctttgcaaatggcctaaatggtgttccctttgaaataacgcttgccacaagtatataataagctatattaattgtgttttgcataaaattgccaaaacacagtaatgtgtatatagtggtataagatcttgaaaaaaatctctataattgtgctctttatctgtgaatgggaaaagccatttttagtaggtgactaccatttgaaaaactcaattggatgtatatctgaatgttgcattgtattgtacagtatgcatattattgtttgtggttgcatatggcaatgaagtgtttgttttatattaaaaaaaacctgttatgtacagttgaaataaattttgcatttgcta

SEQ ID NO: 3679 - DNA, 5032 bp, Homo sapiens
  source 1..5032: mol_type = genomic DNA
gctgagcgggttggcatctggggcagcgggctcgctccaggccgtcgggggccgctcgccagcgtcgcccgctgtgttgggagcgcgggccgtgggcgtcgctcggccttgtccgcggcgtccccgctgccggccacggcgctcagcgcttgtgctctgtattgcaggtctaccccgagccccggagcgagagcgagtgcctgagcaacatccgcgagttcctgcgcggctgcggggcttccctgcggctggagacgtttgatgcaaatgatttgtatcaggggcagaattttaacaaggtcctcagttccttagtgactctaaataaagtaacagcagacatcgggctggggagtgactccgtgtgtgcccggccctcgtctcaccgcataaagtcttttgactcccttggatcacagtctttgcacactcggacttcaaaactgttccagggccagtatcggagtttggacatgaccgataatagcaacaatcaactggtagtaagagcaaagtttaacttccagcagaccaatgaggacgagctttccttctcaaaaggagacgtcatccatgtcacccgtgtggaagagggaggctggtgggagggcacactcaacggccggaccggctggttccccagcaactacgtgcgcgaggtcaaggccagcgagaagcctgtgtctcccaaatcaggaacactgaagagccctcccaaaggatttgatacgactgccataaacaaaagctattacaatgtggtgctacagaatattttagaaacagaaaatgaatattctaaagaacttcagactgtgctttcaacgtacctacggccattgcagaccagtgagaagttaagttcagcaaacatttcatatttaatgggaaatctagaagaaatatgttctttccagcaaatgctcgtacagtctttagaagaatgcaccaagttgcccgaagctcagcagagagtcggaggctgctttttaaacctgatgccacagatgaaaaccctgtacctcacgtattgtgccaatcacccttctgcagtgaatgtcctcacggaacacagtgaggagttgggggagttcatggagaccaaaggtgccagcagccctgggattctcgtgctgaccacgggcctgagcaaacccttcatgcgcctggataaataccctacgctgctcaaagagctcgagagacacatggaggattatcatacagatagacaagatattcaaaaatccatggctgccttcaaaaacctttcagcccaatgtcaagaagtccggaagaggaaagagcttgagctgcagatcctgacggaagccatccggaactgggagggcgatgacattaaaactctgggcaacgtcacttacatgtcccaggtcctgattcagtgtgccggaagtgaggaaaagaatgaaagatatcttctactcttcccaaatgttttgctaatgttgtctgccagtcctaggatgagtggctttatctatcagggaaagcttccaacgacaggaatgacaatcacaaagcttgaggacagtgaaaatcatagaaatgcatttgaaatatcagggagcatgattgagcggatattagtgtcgtgcaacaaccagcaggatctgcaggaatgggtggagcacctacagaagcaaacgaaggtcacgtctgtgggaaaccccaccataaagcctcattcagtgccatctcataccctcccctcccacccggtcactccgtccagcaagcacgcagacagcaagcccgcgccgctgacgcccgcctaccacacgctgccccacccctcccaccacggcaccccgcacaccaccatcaactggggacccctggagcctccgaaaacacccaagccctggagcctgagctgcctgcggcccgcgcctcccctccggccctcagctgctctctgctacaaggaggatcttagtaagagccctaagaccatgaaaaagctgctgcccaagcgcaaacctgaacggaagccttcagatgaggagttcgcgtcccggaaaagcacagctgctttggaagaagatgctcagattctgaaagtcattgaagcttactgcaccagcgccaaaacaaggcaaacactcaattcaagttcacgcaaagaatctgctccacaagttttgcttccagaagaagagaaaattatagtggaagaaactaaaagtaatggtcagacagtgatagaagaaaagagtcttgtggataccgtatatgcattaaaggatgaagttcaagaattaagacaggacaacaaaaagatgaagaaatctctagaggaagaacagagagcccgcaaagacctggagaagctggtgaggaaagtcctgaagaacatgaatgatcctgcctgggatgagaccaatctataagggatgtcctcagttctttctgttgaagaccagttctgaggtgaagctgggcacccctgacccaagtcggggtgcactcaggaccacagggcagggctgggtggggcgccaccttgctctctgtatatagaaaagctggagcttattctgcgaatggagacgatcaaaccatgactgatgaatccagacaggagggattgactctgaggacctgagctacatcaatccactctgtgaacatctcagttacctcattctgcaataagttcagtgactgactaaaagtcttgtttttccagactttgaattgaatatataaatattatatatacatgtttcttgtaaatatcccattttgaatgcatacctgtggtggttctgtccgggctaatccccatgctagaatgtcctttccagctacgtgaataagaagtcccatgcccgcatccaccggaagcagaagcctggtggatgcctggttcgttccgcagcaccagggcctccaccgtgctgtggcagcaccccccatgtcggtatttctaaataaccttatttatacctgcagagatacacttcagtcccattcagaagtcttctcttaaagcagcattacagtcccagacctgcgggtttctgagggcaacttgctggctgacagactcagtcttgacctcaaggaaggcccatacggcactgccgcatccacctagaggtgtttgctcttgtccgctgtctgagtactgtgattctcagatgagtttgctgcgttttgggaggacacagacggttctgtataggctagttcagtaacaacaaaatacactgttttgtcttccctcaaagagagatcttactagaacctgtaaatagaatgtattatttattataagtcactgcagctgatgaaaacagatggaggccatgctgcaggctgatactgatgggtggagttttgtcatcaggccagcctcatcccgaggtctcctccaccattggccgtagccagcaggcttcagtgctcaccgaaagtaaaatcccctccttcagcaagaataaagcaatatacaccttaggttccactaagtaacataggcataagcagggaacgtttcccccactgtgttccagtgcagaggagacgaagcctgtcctcaccgcggctcgctgggcccaggctggctctggaaagcctgtgcggtcctgggcaggaagcccggcccgtggagcaggttttcgttctgcttcagcaataaataagggtgaccacagggactttgcttttggtttcctttcctgtgaaaaggttggttttaaagtgagatacacttttccgtagaacaagtgttctatctttaaaaacccaaattgcagcaccgtggattactggtctcagaacaactcattgcgcatcagatttgactctctgattttctgtctattggccaaattgccctttaactgcacctgaatcctttgtgtactgatgcctttgagctgggcaccttgggagagtgttgtgttgctgtttacggttcttccttgcccttgctaattacagtctctggtgcccagcaagcccctttggcttccttccgtgactggtcacgttgtctgcctgggctcagcgtggacctgccccatgctgcagaacctggcctcacctggacttttcactagaattgccagcttcctcaacttagcagatcattcactcatgcgggcacaagcaaagatcaacactttcttttttggtaagcttgagttttacaagttattttttggtgatgcgtaagacattgcagtgggaaaccattcaacttgagtttattggagtttgctgttgtagcaggttttaactcaggaacaactcttgtctgatctctccgcccctctgccgggaggcgacattaactgtcctctcggagccggtagcgttgctgtccgagtccccaggacggatctcctgcagacctgccttaatgctcagatcgaagtatttcacaagaatacttgtgtttttaacagcccttcccctggacggtgcggccatgagggcctcatgttacggcattgccttttctttctgtggatccagtatcttcctcggctttttagggagcaggaaaaatgcgtctgagagcaactctttttaaaaacctgccctgttgtatataactgtgtctgtttcaccgtgtgacctcccaagggggtgggaacttgatataaacgtttaaaggggccacgatttgcccgagggttactcctttgctctcaccttgtatggatgaggagatgaagccatttcttatcctgtagatgtgaagcactttcagttttcagcgatgttggaatgtagcatcagaagctcgttccttcacactcagtggcgtctgtgcttgtccacatgcgctgggcgtctgggaccttgaatgcctgccctggttgtgtggactccttaatgccaatcatttcttcacttctctgggacacccagggcgcctgttgacaagtgtggagaaactcctaatttaaatgtcacagacaatgtcctagtgttgactactacaatgttgatgctacactgttgtaattattaaactgattatttttcttatgtc

SEQ ID NO: 3680 - DNA, 2400 bp, Homo sapiens
  source 1..2400: mol_type = genomic DNA
cacatcctgttattctgggttttgtgacttgctgccttgccactatgaagacgtttgatgcaaatgatttgtatcaggggcagaattttaacaaggtcctcagttccttagtgactctaaataaagtaacagcagacatcgggctggggagtgactccgtgtgtgcccggccctcgtctcaccgcataaagtcttttgactcccttggatcacagtctttgcacactcggacttcaaaactgttccagggccagtatcggagtttggacatgaccgataatagcaacaatcaactggtagtaagagcaaagtttaacttccagcagaccaatgaggacgagctttccttctcaaaaggagacgtcatccatgtcacccgtgtggaagagggaggctggtgggagggcacactcaacggccggaccggctggttccccagcaactacgtgcgcgaggtcaaggccagcgagaagcctgtgtctcccaaatcaggaacactgaagagccctcccaaaggatttgatacgactgccataaacaaaagctattacaatgtggtgctacagaatattttagaaacagaaaatgaatattctaaagaacttcagactgtgctttcaacgtacctacggccattgcagaccagtgagaagttaagttcagcaaacatttcatatttaatgggaaatctagaagaaatatgttctttccagcaaatgctcgtacagtctttagaagaatgcaccaagttgcccgaagctcagcagagagtcggaggctgctttttaaacctgatgccacagatgaaaaccctgtacctcacgtattgtgccaatcacccttctgcagtgaatgtcctcacggaacacagtgaggagttgggggagttcatggagaccaaaggtgccagcagccctgggattctcgtgctgaccacgggcctgagcaaacccttcatgcgcctggataaataccctacgctgctcaaagagctcgagagacacatggaggattatcatacagatagacaagatattcaaaaatccatggctgccttcaaaaacctttcagcccaatgtcaagaagtccggaagaggaaagagcttgagctgcagatcctgacggaagccatccggaactgggagggcgatgacattaaaactctgggcaacgtcacttacatgtcccaggtcctgattcagtgtgccggaagtgaggaaaagaatgaaagatatcttctactcttcccaaatgttttgctaatgttgtctgccagtcctaggatgagtggctttatctatcagggaaagcttccaacgacaggaatgacaatcacaaagcttgaggacagtgaaaatcatagaaatgcatttgaaatatcagggagcatgattgagcggatattagtgtcgtgcaacaaccagcaggatctgcaggaatgggtggagcacctacagaagcaaacgaaggtcacgtctgtgggaaaccccaccataaagcctcattcagtgccatctcataccctcccctcccacccggtcactccgtccagcaagcacgcagacagcaagcccgcgccgctgacgcccgcctaccacacgctgccccacccctcccaccacggcaccccgcacaccaccatcaactggggacccctggagcctccgaaaacacccaagccctggagcctgagctgcctgcggcccgcgcctcccctccggccctcagctgctctctgctacaaggaggatcttagtaagagccctaagaccatgaaaaagctgctgcccaagcgcaaacctgaacggaagccttcagatgaggagttcgcgtcccggaaaagcacagctgctttggaagaagatgctcagattctgaaagtcattgaagcttactgcaccagcgccaaaacaaggcaaacactcaattcaagttcacgcaaagaatctgctccacaagttttgcttccagaagaagagaaaattatagtggaagaaactaaaagtaatggtcagacagtgatagaagaaaagagtcttgtggataccgtatatgcattaaaggatgaagttcaagaattaagacaggacaacaaaaagatgaagaaatctctagaggaagaacagagagcccgcaaagacctggagaagctggtgaggaaagtcctgaagaacatgaatgatcctgcctgggatgagaccaatctataagggatgtcctcagttctttctgttgaagaccagttctgaggtgaagctgggcacccctgacccaagtcggggtgcactcaggaccacagggcagggctgggtggggcgccaccttgctctctgtatatagaaaagctggagcttattctgcgaatggagacgatcaaaccatgactgatgaatccagaca

SEQ ID NO: 3681 - DNA, 5375 bp, Homo sapiens
  source 1..5375: mol_type = genomic DNA
gcggccgaggccggggggcggcggcgggcgcccgcaggttcccgagccgctcctgagaaggcgcctgacagcgggccggggcgcacggagaagcgggccgggccggacctgctgggccgcgccgagccaatcgccggcgccggccgctcgatgggcgaggcggcggcggcggcggcgggggccgcgggccgggccgccgctccgaggtgaaggcgcgcgcccctccccgcctgcctcccgggccgcagcgatgaattccgccgagcaaaccgttacgtggctcatcactctgggggtgctggagtcgcccaaaaaaaccatctcggacccggagggctttctgcaggcgtcgctgaaggatggggtggtcctctgcaggctgctggagcgcctgctccccgggaccatcgagaaaacgtttgatgcaaatgatttgtatcaggggcagaattttaacaaggtcctcagttccttagtgactctaaataaagtaacagcagacatcgggctggggagtgactccgtgtgtgcccggccctcgtctcaccgcataaagtcttttgactcccttggatcacagtctttgcacactcggacttcaaaactgttccagggccagtatcggagtttggacatgaccgataatagcaacaatcaactggtagtaagagcaaagtttaacttccagcagaccaatgaggacgagctttccttctcaaaaggagacgtcatccatgtcacccgtgtggaagagggaggctggtgggagggcacactcaacggccggaccggctggttccccagcaactacgtgcgcgaggtcaaggccagcgagaagcctgtgtctcccaaatcaggaacactgaagagccctcccaaaggatttgatacgactgccataaacaaaagctattacaatgtggtgctacagaatattttagaaacagaaaatgaatattctaaagaacttcagactgtgctttcaacgtacctacggccattgcagaccagtgagaagttaagttcagcaaacatttcatatttaatgggaaatctagaagaaatatgttctttccagcaaatgctcgtacagtctttagaagaatgcaccaagttgcccgaagctcagcagagagtcggaggctgctttttaaacctgatgccacagatgaaaaccctgtacctcacgtattgtgccaatcacccttctgcagtgaatgtcctcacggaacacagtgaggagttgggggagttcatggagaccaaaggtgccagcagccctgggattctcgtgctgaccacgggcctgagcaaacccttcatgcgcctggataaataccctacgctgctcaaagagctcgagagacacatggaggattatcatacagatagacaagatattcaaaaatccatggctgccttcaaaaacctttcagcccaatgtcaagaagtccggaagaggaaagagcttgagctgcagatcctgacggaagccatccggaactgggagggcgatgacattaaaactctgggcaacgtcacttacatgtcccaggtcctgattcagtgtgccggaagtgaggaaaagaatgaaagatatcttctactcttcccaaatgttttgctaatgttgtctgccagtcctaggatgagtggctttatctatcagggaaagcttccaacgacaggaatgacaatcacaaagcttgaggacagtgaaaatcatagaaatgcatttgaaatatcagggagcatgattgagcggatattagtgtcgtgcaacaaccagcaggatctgcaggaatgggtggagcacctacagaagcaaacgaaggtcacgtctgtgggaaaccccaccataaagcctcattcagtgccatctcataccctcccctcccacccggtcactccgtccagcaagcacgcagacagcaagcccgcgccgctgacgcccgcctaccacacgctgccccacccctcccaccacggcaccccgcacaccaccatcaactggggacccctggagcctccgaaaacacccaagccctggagcctgagctgcctgcggcccgcgcctcccctccggccctcagctgctctctgctacaaggaggatcttagtaagagccctaagaccatgaaaaagctgctgcccaagcgcaaacctgaacggaagccttcagatgaggagttcgcgtcccggaaaagcacagctgctttggaagaagatgctcagattctgaaagtcattgaagcttactgcaccagcgccaaaacaaggcaaacactcaattcaacatggcaaggcactgacctgatgcataatcacgtcttggctgatgatgaccaaccaagcctagactccctggggcgtcgcagtagcctttctcgtttggagccttcagacctctcggaagactctgactatgacagtatatggacagcccatagttacagaatgggttctacatctcgtaagagctgttgctcatatatctctcaccagaactaatgcacttctgagcttttcttaacaaatgcttgttgtatcgcagcctgcttttcttagatgttttcttgctgttccttgtctcttttatgtgatattttaacaacttttgagagtgttcctgatatttcccattgtactttgtggaggcttaactgccgatgcgagtatacattcgaatgactgactattggagggaggtggtgtgttcacgtgagcctacatccgagggtgctcttcgtaaggggtagttgttgttttatagctccaaatggtttttttattctcagtgtagcaactgtttgatttctttctggatacagctgtatgaacacttttctattttatactgaaatcacacaggtttgtgatctaagtgccagaaccatggaggagactctggccttatctgtagggacctaaattttttaagtgctatgaacactgatcaagtagttgtggagagatgagaagaatatatgcagcaaaggtgctgtgagcccagttccaacggctgtgttctggtaatcgtgcagaacagcatgtgggctctgggccttggcaggtgcacagacgggcgggcgtcacgtgtgttcagagcttgtctccacctcacggctctgtgctcttctgtgtgctgcgttgtggccgtgaagtgggagctctcctttccaaaggcagagcttactgtcatggctcagatgttcactcgcatcttcaccccaaacttccctgaattgcagtgatttctgttataaggcacatagcaagcctgtaccactctacagtaaaatctctacactaacagtttaaagcccgaaagctgaagcattcagcctctgcaagtgtagactactggactgtagtagaggcatttggaatacttacaaagtcaagtgctgtggcttcagttcccccggctccccacccctgacatccatacttatgttgtctggaagagccatggacacatcattattttcagcaaccagctgcagtgaaactccatttacagcaaccccatagtataaaaccacaatgcctcattgtaatgggatattgaagttcattgaagaattactaggttgccatgtggctcacttatttaaaaaaaaaaaaaaaaaactcacccgttttcctgggatttgttgtaaggagttttcactggcctcactcagaccaatttctgcttcaaaaagcactgaatgtgacctgttgcattcagttgtagcatcaaatccacacctagtcattgcttgaggggccaaattgtgttctgtcccatgcacgctctatttggtgttaaaatggaaccttacggttgtgttttaagtattcattgaaaccagcttcagaaaacaagatgccatagtaaattgagaataacattttttccttcttcagggtggctgtaattccaggtggccgtgatttctttcttccccactgcccactccttcgccaaacccacgtattcagtgttctgatcttgtttgtgcagagtgaactctgatgcagtatcagtcttgtcctgggagccgggtcctgctgctcacaagcccagagctgccagggagctcctggcagtagcacgttgtttagaaagttgggtggcttcattcagcatggaacaagctaatggcacaggagacatcagggcagctgttaattccaaatatttgttcccaagtagctactgaactgctcacaccattggaagattttgtattttcataccaattagtaaaaataagaacattgaggagcagtcagagcccagtgttaatctccggcagagatggggtttatgtatgttcagccagatagtaaatgggatttttggagaaataagataactacaaagtttctatacttactataagtggatttagaagcgattttggttttgtattacatacggtagtcctctgcgtcagggagcacttttttgtttgcctcgagactactcattagcgcactggctaagctgcctttgccttctcgtaggcgtgggttgcctgtgtcatgggctgtgtagaccacaacactcaaacacagttgctgcacttggattttcctttaataccaagtatcatttggttatcttactgggacattttcattgatattctatacaccaaagttttgacggtttaccatcattccattttgtaccagttaaaggcattttgatgatgctttttcttgatgctaagatcactgcagaagaataacctgaccttttctttgcatttgttttgaatgtctaacaccattagcttttgtgatctggttaagaagtattagtgccacaagcctgaaaagacagttctcctgtggcagtggcgatgtggcatccagagggccattgtttctacttttgtgggacttcagtcatgctgataatagaatcttctgttcatacaattctgtaatatttatttgtacagttagtattctaatgaaaggatgaagagtctgaactagaaggtaggtttaagccatcaccaggcctttgcaaatggcctaaatggtgttccctttgaaataacgcttgccacaagtatataataagctatattaattgtgttttgcataaaattgccaaaacacagtaatgtgtatatagtggtataagatcttgaaaaaaatctctataattgtgctctttatctgtgaatgggaaaagccatttttagtaggtgactaccatttgaaaaactcaattggatgtatatctgaatgttgcattgtattgtacagtatgcatattattgtttgtggttgcatatggcaatgaagtgtttgttttatattaaaaaaaacctgttatgtacagttgaaataaattttgcatttgctagcc

SEQ ID NO: 3682 - DNA, 5525 bp, Homo sapiens
  source 1..5525: mol_type = genomic DNA
gcggccgaggccggggggcggcggcgggcgcccgcaggttcccgagccgctcctgagaaggcgcctgacagcgggccggggcgcacggagaagcgggccgggccggacctgctgggccgcgccgagccaatcgccggcgccggccgctcgatgggcgaggcggcggcggcggcggcgggggccgcgggccgggccgccgctccgaggtgaaggcgcgcgcccctccccgcctgcctcccgggccgcagcgatgaattccgccgagcaaaccgttacgtggctcatcactctgggggtgctggagtcgcccaaaaaaaccatctcggacccggagggctttctgcaggcgtcgctgaaggatggggtggtcctctgcaggctgctggagcgcctgctccccgggaccatcgagaaagtctaccccgagccccggagcgagagcgagtgcctgagcaacatccgcgagttcctgcgcggctgcggggcttccctgcggctggagctcctgtttcctccttcccagcctcctcagcatctggtaaccaccattctcttgtctgcttctacgtttgatgcaaatgatttgtatcaggggcagaattttaacaaggtcctcagttccttagtgactctaaataaagtaacagcagacatcgggctggggagtgactccgtgtgtgcccggccctcgtctcaccgcataaagtcttttgactcccttggatcacagtctttgcacactcggacttcaaaactgttccagggccagtatcggagtttggacatgaccgataatagcaacaatcaactggtagtaagagcaaagtttaacttccagcagaccaatgaggacgagctttccttctcaaaaggagacgtcatccatgtcacccgtgtggaagagggaggctggtgggagggcacactcaacggccggaccggctggttccccagcaactacgtgcgcgaggtcaaggccagcgagaagcctgtgtctcccaaatcaggaacactgaagagccctcccaaaggatttgatacgactgccataaacaaaagctattacaatgtggtgctacagaatattttagaaacagaaaatgaatattctaaagaacttcagactgtgctttcaacgtacctacggccattgcagaccagtgagaagttaagttcagcaaacatttcatatttaatgggaaatctagaagaaatatgttctttccagcaaatgctcgtacagtctttagaagaatgcaccaagttgcccgaagctcagcagagagtcggaggctgctttttaaacctgatgccacagatgaaaaccctgtacctcacgtattgtgccaatcacccttctgcagtgaatgtcctcacggaacacagtgaggagttgggggagttcatggagaccaaaggtgccagcagccctgggattctcgtgctgaccacgggcctgagcaaacccttcatgcgcctggataaataccctacgctgctcaaagagctcgagagacacatggaggattatcatacagatagacaagatattcaaaaatccatggctgccttcaaaaacctttcagcccaatgtcaagaagtccggaagaggaaagagcttgagctgcagatcctgacggaagccatccggaactgggagggcgatgacattaaaactctgggcaacgtcacttacatgtcccaggtcctgattcagtgtgccggaagtgaggaaaagaatgaaagatatcttctactcttcccaaatgttttgctaatgttgtctgccagtcctaggatgagtggctttatctatcagggaaagcttccaacgacaggaatgacaatcacaaagcttgaggacagtgaaaatcatagaaatgcatttgaaatatcagggagcatgattgagcggatattagtgtcgtgcaacaaccagcaggatctgcaggaatgggtggagcacctacagaagcaaacgaaggtcacgtctgtgggaaaccccaccataaagcctcattcagtgccatctcataccctcccctcccacccggtcactccgtccagcaagcacgcagacagcaagcccgcgccgctgacgcccgcctaccacacgctgccccacccctcccaccacggcaccccgcacaccaccatcaactggggacccctggagcctccgaaaacacccaagccctggagcctgagctgcctgcggcccgcgcctcccctccggccctcagctgctctctgctacaaggaggatcttagtaagagccctaagaccatgaaaaagctgctgcccaagcgcaaacctgaacggaagccttcagatgaggagttcgcgtcccggaaaagcacagctgctttggaagaagatgctcagattctgaaagtcattgaagcttactgcaccagcgccaaaacaaggcaaacactcaattcaacatggcaaggcactgacctgatgcataatcacgtcttggctgatgatgaccaaccaagcctagactccctggggcgtcgcagtagcctttctcgtttggagccttcagacctctcggaagactctgactatgacagtatatggacagcccatagttacagaatgggttctacatctcgtaagagctgttgctcatatatctctcaccagaactaatgcacttctgagcttttcttaacaaatgcttgttgtatcgcagcctgcttttcttagatgttttcttgctgttccttgtctcttttatgtgatattttaacaacttttgagagtgttcctgatatttcccattgtactttgtggaggcttaactgccgatgcgagtatacattcgaatgactgactattggagggaggtggtgtgttcacgtgagcctacatccgagggtgctcttcgtaaggggtagttgttgttttatagctccaaatggtttttttattctcagtgtagcaactgtttgatttctttctggatacagctgtatgaacacttttctattttatactgaaatcacacaggtttgtgatctaagtgccagaaccatggaggagactctggccttatctgtagggacctaaattttttaagtgctatgaacactgatcaagtagttgtggagagatgagaagaatatatgcagcaaaggtgctgtgagcccagttccaacggctgtgttctggtaatcgtgcagaacagcatgtgggctctgggccttggcaggtgcacagacgggcgggcgtcacgtgtgttcagagcttgtctccacctcacggctctgtgctcttctgtgtgctgcgttgtggccgtgaagtgggagctctcctttccaaaggcagagcttactgtcatggctcagatgttcactcgcatcttcaccccaaacttccctgaattgcagtgatttctgttataaggcacatagcaagcctgtaccactctacagtaaaatctctacactaacagtttaaagcccgaaagctgaagcattcagcctctgcaagtgtagactactggactgtagtagaggcatttggaatacttacaaagtcaagtgctgtggcttcagttcccccggctccccacccctgacatccatacttatgttgtctggaagagccatggacacatcattattttcagcaaccagctgcagtgaaactccatttacagcaaccccatagtataaaaccacaatgcctcattgtaatgggatattgaagttcattgaagaattactaggttgccatgtggctcacttatttaaaaaaaaaaaaaaaaaactcacccgttttcctgggatttgttgtaaggagttttcactggcctcactcagaccaatttctgcttcaaaaagcactgaatgtgacctgttgcattcagttgtagcatcaaatccacacctagtcattgcttgaggggccaaattgtgttctgtcccatgcacgctctatttggtgttaaaatggaaccttacggttgtgttttaagtattcattgaaaccagcttcagaaaacaagatgccatagtaaattgagaataacattttttccttcttcagggtggctgtaattccaggtggccgtgatttctttcttccccactgcccactccttcgccaaacccacgtattcagtgttctgatcttgtttgtgcagagtgaactctgatgcagtatcagtcttgtcctgggagccgggtcctgctgctcacaagcccagagctgccagggagctcctggcagtagcacgttgtttagaaagttgggtggcttcattcagcatggaacaagctaatggcacaggagacatcagggcagctgttaattccaaatatttgttcccaagtagctactgaactgctcacaccattggaagattttgtattttcataccaattagtaaaaataagaacattgaggagcagtcagagcccagtgttaatctccggcagagatggggtttatgtatgttcagccagatagtaaatgggatttttggagaaataagataactacaaagtttctatacttactataagtggatttagaagcgattttggttttgtattacatacggtagtcctctgcgtcagggagcacttttttgtttgcctcgagactactcattagcgcactggctaagctgcctttgccttctcgtaggcgtgggttgcctgtgtcatgggctgtgtagaccacaacactcaaacacagttgctgcacttggattttcctttaataccaagtatcatttggttatcttactgggacattttcattgatattctatacaccaaagttttgacggtttaccatcattccattttgtaccagttaaaggcattttgatgatgctttttcttgatgctaagatcactgcagaagaataacctgaccttttctttgcatttgttttgaatgtctaacaccattagcttttgtgatctggttaagaagtattagtgccacaagcctgaaaagacagttctcctgtggcagtggcgatgtggcatccagagggccattgtttctacttttgtgggacttcagtcatgctgataatagaatcttctgttcatacaattctgtaatatttatttgtacagttagtattctaatgaaaggatgaagagtctgaactagaaggtaggtttaagccatcaccaggcctttgcaaatggcctaaatggtgttccctttgaaataacgcttgccacaagtatataataagctatattaattgtgttttgcataaaattgccaaaacacagtaatgtgtatatagtggtataagatcttgaaaaaaatctctataattgtgctctttatctgtgaatgggaaaagccatttttagtaggtgactaccatttgaaaaactcaattggatgtatatctgaatgttgcattgtattgtacagtatgcatattattgtttgtggttgcatatggcaatgaagtgtttgttttatattaaaaaaaacctgttatgtacagttgaaataaattttgcatttgctagcc

SEQ ID NO: 3683 - DNA, 4921 bp, Homo sapiens
  source 1..4921: mol_type = genomic DNA
gatggtggaaagtgaggagaagcaaaaagacgactacttctttccccatttcccggtctggtctttttggggtctactacgtagaggtgcatcagccagcgctaccatggaggcaggaggcattcttttgctctcgtacgtttgatgcaaatgatttgtatcaggggcagaattttaacaaggtcctcagttccttagtgactctaaataaagtaacagcagacatcgggctggggagtgactccgtgtgtgcccggccctcgtctcaccgcataaagtcttttgactcccttggatcacagtctttgcacactcggacttcaaaactgttccagggccagtatcggagtttggacatgaccgataatagcaacaatcaactggtagtaagagcaaagtttaacttccagcagaccaatgaggacgagctttccttctcaaaaggagacgtcatccatgtcacccgtgtggaagagggaggctggtgggagggcacactcaacggccggaccggctggttccccagcaactacgtgcgcgaggtcaaggccagcgagaagcctgtgtctcccaaatcaggaacactgaagagccctcccaaaggatttgatacgactgccataaacaaaagctattacaatgtggtgctacagaatattttagaaacagaaaatgaatattctaaagaacttcagactgtgctttcaacgtacctacggccattgcagaccagtgagaagttaagttcagcaaacatttcatatttaatgggaaatctagaagaaatatgttctttccagcaaatgctcgtacagtctttagaagaatgcaccaagttgcccgaagctcagcagagagtcggaggctgctttttaaacctgatgccacagatgaaaaccctgtacctcacgtattgtgccaatcacccttctgcagtgaatgtcctcacggaacacagtgaggagttgggggagttcatggagaccaaaggtgccagcagccctgggattctcgtgctgaccacgggcctgagcaaacccttcatgcgcctggataaataccctacgctgctcaaagagctcgagagacacatggaggattatcatacagatagacaagatattcaaaaatccatggctgccttcaaaaacctttcagcccaatgtcaagaagtccggaagaggaaagagcttgagctgcagatcctgacggaagccatccggaactgggagggcgatgacattaaaactctgggcaacgtcacttacatgtcccaggtcctgattcagtgtgccggaagtgaggaaaagaatgaaagatatcttctactcttcccaaatgttttgctaatgttgtctgccagtcctaggatgagtggctttatctatcagggaaagcttccaacgacaggaatgacaatcacaaagcttgaggacagtgaaaatcatagaaatgcatttgaaatatcagggagcatgattgagcggatattagtgtcgtgcaacaaccagcaggatctgcaggaatgggtggagcacctacagaagcaaacgaaggtcacgtctgtgggaaaccccaccataaagcctcattcagtgccatctcataccctcccctcccacccggtcactccgtccagcaagcacgcagacagcaagcccgcgccgctgacgcccgcctaccacacgctgccccacccctcccaccacggcaccccgcacaccaccatcaactggggacccctggagcctccgaaaacacccaagccctggagcctgagctgcctgcggcccgcgcctcccctccggccctcagctgctctctgctacaaggaggatcttagtaagagccctaagaccatgaaaaagctgctgcccaagcgcaaacctgaacggaagccttcagatgaggagttcgcgtcccggaaaagcacagctgctttggaagaagatgctcagattctgaaagtcattgaagcttactgcaccagcgccaaaacaaggcaaacactcaattcaagttcacgcaaagaatctgctccacaagttttgcttccagaagaagagaaaattatagtggaagaaactaaaagtaatggtcagacagtgatagaagaaaagagtcttgtggataccgtatatgcattaaaggatgaagttcaagaattaagacaggacaacaaaaagatgaagaaatctctagaggaagaacagagagcccgcaaagacctggagaagctggtgaggaaagtcctgaagaacatgaatgatcctgcctgggatgagaccaatctataagggatgtcctcagttctttctgttgaagaccagttctgaggtgaagctgggcacccctgacccaagtcggggtgcactcaggaccacagggcagggctgggtggggcgccaccttgctctctgtatatagaaaagctggagcttattctgcgaatggagacgatcaaaccatgactgatgaatccagacaggagggattgactctgaggacctgagctacatcaatccactctgtgaacatctcagttacctcattctgcaataagttcagtgactgactaaaagtcttgtttttccagactttgaattgaatatataaatattatatatacatgtttcttgtaaatatcccattttgaatgcatacctgtggtggttctgtccgggctaatccccatgctagaatgtcctttccagctacgtgaataagaagtcccatgcccgcatccaccggaagcagaagcctggtggatgcctggttcgttccgcagcaccagggcctccaccgtgctgtggcagcaccccccatgtcggtatttctaaataaccttatttatacctgcagagatacacttcagtcccattcagaagtcttctcttaaagcagcattacagtcccagacctgcgggtttctgagggcaacttgctggctgacagactcagtcttgacctcaaggaaggcccatacggcactgccgcatccacctagaggtgtttgctcttgtccgctgtctgagtactgtgattctcagatgagtttgctgcgttttgggaggacacagacggttctgtataggctagttcagtaacaacaaaatacactgttttgtcttccctcaaagagagatcttactagaacctgtaaatagaatgtattatttattataagtcactgcagctgatgaaaacagatggaggccatgctgcaggctgatactgatgggtggagttttgtcatcaggccagcctcatcccgaggtctcctccaccattggccgtagccagcaggcttcagtgctcaccgaaagtaaaatcccctccttcagcaagaataaagcaatatacaccttaggttccactaagtaacataggcataagcagggaacgtttcccccactgtgttccagtgcagaggagacgaagcctgtcctcaccgcggctcgctgggcccaggctggctctggaaagcctgtgcggtcctgggcaggaagcccggcccgtggagcaggttttcgttctgcttcagcaataaataagggtgaccacagggactttgcttttggtttcctttcctgtgaaaaggttggttttaaagtgagatacacttttccgtagaacaagtgttctatctttaaaaacccaaattgcagcaccgtggattactggtctcagaacaactcattgcgcatcagatttgactctctgattttctgtctattggccaaattgccctttaactgcacctgaatcctttgtgtactgatgcctttgagctgggcaccttgggagagtgttgtgttgctgtttacggttcttccttgcccttgctaattacagtctctggtgcccagcaagcccctttggcttccttccgtgactggtcacgttgtctgcctgggctcagcgtggacctgccccatgctgcagaacctggcctcacctggacttttcactagaattgccagcttcctcaacttagcagatcattcactcatgcgggcacaagcaaagatcaacactttcttttttggtaagcttgagttttacaagttattttttggtgatgcgtaagacattgcagtgggaaaccattcaacttgagtttattggagtttgctgttgtagcaggttttaactcaggaacaactcttgtctgatctctccgcccctctgccgggaggcgacattaactgtcctctcggagccggtagcgttgctgtccgagtccccaggacggatctcctgcagacctgccttaatgctcagatcgaagtatttcacaagaatacttgtgtttttaacagcccttcccctggacggtgcggccatgagggcctcatgttacggcattgccttttctttctgtggatccagtatcttcctcggctttttagggagcaggaaaaatgcgtctgagagcaactctttttaaaaacctgccctgttgtatataactgtgtctgtttcaccgtgtgacctcccaagggggtgggaacttgatataaacgtttaaaggggccacgatttgcccgagggttactcctttgctctcaccttgtatggatgaggagatgaagccatttcttatcctgtagatgtgaagcactttcagttttcagcgatgttggaatgtagcatcagaagctcgttccttcacactcagtggcgtctgtgcttgtccacatgcgctgggcgtctgggaccttgaatgcctgccctggttgtgtggactccttaatgccaatcatttcttcacttctctgggacacccagggcgcctgttgacaagtgtggagaaactcctaatttaaatgtcacagacaatgtcctagtgttgactactacaatgttgatgctacactgttgtaattattaaactgattatttttcttatgtcacagaa

SEQ ID NO: 3684 - DNA, 682 bp, Homo sapiens
  source 1..682: mol_type = genomic DNA
tgggcgaggcggcggcggcggcggcgggggccgcgggccgggccgccgctccgaggtgaaggcgcgcgcccctccccgcctgcctcccgggccgcagcgatgaattccgccgagcaaaccgttacgtggctcatcactctgggggtgctggagtcgcccaaaaaaaccatctcggacccggagggctttctgcaggcgtcgctgaaggatggggtggtcctctgcaggctgctggagcgcctgctccccgggaccatcgagaaaacgtttgatgcaaatgatttgtatcaggggcagaattttaacaaggtcctcagttccttagtgactctaaataaagtaacagcagacatcgggctggggagtgactccgtgtgtgcccggccctcgtctcaccgcataaagtcttttgactcccttggatcacagtctttgcacactcggacttcaaaactgttccagggccagtatcggagtttggacatgaccgataatagcaacaatcaactggtagtaagagcaaagtttaacttccagcagaccaatgaggacgagctttccttctcaaaaggagacgtcatccatgtcacccgtgtggaagagggaggctggtgggagggcacactcaacggccggaccggctggttccccagcaactacgtgcgcgaggtcaaggccagcg

SEQ ID NO: 3685 - DNA, 1681 bp, Homo sapiens
  source 1..1681: mol_type = genomic DNA
gagattggtgcagccccggaggaagaaaaaagggtctaccccgagccccggagcgagagcgagtgcctgagcaacatccgcgagttcctgcgcggctgcggggcttccctgcggctggagacgtttgatgcaaatgatttgtatcaggggcagaattttaacaaggtcctcagttccttagtgactctaaataaagtaacagcagacatcgggctggggagtgactccgtgtgtgcccggccctcgtctcaccgcataaagtcttttgactcccttggatcacagtctttgcacactcggacttcaaaactgttccagggccagtatcggagtttggacatgaccgataatagcaacaatcaactggtagtaagagcaaagtttaacttccagcagaccaatgaggacgagctttccttctcaaaaggagacgtcatccatgtcacccgtgtggaagagggaggctggtgggagggcacactcaacggccggaccggctggttccccagcaactacgtgcgcgaggtcaaggccagcgagaagcctgtgtctcccaaatcaggaacactgaagagccctcccaaaggatttgatacgactgccataaacaaaagctattacaatgtggtgctacagaatattttagaaacagaaaatgaatattctaaagaacttcagactgtgctttcaacgtacctacggccattgcagaccagtgagaagttaagttcagcaaacatttcatatttaatgggaaatctagaagaaatatgttctttccagcaaatgctcgtacagtctttagaagaatgcaccaagttgcccgaagctcagcagagagtcggaggctgctttttaaacctgatgccacagatgaaaaccctgtacctcacgtattgtgccaatcacccttctgcagtgaatgtcctcacggaacacagtgaggagttgggggagttcatggagaccaaaggtgccagcagccctgggattctcgtgctgaccacgggcctgagcaaacccttcatgcgcctggataaataccctacgctgctcaaagagctcgagagacacatggaggattatcatacagatagacaagatattcaaaaatccatggctgccttcaaaaacctttcagcccaatgtcaagaagtccggaagaggaaagagcttgagctgcagatcctgacggaagccatccggaactgggagggcgatgacattaaaactctgggcaacgtcacttacatgtcccaggtcctgattcagtgtgccggaagtgaggaaaagaatgaaagatatcttctactcttcccaaatgttttgctaatgttgtctgccagtcctaggatgagtggctttatctatcagggaaagcttccaacgacaggaatgacaatcacaaagcttgaggacagtgaaaatcatagaaatgcatttgaaatatcagggagcatgattgagcggatattagtgtcgtgcaacaaccagcaggatctgcaggaatgggtggagcacctacagaagcaaacgaaggtcacgtctgtgggaaaccccaccataaagcctcattcagtgccatctcataccctcccctcccacccggtcactccgtccagcaagcacgcagacagcaagcccgcgccgctgacgcccgcctaccacacgctgccccacc

SEQ ID NO: 3686 - DNA, 691 bp, Homo sapiens
  source 1..691: mol_type = genomic DNA
acacttcagatgggggatagtccaggctggtggtggagctcccaggggatttcgcttctgggtagaattgtcatttttttttttcctcagagactgttgtgtgggcctagtggtgcatcaggttccggttagaatccagtgcaggccgcaggcttctctttaattagagagggtcacttcacctccggttagaatccagtgcaggcagcagcttctttttaattagagaggggtctgggtgctgagcttcccatcaggaagaaggggctgtcgtgctgaagtcctgagacgtttgatgcaaatgatttgtatcaggggcagaattttaacaaggtcctcagttccttagtgactctaaataaagtaacagcagacatcgggctggggagtgactccgtgtgtgcccggccctcgtctcaccgcataaagtcttttgactcccttggatcacagtctttgcacactcggacttcaaaactgttccagggccagtatcggagtttggacatgaccgataatagcaacaatcaactggtagtaagagcaaagtttaacttccagcagaccaatgaggacgagctttccttctcaaaaggagacgtcatccatgtcacccgtgtggaagagggaggctggtgggagggcacactcaacggccggaccggctggttccccagcaactacgtgcgcg

SEQ ID NO: 3687 - DNA, 581 bp, Homo sapiens
  source 1..581: mol_type = genomic DNA
acttccggcgccggggctcacttcctggtgcgggaaggggcagagattggtgcagccccggaggaagaaaaaagggtctaccccgagccccggagcgagagcgagtgcctgagcaacatccgcgagttcctgcgcggctgcggggcttccctgcggctggagacgtttgatgcaaatgatttgtatcaggggcagaattttaacaaggtcctcagttccttagtgactctaaataaagtaacagcagtgtcttatgaagggagatccagagaacagaactaagcctcttactgtctgtttactttgattctgtcagcaacttcatgagacatcgggctggggagtgactccgtgtgtgcccggccctcgtctcaccgcataaagtcttttgactcccttggatcacagtctttgcacactcggacttcaaaactgttccagggccagtatcggagtttggacatgaccgataatagcaacaatcaactggtagtaagagcaaagtttaacttccagcagaccaatgaggacgagctttccttctcaaaaggagacgtcatccatgtcacccgtgtggaaga

SEQ ID NO: 3688 - DNA, 1501 bp, Homo sapiens
  source 1..1501: mol_type = genomic DNA
gagattggtgcagccccggaggaagaaaaaagggtctaccccgagccccggagcgagagcgagtgcctgagcaacatccgcgagttcctgcgcggctgcggggcttccctgcggctggagacgtttgatgcaaatgatttgtatcaggggcagaattttaacaaggtcctcagttccttagtgactctaaataaagtaacagcaggacatgaccgataatagcaacaatcaactggtagtaagagcaaagtttaacttccagcagaccaatgaggacgagctttccttctcaaaaggagacgtcatccatgtcacccgtgtggaagagggaggctggtgggagggcacactcaacggccggaccggctggttccccagcaactacgtgcgcgaggtcaaggccagcgagaagcctgtgtctcccaaatcaggaacactgaagagccctcccaaaggatttgatacgactgccataaacaaaagctattacaatgtgccagtacttagccgcggagcggaaagcagtgctcatgaaggtggaggcacacccagagactgcatggaggtggaaccgggaagtccggggtctgaggtcctgcctgcagggttgaaaggcatgcctgccagcagacacatttgggagccagagtgtgctgtggtctgaatgtgtttccccagatcatctgttactacagatgatcaccaattggatggtattaaaagcacacgtgcccctgctccgggttgttgctgttgtccttcagaaactctgaggtctggagaggttgcccgaagctcagcagagagtcggaggctgctttttaaacctgatgccacagatgaaaaccctgtacctcacgtattgtgccaatcacccttctgcagtgaatgtcctcacggaacacaggattatcatacagatagacaagatattcaaaaatccatggctgccttcaaaaacctttcagcccaatgtcaagaagtccggaagaggaaagagcttgagctgcagatcctgacggaagccatccggaactgggagggcgatgacattaaaactctgggcaacgtcacttacatgtcccaggtcctgattcagtgtgccggaagtgaggaaaagaatgaaagatatcttctactcttcccaaatgttttgctaatgttgtctgccagtcctaggatgagtggctttatctatcagggagcatgattgagcggatattagtgtcgtgcaacaaccagcaggatctgcaggaatgggtggagcacctacagaagcaaacgaaggtcacgtctgtgggaaaccccaccataaagcctcattcagtgccatctcataccctcccctcccacccggtcactccgtccagcaagcacgcagacagcaagcccgcgccgctgacgcccgcctaccacacgctgccccacccctcccaccacggcaccccgcacaccaccatcaactggggacccctggagcctccgaaaacacccaagccct

SEQ ID NO: 3689 - DNA, 5020 bp, Homo sapiens
  source 1..5020: mol_type = genomic DNA
attccgccgagcaaaccgttacgtggctcatcactctgggggtgctggagtcgcccaaaaaccatctcggacccggagggctttctgcaggcgtcgctgaaggatggggtggtcctctgcaggctgctggagcgcctgctccccgggaccatcgagaaagtctaccccgagccccggagcgagagcgagtgcctgagcaacatccgcgagttcctgcgcggctgcggggcttccctgcggctggagacgtttgatgcaaatgatttgtatcaggggcagaattttaacaaggtcctcagttccttagtgactctaaataaagtaacagcagacatcgggctggggagtgactccgtgtgtgcccggccctcgtctcaccgcataaagtcttttgactcccttggatcacagtctttgcacactcggacttcaaaactgttccagggccagtatcggagtttggacatgaccgataatagcaacaatcaactggtagtaagagcaaagtttaacttccagcagaccaatgaggacgagctttccttctcaaaaggagacgtcatccatgtcacccgtgtggaagagggaggctggtgggagggcacactcaacggccggaccggctggttccccagcaactacgtgcgcgaggtcaaggccagcgagaagcctgtgtctcccaaatcaggaacactgaagagccctcccaaaggatttgatacgactgccataaacaaaagctattacaatgtggtgctacagaatattttagaaacagaaaatgaatattctaaagaacttcagactgtgctttcaacgtacctacggccattgcagaccagtgagaagttaagttcagcaaacatttcatatttaatgggaaatctagaagaaatatgttctttccagcaaatgctcgtacagtctttagaagaatgcaccaagttgcccgaagctcagcagagagtcggaggctgctttttaaacctgatgccacagatgaaaaccctgtacctcacgtattgtgccaatcacccttctgcagtgaatgtcctcacggaacacagtgaggagttgggggagttcatggagaccaaaggtgccagcagccctgggattctcgtgctgaccacgggcctgagcaaacccttcatgcgcctggataaataccctacgctgctcaaagagctcgagagacacatggaggattatcatacagatagacaagatattcaaaaatccatggctgccttcaaaaacctttcagcccaatgtcaagaagtccggaagaggaaagagcttgagctgcagatcctgacggaagccatccggaactgggagggcgatgacattaaaactctgggcaacgtcacttacatgtcccaggtcctgattcagtgtgccggaagtgaggaaaagaatgaaagatatcttctactcttcccaaatgttttgctaatgttgtctgccagtcctaggatgagtggctttatctatcagggaaagcttccaacgacaggaatgacaatcacaaagcttgaggacagtgaaaatcatagaaatgcatttgaaatatcagggagcatgattgagcggatattagtgtcgtgcaacaaccagcaggatctgcaggaatgggtggagcacctacagaagcaaacgaaggtcacgtctgtgggaaaccccaccataaagcctcattcagtgccatctcataccctcccctcccacccggtcactccgtccagcaagcacgcagacagcaagcccgcgccgctgacgcccgcctaccacacgctgccccacccctcccaccacggcaccccgcacaccaccatcaactggggacccctggagcctccgaaaacacccaagccctggagcctgagctgcctgcggcccgcgcctcccctccggccctcagctgctctctgctacaaggaggatcttagtaagagccctaagaccatgaaaaagctgctgcccaagcgcaaacctgaacggaagcctatgaggagttcgcgtcccggaaaagcacagctgctttggaagaagatgctcagattctgaaagtcattgaagcttactgcaccagcgccaaaacaaggcaaacactcaattcaagttcacgcaaagaatctgctccacaagttttgcttccagaagaagagaaaattatagtggaagaaactaaaagtaatggtcagacagtgatagaagaaaagagtcttgtggataccgtatatgcattaaaggatgaagttcaagaattaagacaggacaacaaaaagatgaagaaatctctagaggaagaacagagagcccgcaaagacctggagaagctggtgaggaaagtcctgaagaacatgaatgatcctgcctgggatgagaccaatctataagggatgtcctcagttctttctgttgaagaccagttctgaggtgaagctgggcacccctgacccaagtcggggtgcactcaggaccacagggcagggctgggtggggcgccaccttgctctctgtatatagaaaagctggagcttattctgcgaatggagacgatcaaaccatgactgatgaatccagacaggagggattgactctgaggacctgagctacatcaatccactctgtgaacatctcagttacctcattctgcaataagttcagtgactgactaaaagtcttgtttttccagactttgaattgaatatataaatattatatatacatgtttcttgtaaatatcccattttgaatgcatacctgtggtggttctgtccgggctaatccccatgctagaatgtcctttccagctacgtgaataagaagtcccatgcccgcatccaccggaagcagaagcctggtggatgcctggttcgttccgcagcaccagggcctccaccgtgctgtggcagcaccccccatgtcggtatttctaaataaccttatttatacctgcagagatacacttcagtcccattcagaagtcttctcttaaagcagcattacagtcccagacctgcgggtttctgagggcaacttgctggctgacagactcagtcttgacctcaaggaaggcccatacggcactgccgcatccacctagaggtgtttgctcttgtccgctgtctgagtactgtgattctcagatgagtttgctgcgttttgggaggacacagacggttctgtataggctagttcagtaacaacaaaatacactgttttgtcttccctcaaagagagatcttactagaacctgtaaatagaatgtattatttattataagtcactgcagctgatgaaaacagatggaggccatgctgcaggctgatactgatgggtggagttttgtcatcaggccagcctcatcccgaggtctcctccaccattggccgtagccagcaggcttcagtgctcaccgaaagtaaaatcccctccttcagcaagaataaagcaatatacaccttaggttccactaagtaacataggcataagcagggaacgtttcccccactgtgttccagtgcagaggagacgaagcctgtcctcaccgcggctcgctgggcccaggctggctctggaaagcctgtgcggtcctgggcaggaagcccggcccgtggagcaggttttcgttctgcttcagcaataaataagggtgaccacagggactttgcttttggtttcctttcctgtgaaaaggttggttttaaagtgagatacacttttccgtagaacaagtgttctatctttaaaaacccaaattgcagcaccgtggattactggtctcagaacaactcattgcgcatcagatttgactctctgattttctgtctattggccaaattgccctttaactgcacctgaatcctttgtgtactgatgcctttgagctgggcaccttgggagagtgttgtgttgctgtttacggttcttccttgcccttgctaattacagtctctggtgcccagcaagcccctttggcttccttccgtgactggtcacgttgtctgcctgggctcagcgtggacctgccccatgctgcagaacctggcctcacctggacttttcactagaattgccagcttcctcaacttagcagatcattcactcatgcgggcacaagcaaagatcaacactttcttttttggtaagcttgagttttacaagttattttttggtgatgcgtaagacattgcagtgggaaaccattcaacttgagtttattggagtttgctgttgtagcaggttttaactcaggaacaactcttgtctgatctctccgcccctctgccgggaggcgacattaactgtcctctcggagccggtagcgttgctgtccgagtccccaggacggatctcctgcagacctgccttaatgctcagatcgaagtatttcacaagaatacttgtgtttttaacagcccttcccctggacggtgcggccatgagggcctcatgttacggcattgccttttctttctgtggatccagtatcttcctcggctttttagggagcaggaaaaatgcgtctgagagcaactctttttaaaaacctgccctgttgtatataactgtgtctgtttcaccgtgtgacctcccaagggggtgggaacttgatataaacgtttaaaggggccacgatttgcccgagggttactcctttgctctcaccttgtatggatgaggagatgaagccatttcttatcctgtagatgtgaagcactttcagttttcagcgatgttggaatgtagcatcagaagctcgttccttcacactcagtggcgtctgtgcttgtccacatgcgctgggcgtctgggaccttgaatgcctgccctggttgtgtggactccttaatgccaatcatttcttcacttctctgggacacccagggcgcctgttgacaagtgtggagaaactcctaatttaaatgtcacagacaatgtcctagtgttgactactacaatgttgatgctacactgttgtaattattaaactgattatttttcttatgtc

SEQ ID NO: 3690 - DNA, 6650 bp, Homo sapiens
  source 1..6650: mol_type = genomic DNA
gctggttccccttccgagcgtccgcgccccgcatgcgcagtctgccccggcggtctccgtttgtttgaacaggaaggcggacatattagtccctctcagcccccctcgccccaccccccaggcattcgccgccgcgactcgccctttccccggctgggaccgcagcccctcccagaagctcccccatcagcagccgccgggacccaactatcgtcttcctcttcgcccgctctccagcctttcctctgctaagtctccatcgggcatcgacctcgccctgccccaccggacaccgtagcagcagccccagcagcgacgggacaaaatgggagagtgaggctgtcctgcgtggaccagctcgtggccgagactgatcggtgcgtcgggccgggccgagtagagccggggacgcggggctagaccgtctacagcgcctctgagcggagcgggcccggcccgtggcccgagcggcggccgcagctggcacagctcctcacccgccctttgctttcgcctttcctcttctccctcccttgttgcccggagggagtctccaccctgcttctctttctctacccgctcctgcccatctcgggacggggacccctccatggcgacggcggccggggcccgctagactgaagcacctcgccggagcgacgaggctggtggcgacggcgctgtcggctgtcgtgaggggctgccgggtgggatgcgactttgggcgtccgagcggctgtgggtcgctgttgcccccggcccggggtctggagagcggaggtcccctcagtgaggggaagacgggggaaccgggcgcacctggtgaccctgaggttccggctcctccgccccgcggctgcgaacccaccgcggaggaagttggttgaaattgctttccgctgctggtgctggtaagagggcattgtcacagcagcagcaacatgtcgactggggacagttttgagactcgatttgaaaaaatggacaacctgctgcgggatcccaaatcggaagtgaattcggattgtttgctggatggattggatgctttggtatatgatttggattttcctgccttaagaaaaaacaaaaatattgacaactttttaagcagatataaagacacaataaataaaatcagagatttacgaatgaaagctgaagattatgaagtagtgaaggtgattggtagaggtgcatttggagaagttcaattggtaaggcataaatccaccaggaaggtatatgctatgaagcttctcagcaaatttgaaatgataaagagatctgattctgcttttttctgggaagaaagggacatcatggcttttgccaacagtccttgggttgttcagcttttttatgcattccaagatgatcgttatctctacatggtgatggaatacatgcctggtggagatcttgtaaacttaatgagcaactatgatgtgcctgaaaaatgggcacgattctatactgcagaagtagttcttgcattggatgcaatccattccatgggttttattcacagagatgtgaagcctgataacatgctgctggataaatctggacatttgaagttagcagattttggtacttgtatgaagatgaataaggaaggcatggtacgatgtgatacagcggttggaacacctgattatatttcccctgaagtattaaaatcccaaggtggtgatggttattatggaagagaatgtgactggtggtcggttggggtatttttatacgaaatgcttgtaggtgatacacctttttatgcagattctttggttggaacttacagtaaaattatgaaccataaaaattcacttacctttcctgatgataatgacatatcaaaagaagcaaaaaaccttatttgtgccttccttactgacagggaagtgaggttagggcgaaatggtgtagaagaaatcaaacgacatctcttcttcaaaaatgaccagtgggcttgggaaacgctccgagacactgtagcaccagttgtacccgatttaagtagtgacattgatactagtaattttgatgacttggaagaagataaaggagaggaagaaacattccctattcctaaagctttcgttggcaatcaactaccttttgtaggatttacatattatagcaatcgtagatacttatcttcagcaaatcctaatgataacagaactagctccaatgcagataaaagcttgcaggaaagtttgcaaaaaacaatctataagctggaagaacagctgcataatgaaatgcagttaaaagatgaaatggagcagaagtgcagaacctcaaacataaaactagacaagataatgaaagaattggatgaagagggaaatcaaagaagaaatctagaatctacagtgtctcagattgagaaggagaaaatgttgctacagcatagaattaatgagtaccaaagaaaagctgaacaggaaaatgagaagagaagaaatgtagaaaatgaagtttctacattaaaggatcagttggaagacttaaagaaagtcagtcagaattcacagcttgctaatgagaagctgtcccagttacaaaagcagctagaagaagccaatgacttacttaggacagaatcggacacagctgtaagattgaggaagagtcacacagagatgagcaagtcaattagtcagttagagtccctgaacagagagttgcaagagagaaatcgaattttagagaattctaagtcacaaacagacaaagattattaccagctgcaagctatattagaagctgaacgaagagacagaggtcatgattctgagatgattggagaccttcaagctcgaattacatctttacaagaggaggtgaagcatctcaaacataatctcgaaaaagtggaaggagaaagaaaagaggctcaagacatgcttaatcactcagaaaaggaaaagaataatttagagatagatttaaactacaaacttaaatcattacaacaacggttagaacaagaggtaaatgaacacaaagtaaccaaagctcgtttaactgacaaacatcaatctattgaagaggcaaagtctgtggcaatgtgtgagatggaaaaaaagctgaaagaagaaagagaagctcgagagaaggctgaaaatcgggttgttcagattgagaaacagtgttccatgctagacgttgatctgaagcaatctcagcagaaactagaacatttgactggaaataaagaaaggatggaggatgaagttaagaatctaaccctgcaactggagcaggaatcaaataagcggctgttgttacaaaatgaattgaagactcaagcatttgaggcagacaatttaaaaggtttagaaaagcagatgaaacaggaaataaatactttattggaagcaaagagattattagaatttgagttagctcagcttacgaaacagtatagaggaaatgaaggacagatgcgggagctacaagatcagcttgaagctgagcaatatttctcgacactttataaaacccaggtaaaggaacttaaagaagaaattgaagaaaaaaacagagaaaatttaaagaaaatacaggaactacaaaatgaaaaagaaactcttgctactcagttggatctagcagaaacaaaagctgagtctgagcagttggcgcgaggccttctggaagaacagtattttgaattgacgcaagaaagcaagaaagctgcttcaagaaatagacaagagattacagataaagatcacactgttagtcggcttgaagaagcaaacagcatgctaaccaaagatattgaaatattaagaagagagaatgaagagctaacagagaaaatgaagaaggcagaggaagaatataaactggagaaggaggaggagatcagtaatcttaaggctgcctttgaaaagaatatcaacactgaacgaacccttaaaacacaggctgttaacaaattggcagaaataatgaatcgaaaagattttaaaattgatagaaagaaagctaatacacaagatttgagaaagaaagaaaaggaaaatcgaaagctgcaactggaactcaaccaagaaagagagaaattcaaccagatggtagtgaaacatcagaaggaactgaatgacatgcaagcgcaattggtagaagaatgtgcacataggaatgagcttcagatgcagttggccagcaaagagagtgatattgagcaattgcgtgctaaacttttggacctctcggattctacaagtgttgctagttttcctagtgctgatgaaactgatggtaacctcccagagtcaagaattgaaggttggctttcagtaccaaatagaggaaatatcaaacgatatggctggaagaaacagtatgttgtggtaagcagcaaaaaaattttgttctataatgacgaacaagataaggagcaatccaatccatctatggtattggacatagataaactgtttcacgttagacctgtaacccaaggagatgtgtatagagctgaaactgaagaaattcctaaaatattccagatactatatgcaaatgaaggtgaatgtagaaaagatgtagagatggaaccagtacaacaagctgaaaaaactaatttccaaaatcacaaaggccatgagtttattcctacactctaccactttcctgccaattgtgatgcctgtgccaaacctctctggcatgtttttaagccaccccctgccctagagtgtcgaagatgccatgttaagtgccacagagatcacttagataagaaagaggacttaatttgtccatgtaaagtaagttatgatgtaacatcagcaagagatatgctgctgttagcatgttctcaggatgaacaaaaaaaatgggtaactcatttagtaaagaaaatccctaagaatccaccatctggttttgttcgtgcttcccctcgaacgctttctacaagatccactgcaaatcagtctttccggaaagtggtcaaaaatacatctggaaaaactagttaaccatgtgactgagtgccctgtggaatcgtgtgggatgctacctgataaaccaggcttctttaaccatgcagagcagacaggctgtttctttgacacaaatatcacaggcttcagggttaagattgctgtttttctgtccttgctttggcacaacacactgagggttttttttattgcgggtttgcctacaggtagattagattaattattactatgtaatgcaagtacagttgggggaaagcttaggtagatatattttttttaaaaggtgctgcctttttggatttataagaaaatgcctgtcagtcgtgatagaacagagttttcctcatatgagtaagaggaagggactttcactttcaagtggaacagccatcactatcaagatcagctcatggaaggagtaaagaaaatatctcaaaatgagacaaactgaagttttgttttttttttaatgacttaagtttttgtgctcttgcaagactatacaaaactattttaagaaagcagtgatatcacttgaacttcagtgccctcactgtagaatttaaaagccttactgttgattgcccatgttggacttgatggagaaattaaatatctttcattatgctttacaaaatactgtatatgtttcagcaagtttggggaatgggagaggacaaaaaaaagttacatttaatctatgcatttttgccaagccatattgagttattttactactagagacattaggaaactaactgtacaaaagaaccaagtttaaaagcattttgtggggtacatcatttctataattgtataatgtatttctttgtggttttaaatgataaagacattaagttaacaaacatataagaaatgtatgcactgtttgaaatgtaaattattcttagaacactttcaatgggggttgcattgtccttttagtgccttaatttgagataattattttactgccatgagtaagtatagaaatttcaaaaaatgtattttcaaaaaattatgtgtgtcagtgagtttttcattgataattggtttaatttaaaatatttagaggtttgttggactttcataaattgagtacaatctttgcatcaaactacctgctacaataatgactttataaaactgcaaaaaatgtagaaggttgcaccaacataaaaaggaaatatggcaatacatccatgatgttttccagttaacataggaattaccagataaatactgttaaactcttgtccagtaacaagagttgattcatatggacagtatgatttattgtttatttttttaaccaaatacctcctcagtaatttataatggctttgcagtaatgtgtatcagataagaagcactggaaaaccgatcgtctctaggatgatatgcatgtttcaagtggtattgaaagccgcactgatggatatgtaataataaacatatctgttattaatatactaatgactctgtgctcatttaatgagaaataaaagtaatttatggatgggtatctttaatttttactgcaatgtgttttctcatggctgaaatgaatggaaaacatacttcaaattagtctctgattgtatataaatgtttgtgaaattccatggttagattaaagtgtatttttaaaagataaaa

SEQ ID NO: 3691 - DNA, 1498 bp, Homo sapiens
  source 1..1498: mol_type = genomic DNA
gtatttgggacatgtaagtggagaggcatgaacctgattcatttcctgatccagtgatgctcccagcccacccccaaacagacacagcgtagcccgggccagctcttaaggagttcaggagtgagaagaggccctcagagatctgacagcctaggagtgcgtggacaccacctcagcccactgagcaggagtcacagcacgaagaccaagcgcaaagcgacccctgccctccatcctgactgctcctcctaagagagatggcaccggccagagcaggattctgcccccttctgctgcttctgctgctggggctgtgggtggcagagatcccagtcagtgccaagcccaagggcatgacctcatcacagtggtttaaaattcagcacatgcagcccagccctcaagcatgcaactcagccatgaaaaacattaacaagcacacaaaacggtgcaaagacctcaacaccttcctgcacgagcctttctccagtgtggccgccacctgccagacccccaaaatagcctgcaagaatggcgataaaaactgccaccagagccacggggccgtgtccctgaccatgtgtaagctcacctcagggaagcatccgaactgcaggtacaaagagaagcgacagaacaagtcttacgtagtggcctgtaagcctccccagaaaaaggactctcagcaattccacctggttcctgtacacttggacagagtcctttaggtttccagactggcttgctctttggctgaccttcaattccctctccaggactccgcaccactcccctacacccagagcattctcttcccctcatctcttggggctgttcctggttcagcctctgctgggaggctgaagctgacactctggtgagctgagctctagagggatggcttttcatctttttgttgctgttttcccagatgcttatccccaagaaacagcaagctcaggtctgtgggttccctggtctatgccattgcacatgtctcccctgccccctggcattagggcagcatgacaaggagaggaaataaatggaaagggggcatatgggatttgtggacacagctgtttctgttcctgaactagaagtcttccccagctctgacgtggcagtgaggtgacctgaaggaaagaaaaatataaataaataccacttcatatttgtatagaatcctctaatcccttgtgacatagacttgacagggattgtatgccttctttatggatgaggaaattaaggttttagaaagcttaatgaattaaagagcttgtctaattagttagtagcagaacctggacttgaacctaggtctccttgctctaaatacagtgtaccttctactctaccagttgcgcaagaaagaagtcactgttacagaggcaagcggtgaactaggtaagagttcactcatgaagaaacgagtgctctgaagagccagttaccctgtgttggctgcaataaaggtcattacctctctagccaa

SEQ ID NO: 3692 - DNA, 922 bp, Homo sapiens
  source 1..922: mol_type = genomic DNA
agcccgggccagctcttaaggagttcaggagtgagaagaggccctcagagatctgacagcctaggagtgcgtggacaccacctcagcccactgagcaggagtcacagcacgaagaccaagcgcaaagcgacccctgccctccatcctgactgctcctcctaagagagatggcaccggccagagcaggattctgcccccttctgctgcttctgctgctggggctgtgggtggcagagatcccagtcagtgccaagcccaagggcatgacctcatcacagtggtttaaaattcagcacatgcagcccagccctcaagcatgcaactcagccatgaaaaacattaacaagcacacaaaacggtgcaaagacctcaacaccttcctgcacgagcctttctccagtgtggccgccacctgccagacccccaaaatagcctgcaagaatggcgataaaaactgccaccagagccacggggccgtgtccctgaccatgtgtaagctcacctcagggaagcatccgaactgcaggtacaaagagaagcgacagaacaagtcttacgtagtggcctgtaagcctccccagaaaaaggactctcagcaattccacctggttcctgtacacttggacagagtcctttaggtttccagactggcttgctctttggctgaccttcaattccctctccaggactccgcaccactcccctacacccagagcattctcttcccctcatctcttggggctgttcctggttcagcctctgctgggaggctgaagctgacactctgttgcgcaagaaagaagtcactgttacagaggcaagcggtgaactaggtaagagttcactcatgaagaaacgagtgctctgaagagccagttaccctgtgttggctgcaataaaggtcattacctctctagccaag

SEQ ID NO: 3693 - DNA, 5375 bp, Homo sapiens
  source 1..5375: mol_type = genomic DNA
ggctgcggcgggtccgggcccatgaggcgacgaaggaggcgggacggcttttacccagccccggacttccgagacagggaagctgaggacatggcaggagtgtttgacatagacctggaccagccagaggacgcgggctctgaggatgagctggaggaggggggtcagttaaatgaaagcatggaccatgggggagttggaccatatgaacttggcatggaacattgtgagaaatttgaaatctcagaaactagtgtgaacagagggccagaaaaaatcagaccagaatgttttgagctacttcgggtacttggtaaagggggctatggaaaggtttttcaagtacgaaaagtaacaggagcaaatactgggaaaatatttgccatgaaggtgcttaaaaaggcaatgatagtaagaaatgctaaagatacagctcatacaaaagcagaacggaatattctggaggaagtaaagcatcccttcatcgtggatttaatttatgcctttcagactggtggaaaactctacctcatccttgagtatctcagtggaggagaactatttatgcagttagaaagagagggaatatttatggaagacactgcctgcttttacttggcagaaatctccatggctttggggcatttacatcaaaaggggatcatctacagagacctgaagccggagaatatcatgcttaatcaccaaggtcatgtgaaactaacagactttggactatgcaaagaatctattcatgatggaacagtcacacacacattttgtggaacaatagaatacatggcccctgaaatcttgatgagaagtggccacaatcgtgctgtggattggtggagtttgggagcattaatgtatgacatgctgactggagcacccccattcactggggagaatagaaagaaaacaattgacaaaatcctcaaatgtaaactcaatttgcctccctacctcacacaagaagccagagatctgcttaaaaagctgctgaaaagaaatgctgcttctcgtctgggagctggtcctggggacgctggagaagttcaagctcatccattctttagacacattaactgggaagaacttctggctcgaaaggtggagcccccctttaaacctctgttgcaatctgaagaggatgtaagtcagtttgattccaagtttacacgtcagacacctgtcgacagcccagatgactcaactctcagtgaaagtgccaatcaggtctttctgggttttacatatgtggctccatctgtacttgaaagtgtgaaagaaaagttttcctttgaaccaaaaatccgatcacctcgaagatttattggcagcccacgaacacctgtcagcccagtcaaattttctcctggggatttctggggaagaggtgcttcggccagcacagcaaatcctcagacacctgtggaatacccaatggaaacaagtggcatagagcagatggatgtgacaatgagtggggaagcatcggcaccacttccaatacgacagccgaactctgggccatacaaaaaacaagcttttcccatgatctccaaacggccagagcacctgcgtatgaatctatgacagagcaatgcttttaatgaatttaaggcaaaaaaggtggagagggagatgtgtgagcatcctgcaaggtgaaacgactcaaaatgacagtttcagagagtcaatgtcattacatagaacacttcagacacaggaaaaataaacgtggattttaaaaaatcaatcaatggtgcaaaaaaaaacttaaagcaaaatagtattgctgaactcttaggcacatcaattaattgattcctcgcgacatcttctcaaccttatcaaggattttcatgttgatgactcgaaactgacagtattaagggtaggatgttgcttctgaatcactgttgagttctgattgtgttgaagaagggttatcctttcattaggcaaagtacaaaattgcctataatacttgcaactaaggacaaattagcatgcaagcttggtcaaactttttccagcaaaatggaagcaaagacaaaagaaacttaccaattgatgttttacgtgcaaacaacctgaatcttttttttatataaatatatatttttcaaatagatttttgattcagctcattatgaaaaacatcccaaactttaaaatgcgaaattattggttggtgtgaagaaagccagacaacttctgtttcttctcttggtgaaataataaaatgcaaatgaatcattgttaaccacagctgtggctcgtttgagggattggggtggacctggggtttattttcagtaacccagctgcaatacctgtctgtaatatgagaaaaaaaaaatgaatctatttaatcatttctacttgcagtactgctatgtgctaagcttaactggaagccttggaatgggcataagttgtatgtcctacatttcatcattgtcccgggcctgcattgcactggaaaaaaaaatcgccacctgttcttacaccagtatttggttcaagacaccaaatgtcttcagcccatggctgaagaacaacagaagagagtcaggataaaaaatacatactgtggtcggcaaggtgagggagatagggatatccaggggaagagggtgttgctgtggcccactctctgtctaatctctttacagcaaattggtaagattttcagttttacttctttctactgtttctgctgtctaccttccttatatttttttcctcaacagttttaaaaagaaaaaaaggtctatttttttttctcctatacttgggctacattttttgattgtaaaaatatttgatggccttttgatgaatgtcttccacagtaaagaaaacttagtggcttaatttaggaaacatgttaacaggacactatgtttttgaaattgtaacaaaatctacataaatgatttacaggttaaaagaataaaaataaaggtaactttacctttcttaaatatttcctgccttaaagagagcatttccatgactttagctggtgaaagggtttaatatctgcagagctttataaaaatatatttcagtgcatactggtataatagatgatcatgcagttgcagttgagttgtatcaccttttttgtttgtcttttataatgtcttcagtctgagtgtgcaaagtcaatttgtaatattttgcaaccctaggatttttttaaatagatgctgcttgctatgttttcaaacctttttgagccataggatccaagccataaaattctttatgcatgttgaattcagtcagaaaagagcaaggctttgctttttgaaattgcaactcaaatgagatgggatgaaatcctatgacagtaagcaaaaacagaaccatgaaaaatgattggacatacaccttttcaattgtggcaataattgaaagaatcgataaaagttcatctttggacagaaagcctttaaaaaaaaaatcactccctcttccccctcctcccttattgcagcagcctactgagaactttgactgttgctggtaaattagaagctacaataataattaagggcagaaattatacttaaaaagtgcagatccttgttctttgacaatttgtgatgtctgaaaaaacagaacccgaaaagctatggtgatatgtacaggcattatttcagactgtaaatggcttgtgatactcttgatacttgttttcaaatatgtttactaactgtagtgttgactgcctgaccaaattccagtgaaacttatacaccaaaatattcttcctaggtcctatttgctagtaacatgagcactgtgattggctggctataaccaccccagttaaaccattttcataattagtagtgccagcaatagtggcaaacactgcaacttttctgcataaaaagcattaattgcacagctaccatccacacaaatacatagtttttctgacttcacatttattaagtgaaatttatttcccatgctgtggaaagtttattgagaacttgtttcataaatggatatccctactatgactgtgaaaacatgtcaagtgtcacattagtgtcacagacagaaagcacacacctatgcaatatggcttatctatatttatttgtaaaaatccaagcatagtttaaaatatgatgtcgatattactagtcttgagtttctaagagggttctttatgttataccaggtaagtgtataaaagagattaagtgcttttttttcatcacttgattattttctttaaaatcagctattacaggatatttttttattttatacatgctgttttttaattaaaatataatcactgaagtttactaatttgattttataaggtttgtagcattacagaataactaaactgggatttataaaccagctgtgattaacaatgtaaagtattaattattgaactttgaaccagatttttaggaaaattatgttctttttccccctttatggtcttaactaatttgaatccttcaagaaggatttttccatactattttttaagatagaagataatttgtgggcaggggtggaggatgcatgtatgatactccataaattcaacattctttactataggtaatgaatgattataaacaagatgcatcttagatagtattaatatactgagccttggattatatatttaatataggacctattttgaatattcagttaatcatatggttcctagcttacaagggctagatctaagattattcccatgagaaatgttgaatttatgaagaatagattttaaggctttgaaaatggttaatttctcaaaaacatcaatgtccaaacatctaccttttttcataggagtagacactagcaagctggacaaactatcacaaaagtatttgtcacacataacctgtggtctgttgctgattaatacagtactttttcttgtgtgattcttaacattatagcacaagtattatctcagtggattatccggaataacatctgaaagatgggttcatctatgtttgtgtttgctctttaaactattgtttctcctatcccaagttcgctttgcatctatcagtaaataaaattcttcagctgccttattaggagtgctatgagggtaacacctgttctgcttttcatcttgtatttagttgactgtattatttgatttcggattgaatgaatgtaaatagaaattaaatgcaaatttgaatgaacataaatagaagtgatttatttttttattatcttaaagataggaaggaattagtatacgtatcaggtgtataaatggtttaaatttattttaacatgtcagatgtgttcaagttgtcatataaataaactatgtatgtaaggaa

SEQ ID NO: 3694 - DNA, 2046 bp, Homo sapiens
  source 1..2046: mol_type = genomic DNA
agggaagctgaggacatggcaggagtgtttgacatagacctggaccagccagaggacgcgggctctgaggatgagctggaggagggggaagcgctcagctgttagaagtgacagctgaaaacttctgtcgggagtagcactgccgctgctgttacagccaccaggagttttatttcgggagcaagggggctctgctgcatcttccaatcttccaggggtcagttaaatgaaagcatggaccatgggggagttggaccatatgaacttggcatggaacattgtgagaaatttgaaatctcagaaactagtgtgaacagagggccagaaaaaatcagaccagaatgttttgagctacttcgggtacttggtaaagggggctatggaaaggtttttcaagtacgaaaagtaacaggagcaaatactgggaaaatatttgccatgaaggtgcttaaaaaggcaatgatagtaagaaatgctaaagatacagctcatacaaaagcagaacggaatattctggaggaagtaaagcatcccttcatcgtggatttaatttatgcctttcagactggtggaaaactctacctcatccttgagtatctcagtggaggagaactatttatgcagttagaaagagagggaatatttatggaagacactgcctgcttttacttggcagaaatctccatggctttggggcatttacatcaaaaggggatcatctacagagacctgaagccggagaatatcatgcttaatcaccaaggtcatgtgaaactaacagactttggactatgcaaagaatctattcatgatggaacagtcacacacacattttgtggaacaatagaatacatggcccctgaaatcttgatgagaagtggccacaatcgtgctgtggattggtggagtttgggagcattaatgtatgacatgctgactggagcacccccattcactggggagaatagaaagaaaacaattgacaaaatcctcaaatgtaaactcaatttgcctccctacctcacacaagaagccagagatctgcttaaaaagctgctgaaaagaaatgctgcttctcgtctgggagctggtcctggggacgctggagaagttcaagctcatccattctttagacacattaactgggaagaacttctggctcgaaaggtggagcccccctttaaacctctgttgcaatctgaagaggatgtaagtcagtttgattccaagtttacacgtcagacacctgtcgacagcccagatgactcaactctcagtgaaagtgccaatcaggtctttctgggttttacatatgtggctccatctgtacttgaaagtgtgaaagaaaagttttcctttgaaccaaaaatccgatcacctcgaagatttattggcagcccacgaacacctgtcagcccagtcaaattttctcctggggatttctggggaagaggtgcttcggccagcacagcaaatcctcagacacctgtggaatacccaatggaaacaagtggcatagagcagatggatgtgacaatgagtggggaagcatcggcaccacttccaatacgacagccgaactctgggccatacaaaaaacaagcttttcccatgatctccaaacggccagagcacctgcgtatgaatctatgacagagcaatgcttttaatgaatttaaggcaaaaaaggtggagagggagatgtgtgagcatcctgcaaggtgaaacgactcaaaatgacagtttcagagagtcaatgtcattacatagaacacttcagacacaggaaaaataaacgtggattttaaaaaatcaatcaatggtgcaaaaaaaaacttaaagcaaaatagtattgctgaactcttaggcacatcaattaattgattcctcgcgacatcttctcaaccttatcaaggattttcatgttgatgactcgaaactgacagtattaagggtaggatgttgcttctgaatcactgttgagttctgattgtgttgaagaagggttatcctttcattaggcaaagtacaaaattgcctataata

SEQ ID NO: 3695 - DNA, 1982 bp, Homo sapiens
  source 1..1982: mol_type = genomic DNA
tggcggcagcggctgtggtggctgcggcgggtccgggcccatgaggcgacgaaggaggcgggacggcttttacccagccccggacttccgagacagggaagctgaggacatggcaggagtgtttgacatagacctggaccagccagaggacgcgggctctgaggatgagctggaggaggggggtcagttaaatgaaagcatggaccatgggggagttggaccatatgaacttggcatggaacattgtgagaaatttgaaatctcagaaactagtgtgaacagagggccagaaaaaatcagaccagaatgttttgagctacttcgggtacttggtaaagggggctatggaaaggtttttcaagtacgaaaagtaacaggagcaaatactgggaaaatatttgccatgaaggtgcttaaaaaggcaatgatagtaagaaatgctaaagatacagctcatacaaaagcagaacggaatattctggaggaagtaaagcatcccttcatcgtggatttaatttatgcctttcagactggtggaaaactctacctcatccttgagtatctcagtggaggagaactatttatgcagttagaaagagagggaatatttatggaagacactgcctgcttttacttggcagaaatctccatggctttggggcatttacatcaaaaggggatcatctacagagacctgaagccggagaatatcatgcttaatcaccaaggtcatgtgaaactaacagactttggactatgcaaagaatctattcatgatggaacagtcacacacacattttgtggaacaatagaatacatggcccctgaaatcttgatgagaagtggccacaatcgtgctgtggattggtggagtttgggagcattaatgtatgacatgctgactggagcacccccattcactggggagaatagaaagaaaacaattgacaaaatcctcaaatgtaaactcaatttgcctccctacctcacacaagaagccagagatctgcttaaaaagctgctgaaaagaaatgctgcttctcgtctgggagctggtcctggggacgctggagaagttcaagctcatccattctttagacacattaactgggaagaacttctggctcgaaaggtggagcccccctttaaacctctgttgcaatctgaagaggatgtaagtcagtttgattccaagtttacacgtcagacacctgtcgacagcccagatgactcaactctcagtgaaagtgccaatcaggtctttctgggttttacatatgtggctccatctgtacttgaaagtgtgaaagaaaagttttcctttgaaccaaaaatccgatcacctcgaagatttattggcagcccacgaacacctgtcagtactgctatgtgctaagcttaactggaagccttggaatgggcataagttgtatgtcctacatttcatcattgtcccgggcctgcattgcactggaaaaaaaaatcgccacctgttcttacaccagtatttggttcaagacaccaaatgtcttcagcccatggctgaagaacaacagaagagagtcaggataaaaaatacatactgtggtcggcaaggtgagggagatagggatatccaggggaagagggtgttgctgtggcccactctctgtctaatctctttacagcaaattggtaagattttcagttttacttctttctactgtttctgctgtctaccttccttatatttttttcctcaacagttttaaaaagaaaaaaaggtctatttttttttctcctatacttgggctacattttttgattgtaaaaatatttgatggccttttgatgaatgtcttccacagtaaagaaaacttagtggcttaatttaggaaacatgttaacaggacactatgtttttgaaattgtaacaaaatctacataaatgatttacaggttaaaagaataaaaataaaggtaactttacctttcttaaatat

SEQ ID NO: 3696 - DNA, 1913 bp, Homo sapiens
  source 1..1913: mol_type = genomic DNA
ctaagcagccggtgatggcggcagcggctgtggtggctgcggcgggtccgggcccatgaggcgacgaaggaggcgggacggcttttacccagccccggacttccgagacagggaagctgaggacatggcaggagtgtttgacatagacctggaccagccagaggacgcgggctctgaggatgagctggaggaggggggtcagttaaatgaaagcatggaccatgggggagttggaccatatgaacttggcatggaacattgtgagaaatttgaaatctcagaaactagtgtgaacagagggccagaaaaaatcagaccagaatgttttgagctacttcgggtacttggtaaagggggctatggaaaggcaatgatagtaagaaatgctaaagatacagctcatacaaaagcagaacggaatattctggaggaagtaaagcatcccttcatcgtggatttaatttatgcctttcagactggtggaaaactctacctcatccttgagtatctcagtggaggagaactatttatgcagttagaaagagagggaatatttatggaagacactgcctgcttttacttggcagaaatctccatggctttggggcatttacatcaaaaggggatcatctacagagacctgaagccggagaatatcatgcttaatcaccaaggtcatgtgaaactaacagactttggactatgcaaagaatctattcatgatggaacagtcacacacacattttgtggaacaatagaatacatggcccctgaaatcttgatgagaagtggccacaatcgtgctgtggattggtggagtttgggagcattaatgtatgacatgctgactggagcacccccattcactggggagaatagaaagaaaacaattgacaaaatcctcaaatgtaaactcaatttgcctccctacctcacacaagaagccagagatctgcttaaaaagctgctgaaaagaaatgctgcttctcgtctgggagctggtcctggggacgctggagaagttcaagctcatccattctttagacacattaactgggaagaacttctggctcgaaaggtggagcccccctttaaacctctgttgcaatctgaagaggatgtaagtcagtttgattccaagtttacacgtcagacacctgtcgacagcccagatgactcaactctcagtgaaagtgccaatcaggtctttctgggttttacatatgtggctccatctgtacttgaaagtgtgaaagaaaagttttcctttgaaccaaaaatccgatcacctcgaagatttattggcagcccacgaacacctgtcagcccagtcaaattttctcctggggatttctggggaagaggtgcttcggccagcacagcaaatcctcagacacctgtggaatacccaatggaaacaagtggcatagagcagatggatgtgacaatgagtggggaagcatcggcaccacttccaatacgacagccgaactctgggccatacaaaaaacaagcttttcccatgatctccaaacggccagagcacctgcgtatgaatctatgacagagcaatgcttttaatgaatttaaggcaaaaaaggtggagagggagatgtgtgagcatcctgcaaggtgaaacgactcaaaatgacagtttcagagagtcaatgtcattacatagaacacttcagacacaggaaaaataaacgtggattttaaaaaatcaatcaatggtgcaaaaaaaaacttaaagcaaaatagtattgctgaactcttaggcacatcaattaattgattcctcgcgacatcttctcaaccttatcaaggattttcatgttgatgactcgaaactgacagtattaagggtaggatgttgcttctgaatcactgttgagttctgattgtgttgaaga

SEQ ID NO: 3697 - DNA, 2369 bp, Homo sapiens
  source 1..2369: mol_type = genomic DNA
ctgtactgccaccccgctactaggaccggggcgcaaggtcctgggggtggtgctcagaggtggattcctttgcccaggcacgcccctgggaccaggcctccaaaggagaagaatggacagacctcaggggaagaagctggacttcagccgtccaaggtcttcctggtgcggaaagtcacccggcctgacagtgggcacctgtatgctatgaaggtgctgaagaaggcaacgctgaaagtacgtgaccgcgtccggaccaagatggagagagacatcctggctgatgtaaatcacccattcgtggtgaagctgcactatgccttccagaccgagggcaagctctatctcattctggacttcctgcgtggtggggacctcttcacccggctctcaaaagaggtgatgttcacggaggaggatgtgaagttttacctggctgagctggctctgggcctggatcacctgcacagcctgggtatcatttacagagacctcaagcctgagaacatccttctggatgaggagggccacatcaaactcactgactttggcctgagcaaagaggccattgaccacgagaagaaggcctattctttctgcgggacagtggagtacatggcccctgaggtcgtcaaccgccagggccactcccatagtgcggactggtggtcctatggggtgttgatgtttgagatgctgacgggctccctgcccttccaggggaaggaccggaaggagaccatgacactgattctgaaggcgaagctaggcatgccccagtttctgagcactgaagcccagagcctcttgcgggccctgttcaagcggaatcctgccaaccggctcggctccggccctgatggggcagaggaaatcaagcggcatgtcttctactccaccattgactggaataagctataccgtcgtgagatcaagccacccttcaagccagcagtggctcagcctgatgacaccttctactttgacaccgagttcacgtcccgcacacccaaggattccccaggcatcccccccagcgctggggcccatcagctgttccggggcttcagcttcgtggccaccggcctgatggaagacgacggcaagcctcgtgccccgcaggcacccctgcactcggtggtacagcaactccatgggaagaacctggtttttagtgacggctacgtggtaaaggagacaattggtgtgggctcctactctgagtgcaagcgctgtgtccacaaggccaccaacatggagtatgctgtcaaggtcattgataagagcaagcgggatccttcagaagagattgagattcttctgcggtatggccagcaccccaacatcatcactctgaaagatgtgtatgatgatggcaaacacgtgtacctggtgacagagctgatgcggggtggggagctgctggacaagatcctgcggcagaagttcttctcagagcgggaggccagctttgtcctgcacaccattggcaaaactgtggagtatctgcactcacagggggttgtgcacagggacctgaagcccagcaacatcctgtatgtggacgagtccgggaatcccgagtgcctgcgcatctgtgactttggttttgccaaacagctgcgggctgagaatgggctcctcatgacaccttgctacacagccaactttgtggcgcctgaggtgctgaagcgccagggctacgatgaaggctgcgacatctggagcctgggcattctgctgtacaccatgctggcaggatatactccatttgccaacggtcccagtgacacaccagaggaaatcctaacccggatcggcagtgggaagtttaccctcagtgggggaaattggaacacagtttcagagacagccaaggacctggtgtccaagatgctacacgtggatccccaccagcgcctcacagctaagcaggttctgcagcatccatgggtcacccagaaagacaagcttccccaaagccagctgtcccaccaggacctacagcttgtgaagggagccatggctgccacgtactccgcactcaacagctccaagcccaccccccagctgaagcccatcgagtcatccatcctggcccagcggcgagtgaggaagttgccatccaccaccctgtgaggcaccagggcattcgggccacagggcggtgctagcttgacacagtcagcatgcttcccagagggagcaggccggaaccacagggccagagggagctggaacccgaggggccggggaagctgccagcccagaacacccctaatgagggtgtgagaagtgccttctccttccccaggatggactcttctcggctcaggctctgctggtggaaagcgattcactgtataaac

SEQ ID NO: 3698 - DNA, 1963 bp, Homo sapiens
  source 1..1963: mol_type = genomic DNA
atgcagaccccagcagatttccccagggttgagagagacttggttccctgtcccagaaaggatgagggcgtcctcaaggagatctccatcacgcaccacgtcaaggctggctctgagaaggctgatccatcccatttcgagctcctcaaggttctgggccagggatcctttggcaaagtcttcctggtgcggaaagtcacccggcctgacagtgggcacctgtatgctatgaaggtgctgaagaaggcaacgctgaaagtacgtgaccgcgtccggaccaagatggagagagacatcctggctgatgtaaatcacccattcgtggtgaagctgcactatgccttccagaccgagggcaagctctatctcattctggacttcctgcgtggtggggacctcttcacccggctctcaaaagaggtgatgttcacggaggaggatgtgaagttttacctggctgagctggctctgggcctggatcacctgcacagcctgggtatcatttacagagacctcaagcctgagaacatccttctggatgaggagggccacatcaaactcactgactttggcctgagcaaagaggccattgaccacgagaagaaggcctattctttctgcgggacagtggagtacatggcccctgaggtcgtcaaccgccagggccactcccatagtgcggactggtggtcctatggggtgttgatgtttgagatgctgacgggctccctgcccttccaggggaaggaccggaaggagaccatgacactgattctgaaggcgaagctaggcatgccccagtttctgagcactgaagcccagagcctcttgcgggccctgttcaagcggaatcctgccaaccggctcggctccggccctgatggggcagaggaaatcaagcggcatgtcttctactccaccattgactggaataagctataccgtcgtgagatcaagccacccttcaagccagcagtggctcagcctgatgacaccttctactttgacaccgagttcacgtcccgcacacccaaggattccccaggcatcccccccagcgctggggcccatcagctgttccggggcttcagcttcgtggccaccggcctgatggaagacgacggcaagcctcgtgccccgcaggcacccctgcactcggtggtacaggtcattgataagagcaagcgggatccttcagaagagattgagattcttctgcggtatggccagcaccccaacatcatcactctgaaagatgtgtatgatgatggcaaacacgtgtacctggtgacagagctgatgcggggtggggagctgctggacaagatcctgcggcagaagttcttctcagagcgggaggccagctttgtcctgcacaccattggcaaaactgtggagtatctgcactcacagggggttgtgcacagggacctgaagcccagcaacatcctgtatgtggacgagtccgggaatcccgagtgcctgcgcatctgtgactttggttttgccaaacagctgcgggctgagaatgggctcctcatgacaccttgctacacagccaactttgtggcgcctgaggtgctgaagcgccagggctacgatgaaggctgcgacatctggagcctgggcattctgctgtacaccatgctggcagggtgagtgcccctggcctggacccttccccactcctgcagccctagcacttgggctgagtggtgcttgtctgataggaatggctcagccagccccgccccaggatggtctggaaatagggacatgctcctgcctccaggagctctaccttgggagtaccccatctgagggggagacacagtctcccaccgcagccccagccccagtatggaggccagagtctgtacccagaccgtgcgggcttttctgcagatatactccatttgccaacggtcccagtgacacaccagaggaaatcctaacccggatc

SEQ ID NO: 3699 - DNA, 3186 bp, Homo sapiens
  source 1..3186: mol_type = genomic DNA
ctagtgccgcggcggcggcggcggacggcccagccggagcgcgaggggctcgggggggcgcggcggttcgggtcgcagagccagggaccccaggacccgggaggcggcgcagccggggccgccggaggagcgcgggtgacctggcggcggcgagatgccgctcgcccagctcaaggagccctggccgctcatggagctagtgcctctggacccggagaatggacagacctcaggggaagaagctggacttcagccgtccaaggatgagggcgtcctcaaggagatctccatcacgcaccacgtcaaggctggctctgagaaggctgatccatcccatttcgagctcctcaaggttctgggccagggatcctttggcaaagtcttcctggtgcggaaagtcacccggcctgacagtgggcacctgtatgctatgaaggtgctgaagaaggcaacgctgaaagtacgtgaccgcgtccggaccaagatggagagagacatcctggctgatgtaaatcacccattcgtggtgaagctgcactatgccttccagaccgagggcaagctctatctcattctggacttcctgcgtggtggggacctcttcacccggctctcaaaagaggtgatgttcacggaggaggatgtgaagttttacctggctgagctggctctgggcctggatcacctgcacagcctgggtatcatttacagagacctcaagcctgagaacatccttctggatgaggagggccacatcaaactcactgactttggcctgagcaaagaggccattgaccacgagaagaaggcctattctttctgcgggacagtggagtacatggcccctgaggtcgtcaaccgccagggccactcccatagtgcggactggtggtcctatggggtgttgatgtttgagatgctgacgggctccctgcccttccaggggaaggaccggaaggagaccatgacactgattctgaaggcgaagctaggcatgccccagtttctgagcactgaagcccagagcctcttgcgggccctgttcaagcggaatcctgccaaccggctcggctccggccctgatggggcagaggaaatcaagcggcatgtcttctactccaccattgactggaataagctataccgtcgtgagatcaagccacccttcaagccagcagtggctcagcctgatgacaccttctactttgacaccgagttcacgtcccgcacacccaaggattccccaggcatcccccccagcgctggggcccatcagctgttccggggcttcagcttcgtggccaccggcctgatggaagacgacggcaagcctcgtgccccgcaggcacccctgcactcggtggtacagcaactccatgggaagaacctggtttttagtgacggctacgtggtaaaggagacaattggtgtgggctcctactctgagtgcaagcgctgtgtccacaaggccaccaacatggagtatgctgtcaaggtcattgataagagcaagcgggatccttcagaagagattgagattcttctgcggtatggccagcaccccaacatcatcactctgaaagatgtgtatgatgatggcaaacacgtgtacctggtgacagagctgatgcggggtggggagctgctggacaagatcctgcggcagaagttcttctcagagcgggaggccagctttgtcctgcacaccattggcaaaactgtggagtatctgcactcacagggggttgtgcacagggacctgaagcccagcaacatcctgtatgtggacgagtccgggaatcccgagtgcctgcgcatctgtgactttggttttgccaaacagctgcgggctgagaatgggctcctcatgacaccttgctacacagccaactttgtggcgcctgaggtgctgaagcgccagggctacgatgaaggctgcgacatctggagcctgggcattctgctgtacaccatgctggcaggatatactccatttgccaacggtcccagtgacacaccagaggaaatcctaacccggatcggcagtgggaagtttaccctcagtgggggaaattggaacacagtttcagagacagccaaggacctggtgtccaagatgctacacgtggatccccaccagcgcctcacagctaagcaggttctgcagcatccatgggtcacccagaaagacaagcttccccaaagccagctgtcccaccaggacctacagcttgtgaagggagccatggctgccacgtactccgcactcaacagctccaagcccaccccccagctgaagcccatcgagtcatccatcctggcccagcggcgagtgaggaagttgccatccaccaccctgtgaggcaccagggcattcgggccacagggcggtgctagcttgacacagtcagcatgcttcccagagggagcaggccggaaccacagggccagagggagctggaacccgaggggccggggaagctgccagcccagaacacccctaatgagggtgtgagaagtgccttctccttccccaggatggactcttctcggctcaggctctgctggtggaaagcgattcactgtataaacttttttttatgaaaaaaatggcatcaaccaccatggatttttacaagatccatttgcctttctgggagcagaaacagccattgcggccccaggaggggaactgagtcacgctggggctctctgagactctttagagcagctttgggatcccaccctggggacccccacgattggccacctgtagccatctgcacacacctccgagacagtccagtgtcacctctctcagagcatctggctgtttagcagaactcattctatccccaatcagctccttttccgttctgttctgctgggagttctagaaccacttcctgctacaggaggggtctcatgtcctgctggcttccagcttcaggcaccagcatccaccttggctctgccagtggatcccctgcggtcaggctgggcagccccagagagaggatgtggaaagcactttttggctgacttcatctggggttggcaacaggacagagttcacaggaggccagtgggcgggccatgagggacagggtcttttttcatttcttcctcagctggttactcagggttcatctgtccatggcctttctaataaactgttgagttgaa

SEQ ID NO: 3700 - DNA, 498 bp, Homo sapiens
  source 1..498: mol_type = genomic DNA
gctcagcctgatgacaccttctactttgacaccgagttcacgtcccgcacacccaaggattccccaggcatcccccccagcgctggggcccatcagctgttccggggcttcagcttcgtggccaccggcctgatggaagacgacggcaagcctcgtgccccgcaggcacccctgcactcggtggtacaggtcattgataagagcaagcgggatccttcagaagagattgagattcttctgcggtatggccagcaccccaacatcatcactctgaaagatgtgtatgatgatggcaaacacgtgtacctggtgacagagctgatgcggggtggggagctgctggacaagatcctgcggcagaagttcttctcagagcgggaggccagctttgtcctgcacaccattggcaaaactgtggagtatctgcactcacagggggttgtgcacagggacctgaagcccagcaacatcctgtatgtggacgagtccgggaatccc

SEQ ID NO: 3701 - DNA, 3023 bp, Homo sapiens
  source 1..3023: mol_type = genomic DNA
agaagtaggaagagtaacggggccctctggtcaccggcttgagccccaccatgcagaccccagcagatttccccagggttgagagagacttggttccctgtcccagaaaggatgagggcgtcctcaaggagatctccatcacgcaccacgtcaaggctggctctgagaaggctgatccatcccatttcgagctcctcaaggttctgggccagggatcctttggcaaagtcttcctggtgcggaaagtcacccggcctgacagtgggcacctgtatgctatgaaggtgctgaagaaggcaacgctgaaagtacgtgaccgcgtccggaccaagatggagagagacatcctggctgatgtaaatcacccattcgtggtgaagctgcactatgccttccagaccgagggcaagctctatctcattctggacttcctgcgtggtggggacctcttcacccggctctcaaaagaggtgatgttcacggaggaggatgtgaagttttacctggctgagctggctctgggcctggatcacctgcacagcctgggtatcatttacagagacctcaagcctgagaacatccttctggatgaggagggccacatcaaactcactgactttggcctgagcaaagaggccattgaccacgagaagaaggcctattctttctgcgggacagtggagtacatggcccctgaggtcgtcaaccgccagggccactcccatagtgcggactggtggtcctatggggtgttgatgtttgagatgctgacgggctccctgcccttccaggggaaggaccggaaggagaccatgacactgattctgaaggcgaagctaggcatgccccagtttctgagcactgaagcccagagcctcttgcgggccctgttcaagcggaatcctgccaaccggctcggctccggccctgatggggcagaggaaatcaagcggcatgtcttctactccaccattgactggaataagctataccgtcgtgagatcaagccacccttcaagccagcagtggctcagcctgatgacaccttctactttgacaccgagttcacgtcccgcacacccaaggattccccaggcatcccccccagcgctggggcccatcagctgttccggggcttcagcttcgtggccaccggcctgatggaagacgacggcaagcctcgtgccccgcaggcacccctgcactcggtggtacagcaactccatgggaagaacctggtttttagtgacggctacgtggtaaaggagacaattggtgtgggctcctactctgagtgcaagcgctgtgtccacaaggccaccaacatggagtatgctgtcaaggtcattgataagagcaagcgggatccttcagaagagattgagattcttctgcggtatggccagcaccccaacatcatcactctgaaagatgtgtatgatgatggcaaacacgtgtacctggtgacagagctgatgcggggtggggagctgctggacaagatcctgcggcagaagttcttctcagagcgggaggccagctttgtcctgcacaccattggcaaaactgtggagtatctgcactcacagggggttgtgcacagggacctgaagcccagcaacatcctgtatgtggacgagtccgggaatcccgagtgcctgcgcatctgtgactttggttttgccaaacagctgcgggctgagaatgggctcctcatgacaccttgctacacagccaactttgtggcgcctgaggtgctgaagcgccagggctacgatgaaggctgcgacatctggagcctgggcattctgctgtacaccatgctggcaggatatactccatttgccaacggtcccagtgacacaccagaggaaatcctaacccggatcggcagtgggaagtttaccctcagtgggggaaattggaacacagtttcagagacagccaaggacctggtgtccaagatgctacacgtggatccccaccagcgcctcacagctaagcaggttctgcagcatccatgggtcacccagaaagacaagcttccccaaagccagctgtcccaccaggacctacagcttgtgaagggagccatggctgccacgtactccgcactcaacagctccaagcccaccccccagctgaagcccatcgagtcatccatcctggcccagcggcgagtgaggaagttgccatccaccaccctgtgaggcaccagggcattcgggccacagggcggtgctagcttgacacagtcagcatgcttcccagagggagcaggccggaaccacagggccagagggagctggaacccgaggggccggggaagctgccagcccagaacacccctaatgagggtgtgagaagtgccttctccttccccaggatggactcttctcggctcaggctctgctggtggaaagcgattcactgtataaacttttttttatgaaaaaaatggcatcaaccaccatggatttttacaagatccatttgcctttctgggagcagaaacagccattgcggccccaggaggggaactgagtcacgctggggctctctgagactctttagagcagctttgggatcccaccctggggacccccacgattggccacctgtagccatctgcacacacctccgagacagtccagtgtcacctctctcagagcatctggctgtttagcagaactcattctatccccaatcagctccttttccgttctgttctgctgggagttctagaaccacttcctgctacaggaggggtctcatgtcctgctggcttccagcttcaggcaccagcatccaccttggctctgccagtggatcccctgcggtcaggctgggcagccccagagagaggatgtggaaagcactttttggctgacttcatctggggttggcaacaggacagagttcacaggaggccagtgggcgggccatgagggacagggtcttttttcatttcttcctcagctggttactcagggttcatctgtccatggcctttctaataaact

SEQ ID NO: 3702 - DNA, 2359 bp, Homo sapiens
  source 1..2359: mol_type = genomic DNA
ccccggactctgcctgctcctgccatggtgccgtggccctgctgggcggatggagcaggatcccaagccgccccgtctgcggctctgggccctgatcccctggcttcccaggaagcagcggcccaggatcagccagacctctctgcctgtccctggccctggctctggcccccagcgggactcggatgagggcgtcctcaaggagatctccatcacgcaccacgtcaaggctggctctgagaaggctgatccatcccatttcgagctcctcaaggttctgggccagggatcctttggcaaagtcttcctggtgcggaaagtcacccggcctgacagtgggcacctgtatgctatgaaggtgctgaagaaggcaacgctgaaagtacgtgaccgcgtccggaccaagatggagagagacatcctggctgatgtaaatcacccattcgtggtgaagctgcactatgccttccagaccgagggcaagctctatctcattctggacttcctgcgtggtggggacctcttcacccggctctcaaaagaggtgatgttcacggaggaggatgtgaagttttacctggctgagctggctctgggcctggatcacctgcacagcctgggtatcatttacagagacctcaagcctgagaacatccttctggatgaggagggccacatcaaactcactgactttggcctgagcaaagaggccattgaccacgagaagaaggcctattctttctgcgggacagtggagtacatggcccctgaggtcgtcaaccgccagggccactcccatagtgcggactggtggtcctatggggtgttgatgtttgagatgctgacgggctccctgcccttccaggggaaggaccggaaggagaccatgacactgattctgaaggcgaagctaggcatgccccagtttctgagcactgaagcccagagcctcttgcgggccctgttcaagcggaatcctgccaaccggctcggctccggccctgatggggcagaggaaatcaagcggcatgtcttctactccaccattgactggaataagctataccgtcgtgagatcaagccacccttcaagccagcagtggctcagcctgatgacaccttctactttgacaccgagttcacgtcccgcacacccaaggattccccaggcatcccccccagcgctggggcccatcagctgttccggggcttcagcttcgtggccaccggcctgatggaagacgacggcaagcctcgtgccccgcaggcacccctgcactcggtggtacagcaactccatgggaagaacctggtttttagtgacggctacgtggtaaaggagacaattggtgtgggctcctactctgagtgcaagcgctgtgtccacaaggccaccaacatggagtatgctgtcaaggtcattgataagagcaagcgggatccttcagaagagattgagattcttctgcggtatggccagcaccccaacatcatcactctgaaagatgtgtatgatgatggcaaacacgtgtacctggtgacagagctgatgcggggtggggagctgctggacaagatcctgcggcagaagttcttctcagagcgggaggccagctttgtcctgcacaccattggcaaaactgtggagtatctgcactcacagggggttgtgcacagggacctgaagcccagcaacatcctgtatgtggacgagtccgggaatcccgagtgcctgcgcatctgtgactttggttttgccaaacagctgcgggctgagaatgggctcctcatgacaccttgctacacagccaactttgtggcgcctgaggtgctgaagcgccagggctacgatgaaggctgcgacatctggagcctgggcattctgctgtacaccatgctggcaggatatactccatttgccaacggtcccagtgacacaccagaggaaatcctaacccggatcggcagtgggaagtttaccctcagtgggggaaattggaacacagtttcagagacagccaaggacctggtgtccaagatgctacacgtggatccccaccagcgcctcacagctaagcaggttctgcagcatccatgggtcacccagaaagacaagcttccccaaagccagctgtcccaccaggacctacagcttgtgaagggagccatggctgccacgtactccgcactcaacagctccaagcccaccccccagctgaagcccatcgagtcatccatcctggcccagcggcgagtgaggaagttgccatccaccaccctgtgaggcaccagggcattcgggccacagggcggtgctagcttgacacagtcagcatgcttcccagagggagcaggccgg

SEQ ID NO: 3703 - DNA, 5824 bp, Homo sapiens
  source 1..5824: mol_type = genomic DNA
gggaggcggagaaggaggcggagggagcgattgtggccccggccgcggtggccggcgcggcctgccctttgtgaccgcagctcgcgccccacgccccgcgcccatggccgccgtgccgggctccctggccacgcgtgcccgcccgcggacctgagccccgcgcctgggatgccggggatgcgcgtcccccggccctgcggctgctccgggctgggcgcggggcgatggacctgagcatgaagaagttcgccgtgcgcaggttcttctctgtgtacctgcgcaggaagtcgcgctccaagagctccagcctgagccggctcgaggaagaaggcgtcgtgaaggagatagacatcagccatcatgtgaaggagggctttgagaaggcagatccttcccagtttgagctgctgaaggttttaggacaaggatcctatggaaaggtgttcctggtgaggaaggtgaaggggtccgacgctgggcagctctacgccatgaaggtccttaagaaagccaccctaaaagttcgggaccgagtgagatcgaagatggagagagacatcttggcagaagtgaatcaccccttcattgtgaagcttcattatgcctttcagacggaaggaaagctctacctgatcctggacttcctgcggggaggggacctcttcacccggctctccaaagaggtcatgttcacggaggaggatgtcaagttctacctggctgagctggccttggctttagaccatctccacagcctggggatcatctacagagatctgaagcctgagaacatcctcctggatgaagaggggcacattaagatcacagatttcggcctgagtaaggaggccattgaccacgacaagagagcgtactccttctgcgggacgatcgagtacatggcgcccgaggtggtgaaccggcgaggacacacgcagagtgccgactggtggtccttcggcgtgctcatgtttgagatgctcacggggtccctgccgttccaggggaaggacaggaaggagaccatggctctcatcctcaaagccaagctggggatgccgcagttcctcagtggggaggcacagagtttgctgcgagctctcttcaaacggaacccctgcaaccggctgggtgctggcattgacggagtggaggaaattaagcgccatcccttctttgtgaccatagactggaacacgctgtaccggaaggagatcaagccaccgttcaaaccagcagtgggcaggcctgaggacaccttccactttgaccccgagttcacagcgcggacgcccacagactctcctggcgtccccccgagtgcaaacgctcatcacctgtttagaggattcagctttgtggcctcaagcctgatccaggagccctcacagcaagatctgcacaaagtcccagttcacccaatcgtgcagcagttacacgggaacaacatccacttcaccgatggctacgagatcaaggaggacatcggggtgggctcctactcagtgtgcaagcgatgtgtgcataaagccacagacaccgagtatgccgtgaagatcattgataagagcaagagagacccctcggaagagattgagatcctcctgcggtacggccagcacccgaacatcatcaccctcaaggatgtctatgatgatggcaagtttgtgtacctggtaatggagctgatgcgtggtggggagctcctggaccgcatcctccggcagagatacttctcggagcgcgaagccagtgacgtcctgtgcaccatcaccaagaccatggactacctccattcccagggggttgttcatcgagacctgaagccgagtaacatcctgtacagggatgagtcggggagcccagaatccatccgagtctgcgacttcggctttgccaagcagctgcgcgcggggaacgggctgctcatgacaccctgctacacggccaatttcgtggccccggaggtcctgaagcgtcaaggctatgatgcggcgtgtgacatctggagtttggggatcctgttgtacaccatgctggcaggatttaccccttttgcaaatgggccagacgatacccctgaggagattctggcgcggatcggcagtgggaagtatgccctttctgggggaaactgggactcgatatctgacgcagctaaagacgtcgtgtccaagatgctccacgtggaccctcatcagcgcctgacggcgatgcaagtgctcaaacacccgtgggtggtcaacagagagtacctgtccccaaaccagctcagccgacaggacgtgcacctggtgaagggcgcgatggccgccacctactttgctctaaacagaacacctcaggccccgcggctggagcccgtgctgtcatccaacctggctcagcgcagaggcatgaagagactcacgtccacgcggctgtagcgggtgggaccctggccccagcgtcccctgccagcatcctcgtgggctcacagaccccggcctcggagcccgtctggcacccagagtgaccacaagtccagcagggaggcggcgcccgccctcgccgtgtccgtgttttctttttcagccccggagagggtcctgacctgggggcttctccaagcctcactgcgccagcctccccgcccgctctcttttctcccaagcgaaaccaaatgcgccccttcacctcgcgtgcccgtgcgaggccgggggcttctttcagagcccgcgggtcctctcatacatggcttctgtttctgccgagagatctgttttccaattatgaagccggtcggtttggtcagactcccgacacccacgtcccaggtacccggtgggaaagtggcagtgcgagggcgcagccattggtggttgcagggccccagagggctggggtgacctggcatcccggggctccccacgggctggatgacggggttggcactgtggcgtccaggaggagatgcctggttctgcccaaaataatccaaagagccgtttcctcctcgcccttcagtttttgcctgaggtgctgggtagcccatcctttcctctgtcccagattcaaatgaggagtaagagcccagacgagaggaaggcaggctggatctttgccttgagagctccgtgtcaccaggatggaagggggtgcctctcggaggagcctgtgtccacctccagtctcggctttccccggggggccaagcgcactgggctgccgtctgtccccagctcccgtggccacacagctatctggaggctttgcagggagtcgtgggttctcgcacctgctcagccctgtgtcggcttcctgtgtgctcacctaaagctgtggttttgctgtgttcacttcgatttttctggtctgtggagaaactgtgaattggagaaatggagctctgtggcttcccacccaaaccttctcagtccagctggaggctggagggagacacaggccccacccagcagactgaggggcagaggcacaggtgggagggcagcggagatcagcgtggacaggagcgatgcactttgtagatgctgtggctttgtgttgcgttttgtgtctctgttgcacagatctgttttttcacactgatccgtattcccctgggtgtgcacacagggcgggtgtggggcatttaggccatgctgtgctctacttcattgagtaaaatcgagtgagaggttccgggcagcaggatcgacgcccagtccagccggcagagggaacacacgggtccttcattgtcctgtaagggtgttgaagatgctccctggcggcccccaagcagactagatgggaggaggcgccgctcagcccctcaccctgcatcactgaagagcggcgcctctgcagcaagcagggcttcaggaggtgcccgctggccacagccaggttttccctaagaagatgttattttgttgggttttgttccccctccatctcgattctcgtacccaactaaaaaaaaaaaaataaagaaaaaatgtgctgcgttctgaaaaataactccttagcttggtctgattgttttcagaccttaaaatataaacttgtttcacaagctttaatccatgtggattttttttttcttagagaaccacaaaacataaaaggagcaagtcggactgaatacctgtttccatagtgcccacagggtattcctcacattttctccatagaagatgctttttcccaaggctagaacgacttccaccatgatgaatttgctttttaggtcttaattatttcacttctttttagaaacttaggaagaagtggataatcctgaggtcacacaatctgtcctcccagaaatgaacaaaagtcatcaccttttctgcttgctacacaggcaacgattcccccatcagctgcccggaccctttggcctggcttggtgtgcaggcctgtctgtttgcttaaagtcagtgggttctggtgcagggagtgagaagtgggggaagtgaaagggaaagcatccgtgagaaagcggccacggttttccctccttgtgtgcccatggggcaccagctcatggtctttttcagtcatcccagtttgtacagacttagcttctgaactctaagaatgccaaagggaccgacgagactccccatcacagcgagctctgtccttacatgtatttgatgtgcatcagcggaggagaacactggcttggccctgctccgctgagtgtctgtgaaatacctctactttccctcccatatccagaacaaaatgatacttgacatccttccacaaaagtcagcctaaagaagttatggtatcatatgttaaactaagctttcaaaaaccttagtgaaatagcaagtgactgctttcaagcagcagtcgacatgtaaatgaaggtgttcttagaattcgcattttgccagctcagcgcacctccacaacgaatgaaatgctccgtatgatttgcacaaatgacatagacctccccaaaagttaactggctctccttcctcacacagttcatcataacccaaccccccacccccgggtcatgaaaatcacagaacttataaacacattgaaccctagatctcaggcttcctgacctaccgccagtggccccttgctggccaccctatagggtcctccttccctggcagccccccatgtgggagaaatacctgattctcccaatctgcagtgggagagctttgctgaattccatcccaaagtcaaacatgggcaagaggtgaggatttcacttttaccctcaagtccgatttgtctgtgattttaaactaactgtgtatgtattgatgtttggaagattgtttgaattttaaagtgataatagtacttaatgttatccagtattgttcattaaatggtgttatcctaaagctgcacttgggatttttacctaacgctttactgattctctcaagcacatggcaaagtttgatttgcactccgttcatttctgacacgttttgctgcctcctacctttctaagcgtcatgcaaattcgagaatggagaaggacgctgccggtccctgagcggtgtggagagggcggaaggtggactccagcgcagcttgaggggctgaggacggaggctgcagcatctgtgtcgttctactgagcacgcttctctgcctcgctcctgactcagcactttgttcactggctcagcagttatgtttacacatcatttttatgttcctgctttgtaattcatgtttgagatgggtggccactgtacagatatttattacgctttccagactttctgaatagatttttttgaataaacatggttttatgaagtgtaatctttttctagcctaacaataa

SEQ ID NO: 3704 - DNA, 1181 bp, Homo sapiens
  source 1..1181: mol_type = genomic DNA
cggagaaggaggcggagggagcgattgtggccccggccgcggtggccggcgcggcctgccctttgtgaccgcagctcgcgccccacgccccgcgcccatggccgccgtgccgggctccctggccacgcgtgcccgcccgcggacctgagccccgcgcctgggatgccggggatgcgcgtcccccggccctgcggctgctccgggctgggcgcggggcgatggacctgagcatgaagaagttcgccgtgcgcaggttcttctctgtgtacctgcgcaggaagtcgcgctccaagagctccagcctgagccggctcgaggaagaaggcgtcgtgaaggagatagacatcagccatcatgtgaaggagggctttgagaaggcagatccttcccagtttgagctgctgaaggttttaggacaaggatcctatggaaaggtgttcctggtgaggaaggtgaaggggtccgacgctgggcagctctacgccatgaaggtccttaagaaagccaccctaaaagttcgggaccgagtgagatcgaagatggagagagacatcttggcagaagtgaatcaccccttcattgtgaagcttcattatgcctttcagacggaaggaaagctctacctgatcctggacttcctgcggggaggggacctcttcacccggctctccaaagaggtcatgttcacggaggaggatgtcaagttctacctggctgagctggccttggctttagaccatctccacagcctggggatcatctacagagatctgaagcctgagaacatcctcctggatgaagaggggcacattaagatcacagatttcggcctgagtaaggaggccattgaccacgacaagagagcgtactccttctgcgggacgatcgagtacatggcgcccgaggtggtgaaccggcgaggacacacgcagagtgccgactggtggtccttcggcgtgctcatgtttgagatgctcacggggtccctgccgttccaggggaaggacaggaaggagaccatggctctcatcctcaaagccaagctggggatgccgcagttcctcagtggggaggcacagagtttgctgcgagctctcttcaaacggaacccctgcaaccggctgggtgagaaaacggccctctgcccccgtgtgagttgctccaggctcctaggcttctga

SEQ ID NO: 3705 - DNA, 2282 bp, Homo sapiens
  source 1..2282: mol_type = genomic DNA
actgtttacagtagctgtgctggaaaccacatgctcctgccatggatgcagccgattcaggaacagacttgatcttcctaaggcattgcatgcaaatcctcatcaagctctagataaaattacctgcttcataaaacagaaaaggcacatatttcaaaatgaaatgaagaaggcgtcgtgaaggagatagacatcagccatcatgtgaaggagggctttgagaaggcagatccttcccagtttgagctgctgaaggttttaggacaaggatcctatggaaaggtgttcctggtgaggaaggtgaaggggtccgacgctgggcagctctacgccatgaaggtccttaagaaagccaccctaaaagttcgggaccgagtgagatcgaagatggagagagacatcttggcagaagtgaatcaccccttcattgtgaagcttcattatgcctttcagacggaaggaaagctctacctgatcctggacttcctgcggggaggggacctcttcacccggctctccaaagaggtcatgttcacggaggaggatgtcaagttctacctggctgagctggccttggctttagaccatctccacagcctggggatcatctacagagatctgaagcctgagaacatcctcctggatgaagaggggcacattaagatcacagatttcggcctgagtaaggaggccattgaccacgacaagagagcgtactccttctgcgggacgatcgagtacatggcgcccgaggtggtgaaccggcgaggacacacgcagagtgccgactggtggtccttcggcgtgctcatgtttgagatgctcacggggtccctgccgttccaggggaaggacaggaaggagaccatggctctcatcctcaaagccaagctggggatgccgcagttcctcagtggggaggcacagagtttgctgcgagctctcttcaaacggaacccctgcaaccggctgggtgctggcattgacggagtggaggaaattaagcgccatcccttctttgtgaccatagactggaacacgctgtaccggaaggagatcaagccaccgttcaaaccagcagtgggcaggcctgaggacaccttccactttgaccccgagttcacagcgcggacgcccacagactctcctggcgtccccccgagtgcaaacgctcatcacctgtttagaggattcagctttgtggcctcaagcctgatccaggagccctcacagcaagatctgcacaaagtcccagttcacccaatcgtgcagcagttacacgggaacaacatccacttcaccgatggctacgagatcaaggaggacatcggggtgggctcctactcagtgtgcaagcgatgtgtgcataaagccacagacaccgagtatgccgtgaagatcattgataagagcaagagagacccctcggaagagattgagatcctcctgcggtacggccagcacccgaacatcatcaccctcaaggatgtctatgatgatggcaagtttgtgtacctggtaatggagctgatgcgtggtggggagctcctggaccgcatcctccggcagagatacttctcggagcgcgaagccagtgacgtcctgtgcaccatcaccaagaccatggactacctccattcccagggggttgttcatcgagacctgaagccgagtaacatcctgtacagggatgagtcggggagcccagaatccatccgagtctgcgacttcggctttgccaagcagctgcgcgcggggaacgggctgctcatgacaccctgctacacggccaatttcgtggccccggaggtcctgaagcgtcaaggctatgatgcggcgtgtgacatctggagtttggggatcctgttgtacaccatgctggcaggatttaccccttttgcaaatgggccagacgatacccctgaggagattctggcgcggatcggcagtgggaagtatgccctttctgggggaaactgggactcgatatctgacgcagctaaagacgtcgtgtccaagatgctccacgtggaccctcatcagcgcctgacggcgatgcaagtgctcaaacacccgtgggtggtcaacagagagtacctgtccccaaaccagctcagccgacaggacgtgcacctggtgaagggcgcgatggccgccacctactttgctctaaacagaacacctcaggccccgcggctggagcccgtgctgtcatccaacctggctcagcgcagaggcatgaagagactcacgtccacgcggctgtagcgggtgggaccctg

SEQ ID NO: 3706 - DNA, 2297 bp, Homo sapiens
  source 1..2297: mol_type = genomic DNA
aaacgtcctaggccctggttggaatggaagcagctttgccaggagcatgggtcctgggcctcagatgatctgaattctcgtcccttgaatagaagaaggcgtcgtgaaggagatagacatcagccatcatgtgaaggagggctttgagaaggcagatccttcccagtttgagctgctgaaggttttaggacaaggatcctatggaaaggtgttcctggtgaggaaggtgaaggggtccgacgctgggcagctctacgccatgaaggtccttaagaaagccaccctaaaagttcgggaccgagtgagatcgaagatggagagagacatcttggcagaagtgaatcaccccttcattgtgaagcttcattatgcctttcagacggaaggaaagctctacctgatcctggacttcctgcggggaggggacctcttcacccggctctccaaagaggtcatgttcacggaggaggatgtcaagttctacctggctgagctggccttggctttagaccatctccacagcctggggatcatctacagagatctgaagcctgagaacatcctcctggatgaagaggggcacattaagatcacagatttcggcctgagtaaggaggccattgaccacgacaagagagcgtactccttctgcgggacgatcgagtacatggcgcccgaggtggtgaaccggcgaggacacacgcagagtgccgactggtggtccttcggcgtgctcatgtttgagatgctcacggggtccctgccgttccaggggaaggacaggaaggagaccatggctctcatcctcaaagccaagctggggatgccgcagttcctcagtggggaggcacagagtttgctgcgagctctcttcaaacggaacccctgcaaccggctgggtgctggcattgacggagtggaggaaattaagcgccatcccttctttgtgaccatagactggaacacgctgtaccggaaggagatcaagccaccgttcaaaccagcagtgggcaggcctgaggacaccttccactttgaccccgagttcacagcgcggacgcccacagactctcctggcgtccccccgagtgcaaacgctcatcacctgtttagaggattcagctttgtggcctcaagcctgatccaggagccctcacagcaagatctgcacaaagtcccagttcacccaatcgtgcagcagttacacgggaacaacatccacttcaccgatggctacgagatcaaggaggacatcggggtgggctcctactcagtgtgcaagcgatgtgtgcataaagccacagacaccgagtatgccgtgaagatcattgataagagcaagagagacccctcggaagagattgagatcctcctgcggtacggccagcacccgaacatcatcaccctcaaggatgtctatgatgatggcaagtttgtgtacctggtaatggagctgatgcgtggtggggagctcctggaccgcatcctccggcagagatacttctcggagcgcgaagccagtgacgtcctgtgcaccatcaccaagaccatggactacctccattcccagggggttgttcatcgagacctgaagccgagtaacatcctgtacagggatgagtcggggagcccagaatccatccgagtctgcgacttcggctttgccaagcagctgcgcgcggggaacgggctgctcatgacaccctgctacacggccaatttcgtggccccggaggtcctgaagcgtcaaggctatgatgcggcgtgtgacatctggagtttggggatcctgttgtacaccatgctggcaggatttaccccttttgcaaatgggccagacgatacccctgaggagattctggcgcggatcggcagtgggaagtatgccctttctgggggaaactgggactcgatatctgacgcagctaaagacgtcgtgtccaagatgctccacgtggaccctcatcagcgcctgacggcgatgcaagtgctcaaacacccgtgggtggtcaacagagagtacctgtccccaaaccagctcagccgacaggacgtgcacctggtgaagggcgcgatggccgccacctactttgctctaaacagaacacctcaggccccgcggctggagcccgtgctgtcatccaacctggctcagcgcagaggcatgaagagactcacgtccacgcggctgtagcgggtgggaccctggccccagcgtcccctgccagcatcctcgtgggctcacagaccccggcctcggagcccgtctggcacccagagtgaccacaagtccagca

SEQ ID NO: 3707 - DNA, 4137 bp, Homo sapiens
  source 1..4137: mol_type = genomic DNA
aattcgaagctgcaagtgcagcgtttactctgccaaagtcgcagtacagattccgaagccgcagcgccgtcccctcctttcctcgccccagcccgagcgggaagcggcagcagctccccagagccctggcttggcagggaggggacggcgcccgagcagccatattgcagccccccgggtccctcctccggccggcgcaggccccgcgctcacgacctcctctgggagccggatctgtcctctccatcgccgccacccgccggcctctgcgtcccttggcttccgacatcccgtctggccgtccccctgtgccggtccgagcctctgtttatttcctttcctactatcaatactcgaccagcagaaaaggaaagtttaaaaatgccaatcgcacagttgctggaactatggaaaaagatcgaggtggagcctatggaaatagagaccacagaggaggatctcaacctggatgtggagcccaccacagaagacactgcagaagaagaagaaggcgtcgtgaaggagatagacatcagccatcatgtgaaggagggctttgagaaggcagatccttcccagtttgagctgctgaaggttttaggacaaggatcctatggaaaggtgttcctggtgaggaaggtgaaggggtccgacgctgggcagctctacgccatgaaggtccttaagaaagccaccctaaaagttcgggaccgagtgagatcgaagatggagagagacatcttggcagaagtgaatcaccccttcattgtgaagcttcattatgcctttcagacggaaggaaagctctacctgatcctggacttcctgcggggaggggacctcttcacccggctctccaaagaggtcatgttcacggaggaggatgtcaagttctacctggctgagctggccttggctttagaccatctccacagcctggggatcatctacagagatctgaagcctgagaacatcctcctggatgaagaggggcacattaagatcacagatttcggcctgagtaaggaggccattgaccacgacaagagagcgtactccttctgcgggacgatcgagtacatggcgcccgaggtggtgaaccggcgaggacacacgcagagtgccgactggtggtccttcggcgtgctcatgtttgagatgctcacggggtccctgccgttccaggggaaggacaggaaggagaccatggctctcatcctcaaagccaagctggggatgccgcagttcctcagtggggaggcacagagtttgctgcgagctctcttcaaacggaacccctgcaaccggctgggtgctggcattgacggagtggaggaaattaagcgccatcccttctttgtgaccatagactggaacacgctgtaccggaaggagatcaagccaccgttcaaaccagcagtgggcaggcctgaggacaccttccactttgaccccgagttcacagcgcggacgcccacagactctcctggcgtccccccgagtgcaaacgctcatcacctgtttagaggattcagctttgtggcctcaagcctgatccaggagccctcacagcaagatctgcacaaagtcccagttcacccaatcgtgcagcagttacacgggaacaacatccacttcaccgatggctacgagatcaaggaggacatcggggtgggctcctactcagtgtgcaagcgatgtgtgcataaagccacagacaccgagtatgccgtgaagatcattgataagagcaagagagacccctcggaagagattgagatcctcctgcggtacggccagcacccgaacatcatcaccctcaaggatgtctatgatgatggcaagtttgtgtacctggtaatggagctgatgcgtggtggggagctcctggaccgcatcctccggcagagatacttctcggagcgcgaagccagtgacgtcctgtgcaccatcaccaagaccatggactacctccattcccagggggttgttcatcgagacctgaagccgagtaacatcctgtacagggatgagtcggggagcccagaatccatccgagtctgcgacttcggctttgccaagcagctgcgcgcggggaacgggctgctcatgacaccctgctacacggccaatttcgtggccccggaggtcctgaagcgtcaaggctatgatgcggcgtgtgacatctggagtttggggatcctgttgtacaccatgctggcaggatttaccccttttgcaaatgggccagacgatacccctgaggagattctggcgcggatcggcagtgggaagtatgccctttctgggggaaactgggactcgatatctgacgcagctaaagacgtcgtgtccaagatgctccacgtggaccctcatcagcgcctgacggcgatgcaagtgctcaaacacccgtgggtggtcaacagagagtacctgtccccaaaccagctcagccgacaggacgtgcacctggtgaagggcgcgatggccgccacctactttgctctaaacagaacacctcaggccccgcggctggagcccgtgctgtcatccaacctggctcagcgcagaggcatgaagagactcacgtccacgcggctgtagcgggtgggaccctggccccagcgtcccctgccagcatcctcgtgggctcacagaccccggcctcggagcccgtctggcacccagagtgaccacaagtccagcagggaggcggcgcccgccctcgccgtgtccgtgttttctttttcagccccggagagggtcctgacctgggggcttctccaagcctcactgcgccagcctccccgcccgctctcttttctcccaagcgaaaccaaatgcgccccttcacctcgcgtgcccgtgcgaggccgggggcttctttcagagcccgcgggtcctctcatacatggcttctgtttctgccgagagatctgttttccaattatgaagccggtcggtttggtcagactcccgacacccacgtcccaggtacccggtgggaaagtggcagtgcgagggcgcagccattggtggttgcagggccccagagggctggggtgacctggcatcccggggctccccacgggctggatgacggggttggcactgtggcgtccaggaggagatgcctggttctgcccaaaataatccaaagagccgtttcctcctcgcccttcagtttttgcctgaggtgctgggtagcccatcctttcctctgtcccagattcaaatgaggagtaagagcccagacgagaggaaggcaggctggatctttgccttgagagctccgtgtcaccaggatggaagggggtgcctctcggaggagcctgtgtccacctccagtctcggctttccccggggggccaagcgcactgggctgccgtctgtccccagctcccgtggccacacagctatctggaggctttgcagggagtcgtgggttctcgcacctgctcagccctgtgtcggcttcctgtgtgctcacctaaagctgtggttttgctgtgttcacttcgatttttctggtctgtggagaaactgtgaattggagaaatggagctctgtggcttcccacccaaaccttctcagtccagctggaggctggagggagacacaggccccacccagcagactgaggggcagaggcacaggtgggagggcagcggagatcagcgtggacaggagcgatgcactttgtagatgctgtggctttgtgttgcgttttgtgtctctgttgcacagatctgttttttcacactgatccgtattcccctgggtgtgcacacagggcgggtgtggggcatttaggccatgctgtgctctacttcattgagtaaaatcgagtgagaggttccgggcagcaggatcgacgcccagtccagccggcagagggaacacacgggtccttcattgtcctgtaagggtgttgaagatgctccctggcggcccccaagcagactagatgggaggaggcgccgctcagcccctcaccctgcatcactgaagagcggcgcctctgcagcaagcagggcttcaggaggtgcccgctggccacagccaggttttccctaagaagatgttattttgttgggttttgttccccctccatctcgattctcgtacccaact

SEQ ID NO: 3708 - DNA, 587 bp, Homo sapiens
  source 1..587: mol_type = genomic DNA
atggcagcggcatcctcagactcaactttcaccctcgtttagagccaattaagcagaaaaggaaagtttaaaaatgccaatcgcacagttgctggaactatggaaaaagatcgaggtggagcctatggaaatagagaccacagaggaggatctcaacctggatgtggagcccaccacagaagacactgcagaagaaggcaaaagtgactcagctgcctgcaagacaaaggtagctggatccgtagaggaagaaggcgtcgtgaaggagatagacatcagccatcatgtgaaggagggctttgagaaggcagatccttcccagtttgagctgctgaaggttttaggacaaggatcctatggaaaggtgttcctggtgaggaaggtgaaggggtccgacgctgggcagctctacgccatgaaggtccttaagaaagccaccctaaaagttcgggaccgagtgagatcgaagatggagagagacatcttggcagaagtgaatcaccccttcattgtgaagcttcattatgcctttcagacggaaggaaagctctacctgatcctggacttcctgcggggaggggacctct

SEQ ID NO: 3709 - DNA, 5992 bp, Homo sapiens
  source 1..5992: mol_type = genomic DNA
gcagtacagattccgaagccgcagcgccgtcccctcctttcctcgccccagcccgagcgggaagcggcagcagctccccagagccctggcttggcagggaggggacggcgcccgagcagccatattgcagccccccgggtccctcctccggccggcgcaggccccgcgctcacgacctcctctgggagccggatctgtcctctccatcgccgccacccgccggcctctgcgtcccttggcttccgacatcccgtctggccgtccccctgtgccggtccgagcctctgtttatttcctttcctactatcaatactcgaccagcagaaaaggaaagtttaaaaatgccaatcgcacagttgctggaactatggaaaaagatcgaggtggagcctatggaaatagagaccacagaggaggatctcaacctggatgtggagcccaccacagaagacactgcagaagaaggcaaaagtgactcagctgcctgcaagacaaaggtagctggatccgtagaggaagaaggcgtcgtgaaggagatagacatcagccatcatgtgaaggagggctttgagaaggcagatccttcccagtttgagctgctgaaggttttaggacaaggatcctatggaaaggtgttcctggtgaggaaggtgaaggggtccgacgctgggcagctctacgccatgaaggtccttaagaaagccaccctaaaagttcgggaccgagtgagatcgaagatggagagagacatcttggcagaagtgaatcaccccttcattgtgaagcttcattatgcctttcagacggaaggaaagctctacctgatcctggacttcctgcggggaggggacctcttcacccggctctccaaagaggtcatgttcacggaggaggatgtcaagttctacctggctgagctggccttggctttagaccatctccacagcctggggatcatctacagagatctgaagcctgagaacatcctcctggatgaagaggggcacattaagatcacagatttcggcctgagtaaggaggccattgaccacgacaagagagcgtactccttctgcgggacgatcgagtacatggcgcccgaggtggtgaaccggcgaggacacacgcagagtgccgactggtggtccttcggcgtgctcatgtttgagatgctcacggggtccctgccgttccaggggaaggacaggaaggagaccatggctctcatcctcaaagccaagctggggatgccgcagttcctcagtggggaggcacagagtttgctgcgagctctcttcaaacggaacccctgcaaccggctgggtgctggcattgacggagtggaggaaattaagcgccatcccttctttgtgaccatagactggaacacgctgtaccggaaggagatcaagccaccgttcaaaccagcagtgggcaggcctgaggacaccttccactttgaccccgagttcacagcgcggacgcccacagactctcctggcgtccccccgagtgcaaacgctcatcacctgtttagaggattcagctttgtggcctcaagcctgatccaggagccctcacagcaagatctgcacaaagtcccagttcacccaatcgtgcagcagttacacgggaacaacatccacttcaccgatggctacgagatcaaggaggacatcggggtgggctcctactcagtgtgcaagcgatgtgtgcataaagccacagacaccgagtatgccgtgaagatcattgataagagcaagagagacccctcggaagagattgagatcctcctgcggtacggccagcacccgaacatcatcaccctcaaggatgtctatgatgatggcaagtttgtgtacctggtaatggagctgatgcgtggtggggagctcctggaccgcatcctccggcagagatacttctcggagcgcgaagccagtgacgtcctgtgcaccatcaccaagaccatggactacctccattcccagggggttgttcatcgagacctgaagccgagtaacatcctgtacagggatgagtcggggagcccagaatccatccgagtctgcgacttcggctttgccaagcagctgcgcgcggggaacgggctgctcatgacaccctgctacacggccaatttcgtggccccggaggtcctgaagcgtcaaggctatgatgcggcgtgtgacatctggagtttggggatcctgttgtacaccatgctggcaggatttaccccttttgcaaatgggccagacgatacccctgaggagattctggcgcggatcggcagtgggaagtatgccctttctgggggaaactgggactcgatatctgacgcagctaaagacgtcgtgtccaagatgctccacgtggaccctcatcagcgcctgacggcgatgcaagtgctcaaacacccgtgggtggtcaacagagagtacctgtccccaaaccagctcagccgacaggacgtgcacctggtgaagggcgcgatggccgccacctactttgctctaaacagaacacctcaggccccgcggctggagcccgtgctgtcatccaacctggctcagcgcagaggcatgaagagactcacgtccacgcggctgtagcgggtgggaccctggccccagcgtcccctgccagcatcctcgtgggctcacagaccccggcctcggagcccgtctggcacccagagtgaccacaagtccagcagggaggcggcgcccgccctcgccgtgtccgtgttttctttttcagccccggagagggtcctgacctgggggcttctccaagcctcactgcgccagcctccccgcccgctctcttttctcccaagcgaaaccaaatgcgccccttcacctcgcgtgcccgtgcgaggccgggggcttctttcagagcccgcgggtcctctcatacatggcttctgtttctgccgagagatctgttttccaattatgaagccggtcggtttggtcagactcccgacacccacgtcccaggtacccggtgggaaagtggcagtgcgagggcgcagccattggtggttgcagggccccagagggctggggtgacctggcatcccggggctccccacgggctggatgacggggttggcactgtggcgtccaggaggagatgcctggttctgcccaaaataatccaaagagccgtttcctcctcgcccttcagtttttgcctgaggtgctgggtagcccatcctttcctctgtcccagattcaaatgaggagtaagagcccagacgagaggaaggcaggctggatctttgccttgagagctccgtgtcaccaggatggaagggggtgcctctcggaggagcctgtgtccacctccagtctcggctttccccggggggccaagcgcactgggctgccgtctgtccccagctcccgtggccacacagctatctggaggctttgcagggagtcgtgggttctcgcacctgctcagccctgtgtcggcttcctgtgtgctcacctaaagctgtggttttgctgtgttcacttcgatttttctggtctgtggagaaactgtgaattggagaaatggagctctgtggcttcccacccaaaccttctcagtccagctggaggctggagggagacacaggccccacccagcagactgaggggcagaggcacaggtgggagggcagcggagatcagcgtggacaggagcgatgcactttgtagatgctgtggctttgtgttgcgttttgtgtctctgttgcacagatctgttttttcacactgatccgtattcccctgggtgtgcacacagggcgggtgtggggcatttaggccatgctgtgctctacttcattgagtaaaatcgagtgagaggttccgggcagcaggatcgacgcccagtccagccggcagagggaacacacgggtccttcattgtcctgtaagggtgttgaagatgctccctggcggcccccaagcagactagatgggaggaggcgccgctcagcccctcaccctgcatcactgaagagcggcgcctctgcagcaagcagggcttcaggaggtgcccgctggccacagccaggttttccctaagaagatgttattttgttgggttttgttccccctccatctcgattctcgtacccaactaaaaaaaaaaaaataaagaaaaaatgtgctgcgttctgaaaaataactccttagcttggtctgattgttttcagaccttaaaatataaacttgtttcacaagctttaatccatgtggattttttttttcttagagaaccacaaaacataaaaggagcaagtcggactgaatacctgtttccatagtgcccacagggtattcctcacattttctccatagaagatgctttttcccaaggctagaacgacttccaccatgatgaatttgctttttaggtcttaattatttcacttctttttagaaacttaggaagaagtggataatcctgaggtcacacaatctgtcctcccagaaatgaacaaaagtcatcaccttttctgcttgctacacaggcaacgattcccccatcagctgcccggaccctttggcctggcttggtgtgcaggcctgtctgtttgcttaaagtcagtgggttctggtgcagggagtgagaagtgggggaagtgaaagggaaagcatccgtgagaaagcggccacggttttccctccttgtgtgcccatggggcaccagctcatggtctttttcagtcatcccagtttgtacagacttagcttctgaactctaagaatgccaaagggaccgacgagactccccatcacagcgagctctgtccttacatgtatttgatgtgcatcagcggaggagaacactggcttggccctgctccgctgagtgtctgtgaaatacctctactttccctcccatatccagaacaaaatgatacttgacatccttccacaaaagtcagcctaaagaagttatggtatcatatgttaaactaagctttcaaaaaccttagtgaaatagcaagtgactgctttcaagcagcagtcgacatgtaaatgaaggtgttcttagaattcgcattttgccagctcagcgcacctccacaacgaatgaaatgctccgtatgatttgcacaaatgacatagacctccccaaaagttaactggctctccttcctcacacagttcatcataacccaaccccccacccccgggtcatgaaaatcacagaacttataaacacattgaaccctagatctcaggcttcctgacctaccgccagtggccccttgctggccaccctatagggtcctccttccctggcagccccccatgtgggagaaatacctgattctcccaatctgcagtgggagagctttgctgaattccatcccaaagtcaaacatgggcaagaggtgaggatttcacttttaccctcaagtccgatttgtctgtgattttaaactaactgtgtatgtattgatgtttggaagattgtttgaattttaaagtgataatagtacttaatgttatccagtattgttcattaaatggtgttatcctaaagctgcacttgggatttttacctaacgctttactgattctctcaagcacatggcaaagtttgatttgcactccgttcatttctgacacgttttgctgcctcctacctttctaagcgtcatgcaaattcgagaatggagaaggacgctgccggtccctgagcggtgtggagagggcggaaggtggactccagcgcagcttgaggggctgaggacggaggctgcagcatctgtgtcgttctactgagcacgcttctctgcctcgctcctgactcagcactttgttcactggctcagcagttatgtttacacatcatttttatgttcctgctttgtaattcatgtttgagatgggtggccactgtacagatatttattacgctttccagactttctgaatagatttttttgaataaacatggttttatgaagtgt

SEQ ID NO: 3710 - DNA, 1067 bp, Homo sapiens
  source 1..1067: mol_type = genomic DNA
gtacataaggacgtcatttcctgccgcctgtcttttccgtgctacctgcagaggggtccatacggcgttgttctggattcccgtcgtaacttaaagggaaattttcacaatgtccggagcccttgatgtcctgcaaatgaaggaggaggatgtccttaagttccttgcagcaggaacccacttaggtggcaccaatcttgacttccagatggaacagtacatctataaaaggaaaagtgatggcatctatatcataaatctcaagaggacctgggagaagcttctgctggcagctcgtgcaattgttgccattgaaaaccctgctgatgtcagtgttatatcctccaggaatactggccagagggctgtgctgaagtttgctgctgccactggagccactccaattgctggccgcttcactcctggaaccttcactaaccagatccaggcagccttccgggagccacggcttcttgtggttactgaccccagggctgaccaccagcctctcacggaggcatcttatgttaacctacctaccattgcgctgtgtaacacagattctcctctgcgctatgtggacattgccatcccatgcaacaacaagggagctcactcagtgggtttgatgtggtggatgctggctcgggaagttctgcgcatgcgtggcaccatttcccgtgaacacccatgggaggtcatgcctgatctgtacttctacagagatcctgaagagattgaaaaagaagagcaggctgctgctgagaaggcagtgaccaaggaggaatttcagggtgaatggactgctcccgctcctgagttcactgctactcagcctgaggttgcagactggtctgaaggtgtacaggtgccctctgtgcctattcagcaattccctactgaagactggagcgctcagcctgccacggaagactggtctgcagctcccactgctcaggccactgaatgggtaggagcaaccactgactggtcttaagctgttcttgcataggctcttaagcagcatggaaaaatggttgatggaaaataaacatcagtttctaaaa

SEQ ID NO: 3711 - DNA, 874 bp, Homo sapiens
  source 1..874: mol_type = genomic DNA
cctgcagaggggtccatacggcgttgttctgggttgctctcttatttcagattcccgtcgtaacttaaagggaaattttcacaatgtccggagcccttgatgtcctgcaaatgaaggaggaggatgtccttaagttccttgcagcaggaacccacttaggtggcaccaatcttgacttccagatggaacagtacatctataaaaggaaaagtgatggcatctatatcataaatctcaagaggacctgggagaagcttctgctggcagctcgtgcaattgttgccattgaaaaccctgctgatgtcagtgttatatcctccaggaatactggccagagggctgtgctgaagtttgctgctgccactggagccactccaattgctggccgcttcactcctggaaccttcactaaccagatccaggcagccttccgggagccacggcttcttgtggttactgaccccagggctgaccaccagcctctcacggaggcatcttatgttaacctacctaccattgcgctgtgtaacacagattctcctctgcgctatgtggacattgccatcccatgcaacaacaagggagctcactcagtgggtttgatgtggtggatgctggctcgggaagttctgcgcatgcgtggcaccatttcccgtgaacacccatgggaggtcatgcctgatctgtacttctacagagatcctgaagagattgaaaaagaagagcaggctgctgctgagaaggcagtgaccaaggaggaatttcagggtgaatggactgctcccgctcctgagttcactgctactcagcctgaggttgcagactggtctgaaggtgtacaggtgccctctgtgcctattcagcaattccctac

SEQ ID NO: 3712 - DNA, 5631 bp, Homo sapiens
  source 1..5631: mol_type = genomic DNA
cttgcgcaggcgtagtgctcctgcttcctggccgagggcgggcgagcggagcctgctttcgcagcgatcgcgagcgtgtggcgattgcttctgtctgttatttagatatggaagctgaggggatgcacagaggcagccagaacctaggtcagggtctcgctcggtgctgaccgcccccggggtcgagtaggcgatgggggagcccggcttcttcgtcacaggagaccgcgccggtggccggagctggtgcctgcggcgggtggggatgagcgccgggtggctgctgctggaagatgggtgcgaggtgactgtaggacgaggatttggtgtcacataccaactggtatcaaaaatctgccccctgatgatttctcgaaaccactgtgttttgaagcagaatcctgagggccaatggacaattatggacaacaagagtctaaatggtgtttggctgaacagagcgcgtctggaacctttaagggtctattccattcatcagggagactacatccaacttggagtgcctctggaaaataaggagaatgcggagtatgaatatgaagttactgaagaagactgggagacaatatatccttgtctttccccaaagaatgaccaaatgatagaaaaaaataaggaattgagaactaaaaggaaattcagtttggatgaattagcaggtcctggagctgaaggcccctcaaatttgaaatccaaaataaataaagtgtcttgtgaatctggtcagccagtgaaatcacaggggaaaggtgaagtggccagtacaccctctgacaatttggatcctaagttgactgcccttgagccaagtaagaccacaggggctcccatttaccctggcttccccaaagtcacagaggttcatcatgagcagaaagcctcaaactcttcagcatctcagagaagcttacagatgtttaaggtgaccatgtccaggattctgaggctcaaaatacagatgcaggaaaaacatgaagccgttatgaatgtgaaaaagcagacccaaaaggggaactcaaagaaagttgtgcaaatggagcaggaacttcaggacttacagtcccagctgtgtgcagagcaggctcagcagcaggcaagagtggagcaactagagaagactttccaggaagaggaacagcatcttcagggtttggagatagcccaaggagaaaaggacctgaagcaacagctggcccaggctctgcaggagcattgggctctaatggaagagctaaatcgcagcaagaaggactttgaagcaatcattcaagccaagaacaaagaattagagcagaccaaggaagagaaggagaagatgcaagcacagaaggaagaagttcttagccacatgaatgatgtgctagagaatgagctccaatgtattatttgttcagaatacttcattgaggctgtcaccttgaactgtgcccacagtttctgctcctactgtatcaatgaatggatgaagcggaagatagaatgccccatttgtcggaaggacattaagtccaaaacgtactctttggttctggacaattgcattaataagatggtaaataatctgagctcagaagtgaaagaacgacgaattgttctcattagggaacgaaaagcaaagagattgttctgaagaccgtgctctaagggcatttgaaagactgccaggtagtgcgagcctgagatggtctggaggattctctctagccgtgactccgctgctctgaaggtcaactgagaagtcttgtgggacagagacttgagttaggaagccctcagtcacttgccttccacggtggccagccctgctgccatcattggctgaagcaccaccaggattcacggcacccaactgcttcagggtacttcgtagactctgcctcactacatgtcgaaagagttatttgagttctcttctgtttttttttaatttgttgttgttgttactgttttgatacctcggaaacacctccgttgacagttgttttggataggttgggtgtaccccatggctgcctctgaaggcagtgtctattttgagaggatggcttacctcttctttgtgaaaatactatctcatttcctggaaataaaatgtaaaacctgtcagttgctcagctgggctttggtgtatttaccttccttcccttcctgctcccagacagtctcacaagtaaacaccagcagctcatagattacaaccaagaaagtgactgtatcagatgatagacttcaagtgaatgtcagcctaagaggccaagctgcagatcgtggcaacagatgagctctgttaacctcctgactgtcgtgtttcctttttattacagaggtgggtcactgtttaccttgtttcaggggtgggagaaactcctttccttcagctggcatttgaatgtttccaaatctattttatctgacgtcatgaacacacaggcaatgattttatgacaacttgatgtgcttttttctttatttttcttttacattagaagttttctctcttttctccacctctcctttatttttaattttaattttaatttttgaaacaagatctgactctgttgcccaagctggagtacagtagtgcaatctcagctcactgcaacctccacctcccagactcaagccatcctcccacctcaacctcccaagtagctgggactacaggcatatgccatcacacccagctaatttttgtttttctgtagagacagggtttcaccatgttggccaggctggtctcaaattcctgaccttaagtgatccacctgcctaggcctctaaaatgctgggattacaggcgtgagccaccacgcccagcctataccccatgtattttcataaagggttggaaactattgattgccaactttttaaggatggtagggattttttctttgttgaatatactgtgaattttgggattctggagtccttagtcttcatttccattcttctgcccatgattactgatcaaaatactggtagagtcatggaggaagtaagttaaatgtggaaaaaatgctttaaaagtacttactataaccacatcataagaattctggaaaaatagagaacaaaaggaaaagattgttaccaccttgatttaataacttcttgtttccccatacatgtgttttgtttatagattgcatgggtatatgtcaatttttatatgttctgtgtttagtttacatattgtaattcatttttaagagagtacagacatacactttttgagtaggcaatatgttcacatagtttgaaattaaaggtacaaaatggcgtagaatgaaatgcctctcaccctttccccacagcgactacttcccactcagaggcaacaagtattacagttgcttgtatattcttccagagatctctgtctatacaagcaaaaacacatgtggtctttttccttgctttgcacaaatggtaaactgtacgctattctgaaccttgcttttttcagatatatgttggcaacagttccatgtcagtacatagtttcctttctttattacagctgcctgttttttcattgtgtatttgcaccatcatttacttttctggcttacttttgatagaaatctaggttggttcaaacctttttactcttaaaacaatgctgcagttaacacccttgtacatatatctttagagagaagatattttaaaaagaaatacctttttaaaaattattttattattttttaatagagactatgttgcctaggctggtcttgaaattctgggctaaagcaatcctaccaccttggcctcccaaagtgctgagattacaggcatgagccattgcacctggccaagaagagacatcttgacttgagcctgaagactatgtacagagactgacctcacagactgaccattccatcccacagctgctggacatagagtgatttgcagcccctcctttcagagtaccacatccctctcaagtgttccacaacatctaggaaagtgagctcttaaagacagactaaaaagagtaataaatcaatacaacaacattaaaagccagactagcggagtttgaatcttggccctgctgttagtaactgtgtgagccttgggcaagttactcagcctccttgtgtcttggttttggtttcttcatctctaagtaattatatctgtcattattgccctgatcacaaacaaaagcctgaatgtactatgtttaaaagacaaaccaaaaattaacccaaacttgcattatttgtctgagctacagaatgttctttccttggagagatatctgatattaaacatcatctgcattttacttgcctagaaaatacacggtaacttttctgccttgcagcatcaaactatagtacagctgagccccagtgctgtgcagtctgactctaattaaaggcaccttctttacagcagggctctggggaactggaaaagggggtttgtttcattatctggttttattaagcagatgaatgcagccagctatatgaagcactttgcagtgaatggcaggtgtcccatatctggttatgttaacctagaaagggctcactctacctctaggcatgtttcatcccaacaatcagactgtgccaaagcaggggactttgtcctttgtggattgcatagctggatacccatcatctgtttctctgattggaagctgctgttgtacagaaagacctgcatttcccccttgtctccagttctctcactactttttcctcctctgtgagtgaccatccaggcagtcaccataactgctggagtgtctgggattggtagctctctccaactgcctgcttgctctttacagcctctctctgtgactggaatctctccacctcatcgtatctaaggataacccagaaacatggggtgtcctaggtatgtttatctcgacactgaaccccctaggcttctgatgaatccagtgattagctaaatttgacatagaaagtaagaaggaatgtctactttgtattgtggtcctaatctaagatcaggagaatcctggaattgttatctgtctcttgctctgagatacagacttgttcataggtgtggggcctgattggaacaggatctgccattggtcacaataggtcaagggcttgttctgaaccctagttagcttcattcagagaaagaaacttcctacctggtcagctttttcagcttctccaacaaatgggagttgaggcagtaggagtgtggggttcttgggaagacgatggggccttgtattaaggagaaataatgaactatcttcttgattcttccattgagaaaagcatatgaatcctaggaaagggctcagcctgtgataggcattcaataaatactccaatgctgtcattcctttgtctacagcatccccaaacaatgtaccagtgatgggctacctgagctcatctagtcgccaagcagtatctcctgcttgctgctgctttactacattccagatgcccacctcatccaatttccagagccactatctctgctgtccactttccttcaggctctgtgaatacttcaacctgctgtgatttggggccgtttgtactctgcatgtattcaataaattcaattcagcaatagtta

SEQ ID NO: 3713 - DNA, 419 bp, Homo sapiens
  source 1..419: mol_type = genomic DNA
gagcgtgtggcgattgcttctgtctgttatttagatatggaagctgaggggatgcacagaggcagccagaacctaggtcagggtctcgctcggtgctgaccgcccccggggtcgagtaggcgatgggggagcccggcttcttcgtcacaggagaccgcgccggtggccggagctggtgcctgcggcgggtggggatgagcgccgggtggctgctgctggaagatgggtgcgaggtgactgtaggacgaggatttggtgtcacataccaactggtatcaaaaatctgccccctgatgatttctcgaaaccactgtgttttgaagcagaatcctgagggccaatggacaattatggacaacaagagttttccttctgaaaaggcagaagattttacagcagcaggagagagattcctttaa

SEQ ID NO: 3714 - DNA, 1800 bp, Homo sapiens
  source 1..1800: mol_type = genomic DNA
gggatgcacagaggcagccagaacctaggtcagggtctcgctcggtgctgaccgcccccggggtcgagtaggcgatgggggagcccggcttcttcgtcacaggagaccgcgccggtggccggagctggtgcctgcggcgggtggggatgagcgccgggtggctgctgctggaagatgggtgcgaggtgactgtaggacgaggatttggtgtcacataccaactggtatcaaaaatctgccccctgatgatttctcgaaaccactgtgttttgaagcagaatcctgagggccaatggacaattatggacaacaagagtctaaatggtgtttggctgaacagagcgcgtctggaacctttaagggtctattccattcatcagggagactacatccaacttggagtgcctctggaaaataaggagaatgcggagtatgaatatgaagttactgaagaagactgggagacaatatatccttgtctttccccaaagaatgaccaaatgatagaaaaaaataaggaattgagaactaaaaggaaattcagtttggatgaattagcaggtcctggagctgaaggcccctcaaatttgaaatccaaaataaataaagtgtcttgtgaatctggtcagccagtgaaatcacaggggaaaggtgaagtggccagtacaccctctgacaatttggatcctaagttgactgcccttgagccaagtaagaccacaggggctcccatttaccctggcttccccaaagtcacagaggttcatcatgagcagaaagcctcaaactcttcagcatctcagagaagcttacagatgtttaaggtgaccatgtccaggattctgaggctcaaaatacagatgcaggaaaaacatgaagccgttatgaatgtgaaaaagcagacccaaaaggggaactcaaagaaagttgtgcaaatggagcaggaacttcaggacttacagtcccagctgtgtgcagagcaggctcagcagcaggcaagagtggagcaactagagaagactttccaggaagaggaacagcatcttcagggtttggagatagcccaaggagaaaaggacctgaagcaacagctggcccaggctctgcaggagcattgggctctaatggaagagctaaatcgcagcaagaaggactttgaagcaatcattcaagccaagaacaaagaattagagcagaccaaggaagagaaggagaagatgcaagcacagaaggaagaagttcttagccacatgaatgatgtgctagagaatgagctccaatgtattatttgttcagaatacttcattgagcaaagagattgttctgaagaccgtgctctaagggcatttgaaagactgccaggtagtgcgagcctgagatggtctggaggattctctctagccgtgactccgctgctctgaaggtcaactgagaagtcttgtgggacagagacttgagttaggaagccctcagtcacttgccttccacggtggccagccctgctgccatcattggctgaagcaccaccaggattcacggcacccaactgcttcagggtacttcgtagactctgcctcactacatgtcgaaagagttatttgagttctcttctgtttttttttaatttgttgttgttgttactgttttgatacctcggaaacacctccgttgacagttgttttggataggttgggtgtaccccatggctgcctctgaaggcagtgtctattttgagaggatggcttacctcttctttgtgaaaatactatctcatttcctggaaataaaatgtaaaacctg

SEQ ID NO: 3715 - DNA, 2488 bp, Homo sapiens
  source 1..2488: mol_type = genomic DNA
ggccggaacaggcgtttagagaaaatggcagacgatattgatattgaagcaatgcttgaggctccttacaagaaggatgagaacaagttgagcagtgccaacggccatgaagaacgtagcaaaaagaggaaaaaaagcaagagcagaagtcgtagtcatgaacgaaagagaagcaaaagtaaggaacggaagcgaagtagagacagagaaaggaaaaagagcaaaagccgtgaaagaaagcgaagtagaagcaaagagaggcgacggagccgctcaagaagtcgagatcgaagatttagaggccgctacagaagtccttactccggaccaaaatttaacagtgccatccgaggaaagattgggttgcctcatagcatcaaattaagcagacgacgttcccgaagcaaaagtccattcagaaaagacaagagccctgtgagagaacctattgataatttaactcctgaggaaagagatgcaaggacagtcttctgtatgcagctggcggcaagaattcgaccaagggatttggaagagtttttctctacagtaggaaaggttcgagatgtgaggatgatttctgacagaaattcaagacgttccaaaggaattgcttatgtggagttcgtcgatgttagctcagtgcctctagcaataggattaactggccaacgagttttaggcgtgccaatcatagtacaggcatcacaggcagaaaaaaacagagctgcagcaatggcaaacaatttacaaaagggaagtgctggacctatgaggctttatgtgggctcattacacttcaacataactgaagatatgcttcgtgggatctttgagccttttggaagaattgaaagtatccagctgatgatggacagtgaaactggtcgatccaagggatatggatttattacattttctgactcagaatgtgccaaaaaggctttggaacaacttaatggatttgaactagcaggaagaccaatgaaagttggtcatgttactgaacgtactgatgcttcgagtgctagttcatttttggacagtgatgaactggaaaggactggaattgatttgggaacaactggtcgtcttcagttaatggcaagacttgcagagggtacaggtttgcagattccgccagcagcacagcaagctctacagatgagtggctctttggcatttggtgctgtggcagaattctcttttgttatagatttgcaaacaagactttcccagcagactgaagcttcagctttagctgcagctgcctctgttcagccacttgcaacacaatgtttccaactctctaacatgtttaaccctcaaacagaagaagaagttggatgggataccgagattaaggatgatgtgattgaagaatgtaataaacatggaggagttattcatatttatgttgacaaaaattcagctcagggcaatgtgtatgtgaagtgcccatcaattgctgcagctattgctgctgtcaatgcattgcatggcaggtggtttgctggtaaaatgataacagcagcatatgtacctcttccaacttaccacaacctgtttcctgattctatgacagcaacacagctactggttccaagtagacgatgaaggaagatatagtcccttatgtatatagctttttttctttcttgagaattcatcttgagttatcttttatttagataaaaataaagaggcaaggatctactgtcatttgtatgcaatttcctgttaccttgaaaaaataaaaatgttaacaggaatgcagtgtgctcattctccctaaatagtaaatcccactgtatacaaaactgttctcttgttctgccttttaaaatgttcatgtagaaaattaatgaactataggaatagctctaggagaacaaatgtgctttctgtaaaaaggcagaccagggatgtaatgtttttaatgtttcagaagcctaactttttacacagtggttacatttcacatttcactaatgttgatatttggctgatggttgagcagtttctgaaatacacatttagtgtatggaaatacaagacagctaaagggctgtttggttagcatctcatcttgcattctgatcaattggcaagaaagggagatttcaaaattatatttcttgatggtatcttttcaattaatgtatctgtaaaagtttctttgtaaatactatgtgttctggtgtgtcttaaaattccaaacaaaatgatccctgcatttcctgaagatgtttaaacgtgagagtctggtaggcaaagcagtctgagaaagaaataggaaatgcagaaataggttttgtctggttgcatataatctttgctctttttaagctctgtgagctctgaaatatatttttgggttacttcagtgtgtttgacaagacagcttgatatttctatcaaacaaatgactttcatattgcaacaatctttgtaagaaccactcaaataaaagtctcttaaaaaggcc

SEQ ID NO: 3716 - DNA, 2792 bp, Homo sapiens
  source 1..2792: mol_type = genomic DNA
gccatttcagggagcttgtcgacgctgtcgcaggggtggatcctgagctgccgaagccgccgtcctgctctcccgcgtgggcttctctaattccattgttttttttagattctctcgggcctagccgtccttggaacccgatattcgggctgggcggttccgcggcctgggcctaggggcttaacagtagcaacagaagcggcggcggcggcagcagcagcagcagcagcagcaatctcttcccgaacacgagcaccacaggcgcccgaaggccggaacaggcgtttagagaaaatggcagacgatattgatattgaagcaatgcttgaggctccttacaagaaggatgagaacaagttgagcagtgccaacggccatgaagaacgtagcaaaaagaggaaaaaaagcaagagcagaagtcgtagtcatgaacgaaagagaagcaaaagtaaggaacggaagcgaagtagagacagagaaaggaaaaagagcaaaagccgtgaaagaaagcgaagtagaagcaaagagaggcgacggagccgctcaagaagtcgagatcgaagatttagaggccgctacagaagtccttactccggaccaaaatttaacagtgccatccgaggaaagattgggttgcctcatagcatcaaattaagcagacgacgttcccgaagcaaaagtccattcagaaaagacaagagccctgtgagagaacctattgataatttaactcctgaggaaagagatgcaaggacagtcttctgtatgcagctggcggcaagaattcgaccaagggatttggaagagtttttctctacagtaggaaaggttcgagatgtgaggatgatttctgacagaaattcaagacgttccaaaggaattgcttatgtggagttcgtcgatgttagctcagtgcctctagcaataggattaactggccaacgagttttaggcgtgccaatcatagtacaggcatcacaggcagaaaaaaacagagctgcagcaatggcaaacaatttacaaaagggaagtgctggacctatgaggctttatgtgggctcattacacttcaacataactgaagatatgcttcgtgggatctttgagccttttggaagaattgaaagtatccagctgatgatggacagtgaaactggtcgatccaagggatatggatttattacattttctgactcagaatgtgccaaaaaggctttggaacaacttaatggatttgaactagcaggaagaccaatgaaagttggtcatgttactgaacgtactgatgcttcgagtgctagttcatttttggacagtgatgaactggaaaggactggaattgatttgggaacaactggtcgtcttcagttaatggcaagacttgcagagggtacaggtttgcagattccgccagcagcacagcaagctctacagatgagtggctctttggcatttggtgctgtggcagatttgcaaacaagactttcccagcagactgaagctttgtttgttattatgttttggaatgaaatttggtcagataatatgattacgcttcagctttagctgcagctgcctctgttcagccacttgcaacacaatgtttccaactctctaacatgtttaaccctcaaacagaagaagaagttggatgggataccgagattaaggatgatgtgattgaagaatgtaataaacatggaggagttattcatatttatgttgacaaaaattcagctcagggcaatgtgtatgtgaagtgcccatcaattgctgcagctattgctgctgtcaatgcattgcatggcaggtggtttgctggtaaaatgataacagcagcatatgtacctcttccaacttaccacaacctgtttcctgattctatgacagcaacacagctactggttccaagtagacgatgaaggaagatatagtcccttatgtatatagctttttttctttcttgagaattcatcttgagttatcttttatttagataaaaataaagaggcaaggatctactgtcatttgtatgcaatttcctgttaccttgaaaaaataaaaatgttaacaggaatgcagtgtgctcattctccctaaatagtaaatcccactgtatacaaaactgttctcttgttctgccttttaaaatgttcatgtagaaaattaatgaactataggaatagctctaggagaacaaatgtgctttctgtaaaaaggcagaccagggatgtaatgtttttaatgtttcagaagcctaactttttacacagtggttacatttcacatttcactaatgttgatatttggctgatggttgagcagtttctgaaatacacatttagtgtatggaaatacaagacagctaaagggctgtttggttagcatctcatcttgcattctgatcaattggcaagaaagggagatttcaaaattatatttcttgatggtatcttttcaattaatgtatctgtaaaagtttctttgtaaatactatgtgttctggtgtgtcttaaaattccaaacaaaatgatccctgcatttcctgaagatgtttaaacgtgagagtctggtaggcaaagcagtctgagaaagaaataggaaatgcagaaataggttttgtctggttgcatataatctttgctctttttaagctctgtgagctctgaaatatatttttgggttacttcagtgtgtttgacaagacagcttgatatttctatcaaacaaatgactttcatattgcaacaatctttgtaagaaccactcaaataaaagtctcttaaaaaggc

SEQ ID NO: 3717 - DNA, 2831 bp, Homo sapiens
  source 1..2831: mol_type = genomic DNA
gcgagagcccgtgctgagggctctgtgaggccccgtgtgtttgtgtgtgtgtatgtgtgctggtgaatgtgagtacagggaagcagcggccgccatttcagggagcttgtcgacgctgtcgcaggggtggatcctgagctgccgaagccgccgtcctgctctcccgcgtgggcttctctaattccattgttttttttagattctctcgggcctagccgtccttggaacccgatattcgggctgggcggttccgcggcctgggcctaggggcttaacagtagcaacagaagcggcggcggcggcagcagcagcagcagcagcagcaatctcttcccgaacacgagcaccacaggcgcccgaaggccggaacaggcgtttagagaaaatggcagacgatattgatattgaagcaatgcttgaggctccttacaagaaggatgagaacaagttgagcagtgccaacggccatgaagaacgtagcaaaaagaggaaaaaaagcaagagcagaagtcgtagtcatgaacgaaagagaagcaaaagtaaggaacggaagcgaagtagagacagagaaaggaaaaagagcaaaagccgtgaaagaaagcgaagtagaagcaaagagaggcgacggagccgctcaagaagtcgagatcgaagatttagaggccgctacagaagtccttactccggaccaaaatttaacagtgccatccgaggaaagattgggttgcctcatagcatcaaattaagcagacgacgttcccgaagcaaaagtccattcagaaaagacaagagccctgtgagagaacctattgataatttaactcctgaggaaagagatgcaaggacagtcttctgtatgcagctggcggcaagaattcgaccaagggatttggaagagtttttctctacagtaggaaaggttcgagatgtgaggatgatttctgacagaaattcaagacgttccaaaggaattgcttatgtggagttcgtcgatgttagctcagtgcctctagcaataggattaactggccaacgagttttaggcgtgccaatcatagtacaggcatcacaggcagaaaaaaacagagctgcagcaatggcaaacaatttacaaaagggaagtgctggacctatgaggctttatgtgggctcattacacttcaacataactgaagatatgcttcgtgggatctttgagccttttggaagaattgaaagtatccagctgatgatggacagtgaaactggtcgatccaagggatatggatttattacattttctgactcagaatgtgccaaaaaggctttggaacaacttaatggatttgaactagcaggaagaccaatgaaagttggtcatgttactgaacgtactgatgcttcgagtgctagttcatttttggacagtgatgaactggaaaggactggaattgatttgggaacaactggtcgtcttcagttaatggcaagacttgcagagggtacaggtttgcagattccgccagcagcacagcaagctctacagatgagtggctctttggcatttggtgctgtggcagatttgcaaacaagactttcccagcagactgaagcttcagctttagctgcagctgcctctgttcagccacttgcaacacaatgtttccaactctctaacatgtttaaccctcaaacagaagaagaagttggatgggataccgagattaaggatgatgtgattgaagaatgtaataaacatggaggagttattcatatttatgttgacaaaaattcagctcagggcaatgtgtatgtgaagtgcccatcaattgctgcagctattgctgctgtcaatgcattgcatggcaggtggtttgctggtaaaatgataacagcagcatatgtacctcttccaacttaccacaacctgtttcctgattctatgacagcaacacagctactggttccaagtagacgatgaaggaagatatagtcccttatgtatatagctttttttctttcttgagaattcatcttgagttatcttttatttagataaaaataaagaggcaaggatctactgtcatttgtatgcaatttcctgttaccttgaaaaaataaaaatgttaacaggaatgcagtgtgctcattctccctaaatagtaaatcccactgtatacaaaactgttctcttgttctgccttttaaaatgttcatgtagaaaattaatgaactataggaatagctctaggagaacaaatgtgctttctgtaaaaaggcagaccagggatgtaatgtttttaatgtttcagaagcctaactttttacacagtggttacatttcacatttcactaatgttgatatttggctgatggttgagcagtttctgaaatacacatttagtgtatggaaatacaagacagctaaagggctgtttggttagcatctcatcttgcattctgatcaattggcaagaaagggagatttcaaaattatatttcttgatggtatcttttcaattaatgtatctgtaaaagtttctttgtaaatactatgtgttctggtgtgtcttaaaattccaaacaaaatgatccctgcatttcctgaagatgtttaaacgtgagagtctggtaggcaaagcagtctgagaaagaaataggaaatgcagaaataggttttgtctggttgcatataatctttgctctttttaagctctgtgagctctgaaatatatttttgggttacttcagtgtgtttgacaagacagcttgatatttctatcaaacaaatgactttcatattgcaacaatctttgtaagaaccactcaaataaaagtctcttaaaaaggcc

SEQ ID NO: 3718 - DNA, 1026 bp, Homo sapiens
  source 1..1026: mol_type = genomic DNA
gtgtgctggtgaatgtgagtacagggaagcagcggccgccatttcagggagcttgtcgacgctgtcgcaggggtggatcctgagctgccgaagccgccgtcctgctctcccgcgtgggcttctctaattccattgttttttttagattctctcgggcctagccgtccttggaacccgatattcgggctgggcggttccgcggcctgggcctaggggcttaacagtagcaacagaagcggcggcggcggcagcagcagcagcagcagcagcaatctcttcccgaacacgagcaccacaggcgcccgaaggccggaacaggcgtttagagaaaatggcagacgatattgatattgaagcaatgcttgaggctccttacaagaaggatgagaacaagttgagcagtgccaacggccatgaagaacgtagcaaaaagaggaaaaaaagcaagagcagaagtcgtagtcatgaacgaaagagaagcaaaagtaaggaacggaagcgaagtagagacagagaaaggaaaaagagcaaaagccgtgaaagaaagcgaagtagaagcaaagagaggcgacggagccgctcaagaagtcgagatcgaagatttagaggccgctacagaagtccttactccggaccaaaatttaacagtgccatccgaggaaagattgggttgcctcatagcatcaaattaagacgacgttcccgaagcaaaagtccattcagaaaagacaagagccctgtgagagaacctattgataatttaactcctgaggaaagagatgcaaggacagtcttctgtatgcagctggcggcaagaattcgaccaagggatttggaagagtttttctctacagtaggaaaggttcgagatgtgaggatgatttctgacagaaattcaagacgttccaaaggaattgcttatgtggagttcgtcgatgttagctcagtgcctctagcaataggattaactggccaacgagttttaggcgtgccaatcatagtacaggcatcacaggcagaaaaaaa

SEQ ID NO: 3719 - DNA, 2147 bp, Homo sapiens
  source 1..2147: mol_type = genomic DNA
gtgctggtgaatgtgagtacagggaagcagcggccgccatttcagggagcttgtcgacgctgtcgcaggggtggatcctgagctgccgaagccgccgtcctgctctcccgcgtgggcttctctaattccattgttttttttagattctctcgggcctagccgtccttggaacccgatattcgggctgggcggttccgcggcctgggcctaggggcttaacagtagcaacagaagcggcggcggcggcagcagcagcagcagcagcagcaatctcttcccgaacacgagcaccacaggcgcccgaaggccggaacaggcgtttagagaaaatggcagacgatattgatattgaagcaatgcttgaggctccttacaagaaggatgagaacaagttgagcagtgccaacggccatgaagaacgtagcaaaaaacaaactttctgcctccttggaaagctctacatctccttgtgattggagtgtgggtttcaagattccagaaggaggaaaaaaagcaagagcagaagtcgtagtcatgaacgaaagagaagcaaaagtaaggaacggaagcgaagtagagacagagaaaggaaaaagagcaaaagccgtgaaagaaagcgaagtagaagcaaagagaggcgacggagccgctcaagaagtcgagatcgaagatttagaggccgctacagaagtccttactccggaccaaaatttaacagtgccatccgaggaaagattgggttgcctcatagcatcaaattaagcagacgacgttcccgaagcaaaagtccattcagaaaagacaagagccctgtgagagaacctattgataatttaactcctgaggaaagagatgcaaggacagtcttctgtatgcagctggcggcaagaattcgaccaagggatttggaagagtttttctctacagtaggaaaggttcgagatgtgaggatgatttctgacagaaattcaagacgttccaaaggaattgcttatgtggagttcgtcgatgttagctcagtgcctctagcaataggattaactggccaacgagttttaggcgtgccaatcatagtacaggcatcacaggcagaaaaaaacagagctgcagcaatggcaaacaatttacaaaagggaagtgctggacctatgaggctttatgtgggctcattacacttcaacataactgaagatatgcttcgtgggatctttgagccttttggaagaattgaaagtatccagctgatgatggacagtgaaactggtcgatccaagggatatggatttattacattttctgactcagaatgtgccaaaaaggctttggaacaacttaatggatttgaactagcaggaagaccaatgaaagttggtcatgttactgaacgtactgatgcttcgagtgctagttcatttttggacagtgatgaactggaaaggactggaattgatttgggaacaactggtcgtcttcagttaatggcaagacttgcagagggtacaggtttgcagattccgccagcagcacagcaagctctacagatgagtggctctttggcatttggtgctgtggcagaattctcttttgttatagatttgcaaacaagactttcccagcagactgaagcttcagctttagctgcagctgcctctgttcagccacttgcaacacaatgtttccaactctctaacatgtttaaccctcaaacagaagaagaagttggatgggataccgagattaaggatgatgtgattgaagaatgtaataaacatggaggagttattcatatttatgttgacaaaaattcagctcagggcaatgtgtatgtgaagtgcccatcaattgctgcagctattgctgctgtcaatgcattgcatggcaggtggtttgctggtaaaatgataacagcagcatatgtacctcttccaacttaccacaacctgtttcctgattctatgacagcaacacagctactggttccaagtagacgatgaaggaagatatagtcccttatgtatatagctttttttctttcttgagaattcatcttgagttatcttttatttagataaaaataaagaggcaaggatctactgtcatttgtatgcaatttcctgttaccttgaaaaaataaaaatgttaacagg

SEQ ID NO: 3720 - DNA, 716 bp, Homo sapiens
  source 1..716: mol_type = genomic DNA
ggcagcgcgggtttttgcccggaaagaggcgctctcgttcgggtctcccagtttctgtttttggagttgacagcagagttttaaatattggatattgaagtcttcattttcgtgtgtttcgtgcgtttagagaaaatggcagacgatattgatattgaagcaatgcttgaggctccttacaagaaggatgagaacaagttgagcagtgccaacggccatgaagaacgtagcaaaaagaggaaaaaaagcaagagcagaagtcgtagtcatgaacgaaagagaagcaaaagtaaggaacggaagcgaagtagagacagagaaaggaaaaagagcaaaagccgtgaaagaaagcgaagtagaagcaaagagaggcgacggagccgctcaagaagtcgagatcgaagatttagaggccgctacagaagtccttactccggaccaaaatttaacagtgccatccgaggaaagattgggttgcctcatagcatcaaattaagcagacgacgttcccgaagcaaaagtccattcagaaaagacaagagccctgtgagagaacctattgataatttaactcctgaggaaagagatgcaaggacagtcttctgtatgcagctggcggcaagaattcgaccaagggatttggaagagtttttctctacagtaggaaaggttcgagatgtgaggatgatttctgacagaaattcaagacgttccaa

SEQ ID NO: 3721 - DNA, 1008 bp, Homo sapiens
  source 1..1008: mol_type = genomic DNA
aagtccattcagaaaagacaagagccctgtgagagaacctattgataatttaactcctgaggaaagagatgcaaggacagtcttctgtatgcagctggcggcaagaattcgaccaagggatttggaagagtttttctctacagtaggaaaggttcgagatgtgaggatgatttctgacagaaattcaagacgttccaaaggaattgcttatgtggagttcgtcgatgttagctcagtgcctctagcaataggattaactggccaacgagttttaggcgtgccaatcatagtacaggcatcacaggcagaaaaaaacagagctgcagcaatggcaaacaatttacaaaagggaagtgctggacctatgaggctttatgtgggctcattacacttcaacataactgaagatatgcttcgtgggatctttgagccttttggaagattttctgactcagaatgtgccaaaaaggctttggaacaacttaatggatttgaactagcaggaagaccaatgaaagttggtcatgttactgaacgtactgatgcttcgagtgctagttcatttttggacagtgatgaactggaaaggactggaattgatttgggaacaactggtcgtcttcagttaatggcaagacttgcagagggtacaggtttgcagattccgccagcagcacagcaagctctacagatgagtggctctttggcatttggtgctgtggcagaattctcttttgttatagatttgcaaacaagactttcccagcagactgaagcttcagctttagctgcagctgcctctgttcagccacttgcaacacaatgtttccaactctctaacatgtttaaccctcaaacagaagaagaagttggatgggataccgagattaaggatgatgtgattgaagaatgtaataaacatggaggagttattcatatttatgttgacaaaaattcagctcagggcaatgtgtatgtgaagtgcccatcaattgctgcagctattgc

SEQ ID NO: 3722 - DNA, 2109 bp, Homo sapiens
  source 1..2109: mol_type = genomic DNA
cctagccgtccttggaacccgatattcgggctgggcggttccgcggcctgggcctaggggcttaacagtagcaacagaagcggcggcggcggcagcagcagcagcagcagcagcaatctcttcccgaacacgagcaccacaggcgcccgaaggccggaacaggcgtttagagaaaatggcagacgatattgatattgaagcaatgcttgaggctccttacaagaaggatgagaacaagttgagcagtgccaacggccatgaagaacgtagcaaaaagaggaaaaaaagcaagagcagaagtcgtagtcatgaacgaaagagaagcaaaagtaaggaacggaagcgaagtagagacagagaaaggaaaaagagcaaaagccgtgaaagaaagcgaagtagaagcaaagagaggcgacggagccgctcaagaagtcgagatcgaagatttagaggccgctacagaagtccttacagacgacgttcccgaagcaaaagtccattcagaaaagacaagagccctgtgagagaacctattgataatttaactcctgaggaaagagatgcaaggacagtcttctgtatgcagctggcggcaagaattcgaccaagggatttggaagagtttttctctacagtaggaaaggttcgagatgtgaggatgatttctgacagaaattcaagacgttccaaaggaattgcttatgtggagttcgtcgatgttagctcagtgcctctagcaataggattaactggccaacgagttttaggcgtgccaatcatagtacaggcatcacaggcagaaaaaaacagagctgcagcaatggcaaacaatttacaaaagggaagtgctggacctatgaggctttatgtgggctcattacacttcaacataactgaagatatgcttcgtgggatctttgagccttttggaagaattgaaagtatccagctgatgatggacagtgaaactggtcgatccaagggatatggatttattacattttctgactcagaatgtgccaaaaaggctttggaacaacttaatggatttgaactagcaggaagaccaatgaaagttggtcatgttactgaacgtactgatgcttcgagtgctagttcatttttggacagtgatgaactggaaaggactggaattgatttgggaacaactggtcgtcttcagttaatggcaagacttgcagagggtacaggtttgcagattccgccagcagcacagcaagctctacagatgagtggctctttggcatttggtgctgtggcagaattctcttttgttatagatttgcaaacaagactttcccagcagactgaagcttcagctttagctgcagctgcctctgttcagccacttgcaacacaatgtttccaactctctaacatgtttaaccctcaaacagaagaagaagttggatgggataccgagattaaggatgatgtgattgaagaatgtaataaacatggaggagttattcatatttatgttgacaaaaattcagctcagggcaatgtgtatgtgaagtgcccatcaattgctgcagctattgctgctgtcaatgcattgcatggcaggtggtttgctggtaaaatgataacagcagcatatgtacctcttccaacttaccacaacctgtttcctgattctatgacagcaacacagctactggttccaagtagacgatgaaggaagatatagtcccttatgtatatagctttttttctttcttgagaattcatcttgagttatcttttatttagataaaaataaagaggcaaggatctactgtcatttgtatgcaatttcctgttaccttgaaaaaataaaaatgttaacaggaatgcagtgtgctcattctccctaaatagtaaatcccactgtatacaaaactgttctcttgttctgccttttaaaatgttcatgtagaaaattaatgaactataggaatagctctaggagaacaaatgtgctttctgtaaaaaggcagaccagggatgtaatgtttttaatgtttcagaagcctaactttttacacagtggttacatttcacatttcactaatgttgatatttggctgatggttgagcagtttc

SEQ ID NO: 3723 - DNA, 2012 bp, Homo sapiens
  source 1..2012: mol_type = genomic DNA
ctcgttgcgcagtagtgctagcggcttcgcggttcggtcctcgcacccggcagccgccactggtgctgagctgctaggaagcccctatcgccgagctcgttggagcttgaacccattgtcacccctccgactcaccggcccaaaaaaaaaaaaacatggttgaagcagatcgcccaggaaagctcttcattggtgggcttaatacggaaacaaatgagaaagctcttgaagcagtatttggcaaatatggacgaatagtggaagtactcttgatgaaagaccgtgaaaccaacaaatcaagaggatttgcttttgtcacctttgaaagcccagcagacgctaaggatgcagccagagacatgaatggaaagtcattagatggaaaagccatcaaggtggaacaagccaccaaaccatcatttgaaagtggtagacgtggaccgcctccacctccaagaagtagaggccctccaagaggtcttagaggtggaagaggaggaagtggaggaaccaggggacctccctcacggggaggacacatggatgacggtggatattccatgaattttaacatgagttcttccaggggaccactcccagtaaaaagaggaccaccaccaagaagtgggggtcctcctcctaagagatctgcaccttcaggaccagttcgcagtagcagtggaatgggaggaagagctcctgtatcacgtggaagagatagttatggaggtccacctcgaagggaaccgctgccctctcgtagagatgtttatttgtccccaagagatgatgggtattctactaaagacagctattcaagcagagattacccaagttctcgtgatactagagattatgcaccaccaccacgagattatacttaccgtgattatggtcattccagttcacgtgatgactatccatcaagaggatatagcgatagagatggatatggtcgtgatcgtgactattcagatcatccaagtggaggttcctacagagattcatatgagagttatggtaactcacgtagtgctccacctacacgagggcccccgccatcttatggtggaagcagtcgctatgatgattacagcagctcacgtgacggatatggtggaagtcgagacagttactcaagcagccgaagtgatctctactcaagtggtcgtgatcgggttggcagacaagaaagagggcttcccccttctatggaaagggggtaccctcctccacgtgattcctacagcagttcaagccgcggagcaccaagaggtggtggccgtggaggaagccgatctgatagagggggaggcagaagcagatactagaaacaaacaaaactttggaccaaaatcccagttcaaagaaacaaaaagtggaaactattctatcataactacccaaggactactaaaaggaaaaattgtgttactttttttaaattccctgttaagttcccctccataatttttatgttcttgtgaggaaaaaagtaaaacatgtttaattttatttgactttcgcattgcttttcaacaagcaaatgttaaatgtgttaagacttgtactagtgttgtaactttccaagtaaaagtatcccctaaaggccacttcctatctgatttttcccagcaaatgaggcaggcaattctaagatcttccacaaaacatctagccatctaaaatggagagatgaatcattctacctatacaaacaagctagctattagagggtggttggggtatgctactcataagatttcagggtgtcttccaactgaaatctcaatgttctcagtacgaaaaacctgaaatcacatgcctatgtaaggaaagtgctattcacccagtaaacccaaaaaagcaaatggataatgctggccattttgcctttctgacatttccttgggaatctgcaagaacctcccctttcccttcccccaataagaccatttaagtgtgtgttaaacaactacagaatactaaataaaaagtttggccaaaaccaa

SEQ ID NO: 3724 - DNA, 671 bp, Homo sapiens
  source 1..671: mol_type = genomic DNA
gatgtttatttgtccccaagagatgatgggtattctactaaagacagctattcaagcagagattacccaagttctcgtgatactagagattatgcaccaccaccacgagattatacttaccgtgattatggtcattccagttcacgtgatgactatccatcaagaggatatagcgatagagatggatatggtcgtgatcgtgactattcagatcatccaagtggaggttcctacagagattcatatgagagttatggttggtgattttgctcattatggtcgtggagtgctgattgattcacagtagataaagctggcagtaagaaatgctaagagttgttgaagcagaaggcggctgattgtcaataagtcactacagttgcataagcagtgctgtcagaattggtttggtgcaggcaatagattttgccttcaggggttcctgtggatctgaggaaggcatcagtgttgattaacactcataactagggagtgactggtagttacttaaagcaagtaattgaccaaatggaaaaggggaagtaattaaggaaattggtaagtggaggtagtcaggaagttcttgtggttcttcacatagattttacagctttggctttcattttgtttagctaaagtcatggggacaactcttcaatttagaacttaag

SEQ ID NO: 3725 - DNA, 2052 bp, Homo sapiens
  source 1..2052: mol_type = genomic DNA
ggtccttcagcctcgttcccgggcagtataaagtttgctgtctcctttgttcgccctcgttgcgcagtagtgctagcggcttcgcggttcggtcctcgcacccggcagccgccactggtgctgagctgctaggaagcccctatcgccgagctcgttggagcttgaacccattgtcacccctccgactcaccggcccaaaaaaaaaaaaacatggttgaagcagatcgcccaggaaagctcttcattggtgggcttaatacggaaacaaatgagaaagctcttgaagcagtatttggcaaatatggacgaatagtggaagtactcttgatgaaagaccgtgaaaccaacaaatcaagaggatttgcttttgtcacctttgaaagcccagcagacgctaaggatgcagccagagacatgaatggaaagctcctgtatcacgtggaagagatagttatggaggtccacctcgaagggaaccgctgccctctcgtagagatgtttatttgtccccaagagatgatgggtattctactaaagacagctattcaagcagagattacccaagttctcgtgatactagagattatgcaccaccaccacgagattatacttaccgtgattatggtcattccagttcacgtgatgactatccatcaagaggatatagcgatagagatggatatggtcgtgatcgtgactattcagatcatccaagtggaggttcctacagagattcatatgagagttatggttggtgattttgctcattatggtcgtggagtgctgattgattcacagtagataaagctggcagtaagaaatgctaagagttgttgaagcagaaggcggctgattgtcaataagtcactacagttgcataagcagtgctgtcagaattggtttggtgcaggcaatagattttgccttcaggggttcctgtggatctgaggaaggcatcagtgttgattaacactcataactagggagtgactggtagttacttaaagcaagtaattgaccaaatggaaaaggggaagtaattaaggaaattggtaagtggaggtagtcaggaagttcttgtggttcttcacatagattttacagctttggctttcattttgtttagctaaagtcatggggacaactcttcaatttagaacttaagttgaattataaaaatgatggatataagtggtagctgtatctagtgaagtgtctgtcagtaagtgaaacattttttggtggtggcttatccacaaacagtttagttgtagaataaaacttatgagtgacatctggaaagtaaccatgctaagatggcaagcacactggaaacaattaggccacttggctttcttttgctgtattgttttataagcctactttacctcccagtcttggaaacaagttttagttttttattggtttggagactagagccaatagtataatgttctcaaaggaaacagacttgagttgttggattagaggaactaacccaacttatatgattttttttttgtttttgtcgtgtagttatggcactgtcttatttggaacatttgcaactagggataatacaacatttttaactctcatttgacaacctactactaatcacagaccacaagggtaatgaccaaatttatgtggtttttgcactccatagttgtcttagcccaatctttctatactcttacgattacttgggttaacgcttctgtgaggaccttctggctcttgagataccctaaatatttaagatatttagatatcttgaagatagtataggatatagagattgtaccaaataggaatataaggagtatgttaaaatgaccagatacctgtttgatagtttactgacctagcagatgtgtggaaaaggaatcagatcttgattcttctgggtttatactggttgtaaaacagaatgatacagaaaatgttttccttgtttaactggtagttgaacatagaacttgggtattatagatcacttttcactttttggaatgttttgtattgaaacttaataaaactttaacatgg

SEQ ID NO: 3726 - DNA, 1948 bp, Homo sapiens
  source 1..1948: mol_type = genomic DNA
ctcgttgcgcagtagtgctagcggcttcgcggttcggtcctcgcacccggcagccgccactggtgctgagctgctaggaagcccctatcgccgagctcgttggagcttgaacccattgtcacccctccgactcaccggcccaaaaaaaaaaaaacatggttgaagcagatcgcccaggaaagctcttcattggtgggcttaatacggaaacaaatgagaaagctcttgaagcagtatttggcaaatatggacgaatagtggaagtactcttgatgaaagaccgtgaaagcccagcagacgctaaggatgcagccagagacatgaatggaaagtcattagatggaaaagccatcaaggtggaacaagccaccaaaccatcatttgaaagtggtagacgtggaccgcctccacctccaagaagtagaggccctccaagaggtcttagaggtggaagaggaggaagtggaggaaccaggggacctccctcacggggaggacacatggatgacggtggatattccatgaattttaacatgagttcttccaggggaccactcccagtaaaaagaggaccaccaccaagaagtgggggtcctcctcctaagagatctgcaccttcaggaccagttcgcagtagcagtggaatgggaggaagagctcctgtatcacgtggaagagatagttatggaggtccacctcgaagggaaccgctgccctctcgtagagatgtttatttgtccccaagagatgatgggtattctactaaagacagctattcaagcagagattacccaagttctcgtgatactagagattatgcaccaccaccacgagattatacttaccgtgattatggtcattccagttcacgtgatgactatccatcaagaggatatagcgatagagatggatatggtcgtgatcgtgactattcagatcatccaagtggaggttcctacagagattcatatgagagttatggtaactcacgtagtgctccacctacacgagggcccccgccatcttatggtggaagcagtcgctatgatgattacagcagctcacgtgacggatatggtggaagtcgagacagttactcaagcagccgaagtgatctctactcaagtggtcgtgatcgggttggcagacaagaaagagggcttcccccttctatggaaagggggtaccctcctccacgtgattcctacagcagttcaagccgcggagcaccaagaggtggtggccgtggaggaagccgatctgatagagggggaggcagaagcagatactagaaacaaacaaaactttggaccaaaatcccagttcaaagaaacaaaaagtggaaactattctatcataactacccaaggactactaaaaggaaaaattgtgttactttttttaaattccctgttaagttcccctccataatttttatgttcttgtgaggaaaaaagtaaaacatgtttaattttatttgactttcgcattgcttttcaacaagcaaatgttaaatgtgttaagacttgtactagtgttgtaactttccaagtaaaagtatcccctaaaggccacttcctatctgatttttcccagcaaatgaggcaggcaattctaagatcttccacaaaacatctagccatctaaaatggagagatgaatcattctacctatacaaacaagctagctattagagggtggttggggtatgctactcataagatttcagggtgtcttccaactgaaatctcaatgttctcagtacgaaaaacctgaaatcacatgcctatgtaaggaaagtgctattcacccagtaaacccaaaaaagcaaatggataatgctggccattttgcctttctgacatttccttgggaatctgcaagaacctcccctttcccttcccccaataagaccatttaagtgtgtgttaaacaactacagaatact

SEQ ID NO: 3727 - DNA, 6222 bp, Homo sapiens
  source 1..6222: mol_type = genomic DNA
ggaaaggggaacagttaaatttgtaatttgggttgtgtgaaaacttctttgggcctcataaacaaccacagaaccacaagttgggtagcctggcagtgtcagaagtctgaacccagcatagtggtcagcaggcaggacgaatcacactgaatgcaaaccacagggtttcgcagcgtggtgagcatcaccaacccacagccaaggcggcgctggctttttttttttttttaatctttaacaatttgaatatttgtttttacaaaggtgcattttttaatagggcttggggagtcccagaggtatccagcagaggggagaagaaagagagatgtagggctagaggggtgaggctgaaacagtgacctgtcttggttttcgctccgaaggtaaaagaaatcattgagtcccccgccttcagaagagggtgcattttcaggaggaagcgatggcttcagacagcatatttgagtcatttccttcgtacccacagtgcttcatgagagaatgcatacttggaatgaatccttctagagacgtccacgatgccagcacgagccgccgcttcacgccgccttccaccgcgctgagcccaggcaagatgagcgaggcgttgccgctgggcgccccggacgccggcgctgccctggccggcaagctgaggagcggcgaccgcagcatggtggaggtgctggccgaccacccgggcgagctggtgcgcaccgacagccccaacttcctctgctccgtgctgcctacgcactggcgctgcaacaagaccctgcccatcgctttcaaggtggtggccctaggggatgttccagatggcactctggtcactgtgatggctggcaatgatgaaaactactcggctgagctgagaaatgctaccgcagccatgaagaaccaggttgcaagatttaatgacctcaggtttgtcggtcgaagtggaagagggaaaagcttcactctgaccatcactgtcttcacaaacccaccgcaagtcgccacctaccacagagccatcaaaatcacagtggatgggccccgagaacctcgaagacatcggcagaaactagatgatcagaccaagcccgggagcttgtccttttccgagcggctcagtgaactggagcagctgcggcgcacagccatgagggtcagcccacaccacccagcccccacgcccaaccctcgtgcctccctgaaccactccactgcctttaaccctcagcctcagagtcagatgcaggatacaaggcagatccaaccatccccaccgtggtcctacgatcagtcctaccaatacctgggatccattgcctctccttctgtgcacccagcaacgcccatttcacctggacgtgccagcggcatgacaaccctctctgcagaactttccagtcgactctcaacggcacccgacctgacagcgttcagcgacccgcgccagttccccgcgctgccctccatctccgacccccgcatgcactatccaggcgccttcacctactccccgacgccggtcacctcgggcatcggcatcggcatgtcggccatgggctcggccacgcgctaccacacctacctgccgccgccctaccccggctcgtcgcaagcgcagggaggcccgttccaagccagctcgccctcctaccacctgtactacggcgcctcggccggctcctaccagttctccatggtgggcggcgagcgctcgccgccgcgcatcctgccgccctgcaccaacgcctccaccggctccgcgctgctcaaccccagcctcccgaaccagagcgacgtggtggaggccgagggcagccacagcaactcccccaccaacatggcgccctccgcgcgcctggaggaggccgtgtggaggccctactgaggcgccaggcctggcccggctgggccccgcgggccgccgccttcgcctccgggcgcgcgggcctcctgttcgcgacaagcccgccgggatcccgggccctgggcccggccaccgtcctggggccgagggcgcccgacggccaggatctcgctgtaggtcaggcccgcgcagcctcctgcgcccagaagcccacgccgccgccgtctgctggcgccccggccctcgcggaggtgtccgaggcgacgcacctcgagggtgtccgccggccccagcacccaggggacgcgctggaaagcaaacaggaagattcccggagggaaactgtgaatgcttctgatttagcaatgctgtgaataaaaagaaagattttatacccttgacttaactttttaaccaagttgtttattccaaagagtgtggaattttggttggggtggggggagaggagggatgcaactcgccctgtttggcatctaattcttatttttaatttttccgcaccttatcaattgcaaaatgcgtatttgcatttgggtggtttttatttttatatacgtttatataaatatatataaattgagcttgcttctttcttgctttgaccatggaaagaaatatgattcccttttctttaagttttatttaacttttcttttggacttttgggtagttgtttttttttgttttgttttgtttttttgagaaacagctacagctttgggtcatttttaactactgtattcccacaaggaatccccagatatttatgtatcttgatgttcagacatttatgtgttgataattttttaattatttaaatgtacttatattaagaaaaatatcaagtactacattttcttttgttcttgatagtagccaaagttaaatgtatcacattgaagaaggctagaaaaaaagaatgagtaatgtgatcgcttggttatccagaagtattgtttacattaaactccctttcatgttaatcaaacaagtgagtagctcacgcagcaacgtttttaataggatttttagacactgagggtcactccaaggatcagaagtatggaattttctgccaggctcaacaagggtctcatatctaacttcctccttaaaacagagaaggtcaatctagttccagagggttgaggcaggtgccaataattacatctttggagaggatttgatttctgcccagggatttgctcaccccaaggtcatctgataatttcacagatgctgtgtaacagaacacagccaaagtaaactgtgtaggggagccacatttacataggaaccaaatcaatgaatttaggggttacgattatagcaatttaagggcccaccagaagcaggcctcgaggagtcaatttgcctctgtgtgcctcagtggagacaagtgggaaaacatggtcccacctgtgcgagaccccctgtcctgtgctgctcactcaacaacatctttgtgttgctttcaccaggctgagaccctaccctatggggtatatgggcttttacctgtgcaccagtgtgacaggaaagattcatgtcactactgtccgtggctacaattcaaaggtatccaatgtcgctgtaaattttatggcactatttttattggaggatttggtcagaatgcagttgttgtacaactcataaatactaactgctgattttgacacatgtgtgctccaaatgatctggtggttatttaacgtacctcttaaaattcgttgaaacgatttcaggtcaactctgaagagtatttgaaagcaggacttcagaacagtgtttgatttttattttataaatttaagcattcaaattaggcaaatctttggctgcaggcagcaaaaacagctggacttatttaaaacaacttgtttttgagttttcttatatatatattgattatttgttttacacacatgcagtagcactttggtaagagttaaagagtaaagcagcttatgttgtcaggtcgttcttatctagagaagagctatagcagatctcggacaaactcagaatatattcactttcatttttgacaggattccctccacaactcagtttcatatattattccgtattacatttttgcagctaaattaccataaaatgtcagcaaatgtaaaaatttaatttctgaaaagcaccattagcccatttcccccaaattaaacgtaaatgttttttttcagcacatgttaccatgtctgacctgcaaaaatgctggagaaaaatgaaggaaaaaattatgtttttcagtttaattctgttaactgaagatattccaactcaaaaccagcctcatgctctgattagataatcttttacattgaacctttactctcaaagccatgtgtggagggggcttgtcactattgtaggctcactggattggtcatttagagtttcacagactcttaccagcatatatagtatttaattgtttcaaaaaaaatcaaactgtagttgttttggcgataggtctcacgcaacacatttttgtatgtgtgtgtgtgtgcgtgtgtgtgtgtgtgtgtgaaaaattgcattcattgacttcaggtagattaaggtatctttttattcattgccctcaggaaagttaaggtatcaatgagacccttaagccaatcatgtaataactgcatgtgtctggtccaggagaagtattgaataagccatttctactgcttactcatgtccctatttatgatttcaacatggatacatatttcagttctttctttttctcactatctgaaaatacatttccctccctctcttccccccaatatctccctttttttctctcttcctctatcttccaaaccccactttctccctcctccttttcctgtgttctcttaagcagatagcacatacccccacccagtaccaaatttcagaacacaagaaggtccagttcttcccccttcacataaaggaacatggtttgtcagcctttctcctgtttatgggtttcttccagcagaacagagacattgccaaccatattggatctgcttgctgtccaaaccagcaaactttcctgggcaaatcacaatcagtgagtaaatagacagcctttctgctgccttgggtttctgtgcagataaacagaaatgctctgattagaaaggaaatgaatggttccactcaaatgtcctgcaatttaggattgcagatttctgccttgaaatacctgtttctttgggacattccgtcctgatgatttttatttttgttggtttttatttttggggggaatgacatgtttgggtcttttatacatgaaaatttgtttgacaataatctcacaaaacatattttacatctgaacaaaatgcctttttgtttaccgtagcgtatacatttgttttgggatttttgtgtgtttgttgggaattttgtttttagccaggtcagtattgatgaggctgatcatttggctctttttttccttccagaagagttgcatcaacaaagttaattgtatttatgtatgtaaatagattttaagcttcattataaaatattgttaatgcctataactttttttcaatttttttgtgtgtgtttctaaggactttttcttaggtttgctaaatactgtagggaaaaaaatgcttctttctactttgtttattttagactttaaaatgagctacttcttattcacttttgtaaacagctaatagcatggttccaattttttttaagttcactttttttgttctaggggaaatgaatgtgcaaaaaaagaaaaagaactgttggttatttgtgttattctggatgtataaaaatcaatggaaaaaaataaactttcaaattgaaatgacggtataacacatctactgaaaaagcaacgggaaatgtggtcctatttaagccagcccccacctagggtctatttgtgtggcagttattgggtttggtcacaaaacatcctgaaaattcgtgcgtgggcttctttctccctggtacaaacgtatggaatgcttcttaaaggggaactgtcaagctggtgtcttcagccagatgacatgagagaatatcccagaaccctctctccaaggtgtttctagatagcacaggagagcaggcactgcactgtccacagtccacggtacacagtcgggtgggccgcctcccctctcctgggagcattcgtcgtgcccagcctgagcagggcagctggactgctgctgttcaggagccaccagagccttcctctctttgtaccacagtttcttctgtaaatccagtgttacaatcagtgtgaatggcaaataaacagtttgacaagtacatacaccata

SEQ ID NO: 3728 - DNA, 5741 bp, Homo sapiens
  source 1..5741: mol_type = genomic DNA
atgcccgcagcaccgcggggaccggcgcagggggaagcggccgcccgcacgcgaagccgggatgccagcacgagccgccgcttcacgccgccttccaccgcgctgagcccaggcaagatgagcgaggcgttgccgctgggcgccccggacgccggcgctgccctggccggcaagctgaggagcggcgaccgcagcatggtggaggtgctggccgaccacccgggcgagctggtgcgcaccgacagccccaacttcctctgctccgtgctgcctacgcactggcgctgcaacaagaccctgcccatcgctttcaaggtggtggccctaggggatgttccagatggcactctggtcactgtgatggctggcaatgatgaaaactactcggctgagctgagaaatgctaccgcagccatgaagaaccaggttgcaagatttaatgacctcaggtttgtcggtcgaagtggaagagggaaaagcttcactctgaccatcactgtcttcacaaacccaccgcaagtcgccacctaccacagagccatcaaaatcacagtggatgggccccgagaacctcgaagacatcggcagaaactagatgatcagaccaagcccgggagcttgtccttttccgagcggctcagtgaactggagcagctgcggcgcacagccatgagggtcagcccacaccacccagcccccacgcccaaccctcgtgcctccctgaaccactccactgcctttaaccctcagcctcagagtcagatgcaggatacaaggcagatccaaccatccccaccgtggtcctacgatcagtcctaccaatacctgggatccattgcctctccttctgtgcacccagcaacgcccatttcacctggacgtgccagcggcatgacaaccctctctgcagaactttccagtcgactctcaacggcacccgacctgacagcgttcagcgacccgcgccagttccccgcgctgccctccatctccgacccccgcatgcactatccaggcgccttcacctactccccgacgccggtcacctcgggcatcggcatcggcatgtcggccatgggctcggccacgcgctaccacacctacctgccgccgccctaccccggctcgtcgcaagcgcagggaggcccgttccaagccagctcgccctcctaccacctgtactacggcgcctcggccggctcctaccagttctccatggtgggcggcgagcgctcgccgccgcgcatcctgccgccctgcaccaacgcctccaccggctccgcgctgctcaaccccagcctcccgaaccagagcgacgtggtggaggccgagggcagccacagcaactcccccaccaacatggcgccctccgcgcgcctggaggaggccgtgtggaggccctactgaggcgccaggcctggcccggctgggccccgcgggccgccgccttcgcctccgggcgcgcgggcctcctgttcgcgacaagcccgccgggatcccgggccctgggcccggccaccgtcctggggccgagggcgcccgacggccaggatctcgctgtaggtcaggcccgcgcagcctcctgcgcccagaagcccacgccgccgccgtctgctggcgccccggccctcgcggaggtgtccgaggcgacgcacctcgagggtgtccgccggccccagcacccaggggacgcgctggaaagcaaacaggaagattcccggagggaaactgtgaatgcttctgatttagcaatgctgtgaataaaaagaaagattttatacccttgacttaactttttaaccaagttgtttattccaaagagtgtggaattttggttggggtggggggagaggagggatgcaactcgccctgtttggcatctaattcttatttttaatttttccgcaccttatcaattgcaaaatgcgtatttgcatttgggtggtttttatttttatatacgtttatataaatatatataaattgagcttgcttctttcttgctttgaccatggaaagaaatatgattcccttttctttaagttttatttaacttttcttttggacttttgggtagttgtttttttttgttttgttttgtttttttgagaaacagctacagctttgggtcatttttaactactgtattcccacaaggaatccccagatatttatgtatcttgatgttcagacatttatgtgttgataattttttaattatttaaatgtacttatattaagaaaaatatcaagtactacattttcttttgttcttgatagtagccaaagttaaatgtatcacattgaagaaggctagaaaaaaagaatgagtaatgtgatcgcttggttatccagaagtattgtttacattaaactccctttcatgttaatcaaacaagtgagtagctcacgcagcaacgtttttaataggatttttagacactgagggtcactccaaggatcagaagtatggaattttctgccaggctcaacaagggtctcatatctaacttcctccttaaaacagagaaggtcaatctagttccagagggttgaggcaggtgccaataattacatctttggagaggatttgatttctgcccagggatttgctcaccccaaggtcatctgataatttcacagatgctgtgtaacagaacacagccaaagtaaactgtgtaggggagccacatttacataggaaccaaatcaatgaatttaggggttacgattatagcaatttaagggcccaccagaagcaggcctcgaggagtcaatttgcctctgtgtgcctcagtggagacaagtgggaaaacatggtcccacctgtgcgagaccccctgtcctgtgctgctcactcaacaacatctttgtgttgctttcaccaggctgagaccctaccctatggggtatatgggcttttacctgtgcaccagtgtgacaggaaagattcatgtcactactgtccgtggctacaattcaaaggtatccaatgtcgctgtaaattttatggcactatttttattggaggatttggtcagaatgcagttgttgtacaactcataaatactaactgctgattttgacacatgtgtgctccaaatgatctggtggttatttaacgtacctcttaaaattcgttgaaacgatttcaggtcaactctgaagagtatttgaaagcaggacttcagaacagtgtttgatttttattttataaatttaagcattcaaattaggcaaatctttggctgcaggcagcaaaaacagctggacttatttaaaacaacttgtttttgagttttcttatatatatattgattatttgttttacacacatgcagtagcactttggtaagagttaaagagtaaagcagcttatgttgtcaggtcgttcttatctagagaagagctatagcagatctcggacaaactcagaatatattcactttcatttttgacaggattccctccacaactcagtttcatatattattccgtattacatttttgcagctaaattaccataaaatgtcagcaaatgtaaaaatttaatttctgaaaagcaccattagcccatttcccccaaattaaacgtaaatgttttttttcagcacatgttaccatgtctgacctgcaaaaatgctggagaaaaatgaaggaaaaaattatgtttttcagtttaattctgttaactgaagatattccaactcaaaaccagcctcatgctctgattagataatcttttacattgaacctttactctcaaagccatgtgtggagggggcttgtcactattgtaggctcactggattggtcatttagagtttcacagactcttaccagcatatatagtatttaattgtttcaaaaaaaatcaaactgtagttgttttggcgataggtctcacgcaacacatttttgtatgtgtgtgtgtgtgcgtgtgtgtgtgtgtgtgtgaaaaattgcattcattgacttcaggtagattaaggtatctttttattcattgccctcaggaaagttaaggtatcaatgagacccttaagccaatcatgtaataactgcatgtgtctggtccaggagaagtattgaataagccatttctactgcttactcatgtccctatttatgatttcaacatggatacatatttcagttctttctttttctcactatctgaaaatacatttccctccctctcttccccccaatatctccctttttttctctcttcctctatcttccaaaccccactttctccctcctccttttcctgtgttctcttaagcagatagcacatacccccacccagtaccaaatttcagaacacaagaaggtccagttcttcccccttcacataaaggaacatggtttgtcagcctttctcctgtttatgggtttcttccagcagaacagagacattgccaaccatattggatctgcttgctgtccaaaccagcaaactttcctgggcaaatcacaatcagtgagtaaatagacagcctttctgctgccttgggtttctgtgcagataaacagaaatgctctgattagaaaggaaatgaatggttccactcaaatgtcctgcaatttaggattgcagatttctgccttgaaatacctgtttctttgggacattccgtcctgatgatttttatttttgttggtttttatttttggggggaatgacatgtttgggtcttttatacatgaaaatttgtttgacaataatctcacaaaacatattttacatctgaacaaaatgcctttttgtttaccgtagcgtatacatttgttttgggatttttgtgtgtttgttgggaattttgtttttagccaggtcagtattgatgaggctgatcatttggctctttttttccttccagaagagttgcatcaacaaagttaattgtatttatgtatgtaaatagattttaagcttcattataaaatattgttaatgcctataactttttttcaatttttttgtgtgtgtttctaaggactttttcttaggtttgctaaatactgtagggaaaaaaatgcttctttctactttgtttattttagactttaaaatgagctacttcttattcacttttgtaaacagctaatagcatggttccaattttttttaagttcactttttttgttctaggggaaatgaatgtgcaaaaaaagaaaaagaactgttggttatttgtgttattctggatgtataaaaatcaatggaaaaaaataaactttcaaattgaaatgacggtataacacatctactgaaaaagcaacgggaaatgtggtcctatttaagccagcccccacctagggtctatttgtgtggcagttattgggtttggtcacaaaacatcctgaaaattcgtgcgtgggcttctttctccctggtacaaacgtatggaatgcttcttaaaggggaactgtcaagctggtgtcttcagccagatgacatgagagaatatcccagaaccctctctccaaggtgtttctagatagcacaggagagcaggcactgcactgtccacagtccacggtacacagtcgggtgggccgcctcccctctcctgggagcattcgtcgtgcccagcctgagcagggcagctggactgctgctgttcaggagccaccagagccttcctctctttgtaccacagtttcttctgtaaatccagtgttacaatcagtgtgaatggcaaataaacagtttgacaagtacatacaccata

SEQ ID NO: 3729 - DNA, 7274 bp, Homo sapiens
  source 1..7274: mol_type = genomic DNA
catagagccagcgggcgcgggcgggacgggcgccccgcggccggacccagccagggcaccacgctgcccggccctgcgccgccaggcacttctttccggggctcctagggacgccagaaggaagtcaacctctgctgcttctccttggcctgcgttggaccttcctttttttgttgtttttttttgtttttcccctttcttccttttgaattaactggcttcttggctggatgttttcaacttctttcctggctgcgaacttttccccaattgttttccttttacaacagggggagaaagtgctctgtggtccgaggcgagccgtgaagttgcgtgtgcgtggcagtgtgcgtggcaggatgtgcgtgcgtgtgtaacccgagccgcccgatctgtttcgatctgcgccgcggagccctccctcaaggcccgctccacctgctgcggttacgcggcgctcgtgggtgttcgtgcctcggagcagctaaccggcgggtgctgggcgacggtggaggagtatcgtctcgctgctgcccgagtcagggctgagtcacccagctgatgtagacagtggctgccttccgaagagtgcgtgtttgcatgtgtgtgactctgcggctgctcaactcccaacaaaccagaggaccagccacaaacttaaccaacatccccaaacccgagttcacagatgtgggagagctgtagaaccctgagtgtcatcgactgggccttcttatgattgttgttttaagattagctgaagatctctgaaacgctgaattttctgcactgagcgttttgacagaattcattgagagaacagagaacatgacaagtacttctagctcagcactgctccaactactgaagctgattttcaaggctacttaaaaaaatctgcagcgtacattaatggatttctgttgtgtttaaattctccacagattgtattgtaaatattttatgaagtagagcatatgtatatatttatatatacgtgcacatacattagtagcactacctttggaagtctcagctcttgcttttcgggactgaagccagttttgcatgataaaagtggccttgttacgggagataattgtgttctgttgggactttagacaaaactcacctgcaaaaaactgacaggcattaactactggaacttccaaataatgtgtttgctgatcgttttactcttcgcataaatattttaggaagtgtatgagaattttgccttcaggaacttttctaacagccaaagacagaacttaacctctgcaagcaagattcgtggaagatagtctccactttttaatgcactaagcaatcggttgctaggagcccatcctgggtcagaggccgatccgcagaaccagaacgttttcccctcctggactgttagtaacttagtctccctcctcccctaaccacccccgcccccccccaccccccgcagtaataaaggcccctgaacgtgtatgttggtctcccgggagctgcttgctgaagatccgcgcccctgtcgccgtctggtaggagctgtttgcagggtcctaactcaatcggcttgttgtgatgcgtatccccgtagatgccagcacgagccgccgcttcacgccgccttccaccgcgctgagcccaggcaagatgagcgaggcgttgccgctgggcgccccggacgccggcgctgccctggccggcaagctgaggagcggcgaccgcagcatggtggaggtgctggccgaccacccgggcgagctggtgcgcaccgacagccccaacttcctctgctccgtgctgcctacgcactggcgctgcaacaagaccctgcccatcgctttcaaggtggtggccctaggggatgttccagatggcactctggtcactgtgatggctggcaatgatgaaaactactcggctgagctgagaaatgctaccgcagccatgaagaaccaggttgcaagatttaatgacctcaggtttgtcggtcgaagtggaagagggaaaagcttcactctgaccatcactgtcttcacaaacccaccgcaagtcgccacctaccacagagccatcaaaatcacagtggatgggccccgagaacctcgaagacatcggcagaaactagatgatcagaccaagcccgggagcttgtccttttccgagcggctcagtgaactggagcagctgcggcgcacagccatgagggtcagcccacaccacccagcccccacgcccaaccctcgtgcctccctgaaccactccactgcctttaaccctcagcctcagagtcagatgcaggatacaaggcagatccaaccatccccaccgtggtcctacgatcagtcctaccaatacctgggatccattgcctctccttctgtgcacccagcaacgcccatttcacctggacgtgccagcggcatgacaaccctctctgcagaactttccagtcgactctcaacggcacccgacctgacagcgttcagcgacccgcgccagttccccgcgctgccctccatctccgacccccgcatgcactatccaggcgccttcacctactccccgacgccggtcacctcgggcatcggcatcggcatgtcggccatgggctcggccacgcgctaccacacctacctgccgccgccctaccccggctcgtcgcaagcgcagggaggcccgttccaagccagctcgccctcctaccacctgtactacggcgcctcggccggctcctaccagttctccatggtgggcggcgagcgctcgccgccgcgcatcctgccgccctgcaccaacgcctccaccggctccgcgctgctcaaccccagcctcccgaaccagagcgacgtggtggaggccgagggcagccacagcaactcccccaccaacatggcgccctccgcgcgcctggaggaggccgtgtggaggccctactgaggcgccaggcctggcccggctgggccccgcgggccgccgccttcgcctccgggcgcgcgggcctcctgttcgcgacaagcccgccgggatcccgggccctgggcccggccaccgtcctggggccgagggcgcccgacggccaggatctcgctgtaggtcaggcccgcgcagcctcctgcgcccagaagcccacgccgccgccgtctgctggcgccccggccctcgcggaggtgtccgaggcgacgcacctcgagggtgtccgccggccccagcacccaggggacgcgctggaaagcaaacaggaagattcccggagggaaactgtgaatgcttctgatttagcaatgctgtgaataaaaagaaagattttatacccttgacttaactttttaaccaagttgtttattccaaagagtgtggaattttggttggggtggggggagaggagggatgcaactcgccctgtttggcatctaattcttatttttaatttttccgcaccttatcaattgcaaaatgcgtatttgcatttgggtggtttttatttttatatacgtttatataaatatatataaattgagcttgcttctttcttgctttgaccatggaaagaaatatgattcccttttctttaagttttatttaacttttcttttggacttttgggtagttgtttttttttgttttgttttgtttttttgagaaacagctacagctttgggtcatttttaactactgtattcccacaaggaatccccagatatttatgtatcttgatgttcagacatttatgtgttgataattttttaattatttaaatgtacttatattaagaaaaatatcaagtactacattttcttttgttcttgatagtagccaaagttaaatgtatcacattgaagaaggctagaaaaaaagaatgagtaatgtgatcgcttggttatccagaagtattgtttacattaaactccctttcatgttaatcaaacaagtgagtagctcacgcagcaacgtttttaataggatttttagacactgagggtcactccaaggatcagaagtatggaattttctgccaggctcaacaagggtctcatatctaacttcctccttaaaacagagaaggtcaatctagttccagagggttgaggcaggtgccaataattacatctttggagaggatttgatttctgcccagggatttgctcaccccaaggtcatctgataatttcacagatgctgtgtaacagaacacagccaaagtaaactgtgtaggggagccacatttacataggaaccaaatcaatgaatttaggggttacgattatagcaatttaagggcccaccagaagcaggcctcgaggagtcaatttgcctctgtgtgcctcagtggagacaagtgggaaaacatggtcccacctgtgcgagaccccctgtcctgtgctgctcactcaacaacatctttgtgttgctttcaccaggctgagaccctaccctatggggtatatgggcttttacctgtgcaccagtgtgacaggaaagattcatgtcactactgtccgtggctacaattcaaaggtatccaatgtcgctgtaaattttatggcactatttttattggaggatttggtcagaatgcagttgttgtacaactcataaatactaactgctgattttgacacatgtgtgctccaaatgatctggtggttatttaacgtacctcttaaaattcgttgaaacgatttcaggtcaactctgaagagtatttgaaagcaggacttcagaacagtgtttgatttttattttataaatttaagcattcaaattaggcaaatctttggctgcaggcagcaaaaacagctggacttatttaaaacaacttgtttttgagttttcttatatatatattgattatttgttttacacacatgcagtagcactttggtaagagttaaagagtaaagcagcttatgttgtcaggtcgttcttatctagagaagagctatagcagatctcggacaaactcagaatatattcactttcatttttgacaggattccctccacaactcagtttcatatattattccgtattacatttttgcagctaaattaccataaaatgtcagcaaatgtaaaaatttaatttctgaaaagcaccattagcccatttcccccaaattaaacgtaaatgttttttttcagcacatgttaccatgtctgacctgcaaaaatgctggagaaaaatgaaggaaaaaattatgtttttcagtttaattctgttaactgaagatattccaactcaaaaccagcctcatgctctgattagataatcttttacattgaacctttactctcaaagccatgtgtggagggggcttgtcactattgtaggctcactggattggtcatttagagtttcacagactcttaccagcatatatagtatttaattgtttcaaaaaaaatcaaactgtagttgttttggcgataggtctcacgcaacacatttttgtatgtgtgtgtgtgtgcgtgtgtgtgtgtgtgtgtgaaaaattgcattcattgacttcaggtagattaaggtatctttttattcattgccctcaggaaagttaaggtatcaatgagacccttaagccaatcatgtaataactgcatgtgtctggtccaggagaagtattgaataagccatttctactgcttactcatgtccctatttatgatttcaacatggatacatatttcagttctttctttttctcactatctgaaaatacatttccctccctctcttccccccaatatctccctttttttctctcttcctctatcttccaaaccccactttctccctcctccttttcctgtgttctcttaagcagatagcacatacccccacccagtaccaaatttcagaacacaagaaggtccagttcttcccccttcacataaaggaacatggtttgtcagcctttctcctgtttatgggtttcttccagcagaacagagacattgccaaccatattggatctgcttgctgtccaaaccagcaaactttcctgggcaaatcacaatcagtgagtaaatagacagcctttctgctgccttgggtttctgtgcagataaacagaaatgctctgattagaaaggaaatgaatggttccactcaaatgtcctgcaatttaggattgcagatttctgccttgaaatacctgtttctttgggacattccgtcctgatgatttttatttttgttggtttttatttttggggggaatgacatgtttgggtcttttatacatgaaaatttgtttgacaataatctcacaaaacatattttacatctgaacaaaatgcctttttgtttaccgtagcgtatacatttgttttgggatttttgtgtgtttgttgggaattttgtttttagccaggtcagtattgatgaggctgatcatttggctctttttttccttccagaagagttgcatcaacaaagttaattgtatttatgtatgtaaatagattttaagcttcattataaaatattgttaatgcctataactttttttcaatttttttgtgtgtgtttctaaggactttttcttaggtttgctaaatactgtagggaaaaaaatgcttctttctactttgtttattttagactttaaaatgagctacttcttattcacttttgtaaacagctaatagcatggttccaattttttttaagttcactttttttgttctaggggaaatgaatgtgcaaaaaaagaaaaagaactgttggttatttgtgttattctggatgtataaaaatcaatggaaaaaaataaactttcaaattgaaatgacggtataacacatctactgaaaaagcaacgggaaatgtggtcctatttaagccagcccccacctagggtctatttgtgtggcagttattgggtttggtcacaaaacatcctgaaaattcgtgcgtgggcttctttctccctggtacaaacgtatggaatgcttcttaaaggggaactgtcaagctggtgtcttcagccagatgacatgagagaatatcccagaaccctctctccaaggtgtttctagatagcacaggagagcaggcactgcactgtccacagtccacggtacacagtcgggtgggccgcctcccctctcctgggagcattcgtcgtgcccagcctgagcagggcagctggactgctgctgttcaggagccaccagagccttcctctctttgtaccacagtttcttctgtaaatccagtgttacaatcagtgtgaatggcaaataaacagtttgacaagtacatacaccata

SEQ ID NO: 3730 - DNA, 1690 bp, Homo sapiens
  source 1..1690: mol_type = genomic DNA
ctttgggcctcataaacaaccacagaaccacaagttgggtagcctggcagtgtcagaagtctgaacccagcatagtggtcagcaggcaggacgaatcacactgaatgcaaaccacagggtttcgcagcgtggtaaaagaaatcattgagtcccccgccttcagaagagggtgcattttcaggaggaagcgatggcttcagacagcatatttgagtcatttccttcgtacccacagtgcttcatgagagaatgcatacttggaatgaatccttctagagacgtccacgatgccagcacgagccgccgcttcacgccgccttccaccgcgctgagcccaggcaagatgagcgaggcgttgccgctgggcgccccggacgccggcgctgccctggccggcaagctgaggagcggcgaccgcagcatggtggaggtgctggccgaccacccgggcgagctggtgcgcaccgacagccccaacttcctctgctccgtgctgcctacgcactggcgctgcaacaagaccctgcccatcgctttcaaggtggtggccctaggggatgttccagatggcactctggtcactgtgatggctggcaatgatgaaaactactcggctgagctgagaaatgctaccgcagccatgaagaaccaggttgcaagatttaatgacctcaggtttgtcggtcgaagtggaagagggaaaagcttcactctgaccatcactgtcttcacaaacccaccgcaagtcgccacctaccacagagccatcaaaatcacagtggatgggccccgagaacctcgaagacatcggcagaaactagatgatcagaccaagcccgggagcttgtccttttccgagcggctcagtgaactggagcagctgcggcgcacagccatgagggtcagcccacaccacccagcccccacgcccaaccctcgtgcctccctgaaccactccactgcctttaaccctcagcctcagagtcagatgcaggatacaaggcagatccaaccatccccaccgtggtcctacgatcagtcctaccaatacctgggatccattgcctctccttctgtgcacccagcaacgcccatttcacctggacgtgccagcggcatgacaaccctctctgcagaactttccagtcgactctcaacggcacccgacctgacagcgttcagcgacccgcgccagttccccgcgctgccctccatctccgacccccgcatgcactatccaggcgccttcacctactccccgacgccggtcacctcgggcatcggcatcggcatgtcggccatgggctcggccacgcgctaccacacctacctgccgccgccctaccccggctcgtcgcaagcgcagggaggcccgttccaagccagctcgccctcctaccacctgtactacggcgcctcggccggctcctaccagttctccatggtgggcggcgagcgctcgccgccgcgcatcctgccgccctgcaccaacgcctccaccggctccgcgctgctcaaccccagcctcccgaaccagagcgacgtggtggaggccgagggcagccacagcaactcccccaccaacatggcgcgggcctcctgttcgcgacaagcccgccgggatcccgggccctgggcccggccaccgtcctggggccgagggcgcccgacggccaggatctcgctgtag

SEQ ID NO: 3731 - DNA, 346 bp, Homo sapiens
  source 1..346: mol_type = genomic DNA
cacaagttgggtagcctggcagtgtcagaagtctgaacccagcatagtggtcagcaggcaggacgaatcacactgaatgcaaaccacagggtttcgcagcgtggtgagcatcaccaacccacagccaaggcggcgctggctttttttttttttttaatctttaacaatttgaatatttgtttttacaaaggtaaaagaaatcattgagtcccccgccttcagaagagggtgcattttcaggaggaagcgatggcttcagacagcatatttgagtcatttccttcgtacccacagtgcttcatgagagaatgcatacttggaatgaatccttctagagacgtccacg

SEQ ID NO: 3732 - DNA, 1901 bp, Homo sapiens
  source 1..1901: mol_type = genomic DNA
gagcatcaccaacccacagccaaggcggcgctggctttttttttttttttaatctttaacaatttgaatatttgtttttacaaaggtaaaagaaatcattgagtcccccgccttcagaagagggtgcattttcaggaggaagcgatggcttcagacagcatatttgagtcatttccttcgtacccacagtgcttcatgagagaatgcatacttggaatgaatccttctagagacgtccacgatgccagcacgagccgccgcttcacgccgccttccaccgcgctgagcccaggcaagatgagcgaggcgttgccgctgggcgccccggacgccggcgctgccctggccggcaagctgaggagcggcgaccgcagcatggtggaggtgctggccgaccacccgggcgagctggtgcgcaccgacagccccaacttcctctgctccgtgctgcctacgcactggcgctgcaacaagaccctgcccatcgctttcaaggtggtggccctaggggatgttccagatggcactctggtcactgtgatggctggcaatgatgaaaactactcggctgagctgagaaatgctaccgcagccatgaagaaccaggttgcaagatttaatgacctcaggtttgtcggtcgaagtggaagagggaaaagcttcactctgaccatcactgtcttcacaaacccaccgcaagtcgccacctaccacagagccatcaaaatcacagtggatgggccccgagaacctcgaagacatcggcagaaactagatgatcagaccaagcccgggagcttgtccttttccgagcggctcagtgaactggagcagctgcggcgcacagccatgagggtcagcccacaccacccagcccccacgcccaaccctcgtgcctccctgaaccactccactgcctttaaccctcagcctcagagtcagatgcaggatacaaggcagatccaaccatccccaccgtggtcctacgatcagtcctaccaatacctgggatccattgcctctccttctgtgcacccagcaacgcccatttcacctggacgtgccagcggcatgacaaccctctctgcagaactttccagtcgactctcaacggcacccgacctgacagcgttcagcgacccgcgccagttccccgcgctgccctccatctccgacccccgcatgcactatccaggcgccttcacctactccccgacgccggtcacctcgggcatcggcatcggcatgtcggccatgggctcggccacgcgctaccacacctacctgccgccgccctaccccggctcgtcgcaagcgcagggaggcccgttccaagccagctcgccctcctaccacctgtactacggcgcctcggccggctcctaccagttctccatggtgggcggcgagcgctcgccgccgcgcatcctgccgccctgcaccaacgcctccaccggctccgcgctgctcaaccccagcctcccgaaccagagcgacgtggtggaggccgagggcagccacagcaactcccccaccaacatggcgccctccgcgcgcctggaggaggccgtgtggaggccctactgaggcgccaggcctggcccggctgggccccgcgggccgccgccttcgcctccgggcgcgcgggcctcctgttcgcgacaagcccgccgggatcccgggccctgggcccggccaccgtcctggggccgagggcgcccgacggccaggatctcgctgtaggtcaggcccgcgcagcctcctgcgcccagaagcccacgccgccgccgtctgctggcgccccggccctcgcggaggtgtccgaggcgacgcacctcgagggtgtccgccggccccagcacccaggggacgcgctggaaagcaaacaggaagattcccgg

SEQ ID NO: 3733 - DNA, 5967 bp, Homo sapiens
  source 1..5967: mol_type = genomic DNA
ctttgggcctcataaacaaccacagaaccacaagttgggtagcctggcagtgtcagaagtctgaacccagcatagtggtcagcaggcaggacgaatcacactgaatgcaaaccacagggtttcgcagcgtggtaaaagaaatcattgagtcccccgccttcagaagagggtgcattttcaggaggaagcgatggcttcagacagcatatttgagtcatttccttcgtacccacagtgcttcatgagagaatgcatacttggaatgaatccttctagagacgtccacgatgccagcacgagccgccgcttcacgccgccttccaccgcgctgagcccaggcaagatgagcgaggcgttgccgctgggcgccccggacgccggcgctgccctggccggcaagctgaggagcggcgaccgcagcatggtggaggtgctggccgaccacccgggcgagctggtgcgcaccgacagccccaacttcctctgctccgtgctgcctacgcactggcgctgcaacaagaccctgcccatcgctttcaaggtggtggccctaggggatgttccagatggcactctggtcactgtgatggctggcaatgatgaaaactactcggctgagctgagaaatgctaccgcagccatgaagaaccaggttgcaagatttaatgacctcaggtttgtcggtcgaagtggaagagggaaaagcttcactctgaccatcactgtcttcacaaacccaccgcaagtcgccacctaccacagagccatcaaaatcacagtggatgggccccgagaacctcgaagacatcggcagaaactagatgatcagaccaagcccgggagcttgtccttttccgagcggctcagtgaactggagcagctgcggcgcacagccatgagggtcagcccacaccacccagcccccacgcccaaccctcgtgcctccctgaaccactccactgcctttaaccctcagcctcagagtcagatgcaggatacaaggcagatccaaccatccccaccgtggtcctacgatcagtcctaccaatacctgggatccattgcctctccttctgtgcacccagcaacgcccatttcacctggacgtgccagcggcatgacaaccctctctgcagaactttccagtcgactctcaacggcacccgacctgacagcgttcagcgacccgcgccagttccccgcgctgccctccatctccgacccccgcatgcactatccaggcgccttcacctactccccgacgccggtcacctcgggcatcggcatcggcatgtcggccatgggctcggccacgcgctaccacacctacctgccgccgccctaccccggctcgtcgcaagcgcagggaggcccgttccaagccagctcgccctcctaccacctgtactacggcgcctcggccggctcctaccagttctccatggtgggcggcgagcgctcgccgccgcgcatcctgccgccctgcaccaacgcctccaccggctccgcgctgctcaaccccagcctcccgaaccagagcgacgtggtggaggccgagggcagccacagcaactcccccaccaacatggcgccctccgcgcgcctggaggaggccgtgtggaggccctactgaggcgccaggcctggcccggctgggccccgcgggccgccgccttcgcctccgggcgcgcgggcctcctgttcgcgacaagcccgccgggatcccgggccctgggcccggccaccgtcctggggccgagggcgcccgacggccaggatctcgctgtaggtcaggcccgcgcagcctcctgcgcccagaagcccacgccgccgccgtctgctggcgccccggccctcgcggaggtgtccgaggcgacgcacctcgagggtgtccgccggccccagcacccaggggacgcgctggaaagcaaacaggaagattcccggagggaaactgtgaatgcttctgatttagcaatgctgtgaataaaaagaaagattttatacccttgacttaactttttaaccaagttgtttattccaaagagtgtggaattttggttggggtggggggagaggagggatgcaactcgccctgtttggcatctaattcttatttttaatttttccgcaccttatcaattgcaaaatgcgtatttgcatttgggtggtttttatttttatatacgtttatataaatatatataaattgagcttgcttctttcttgctttgaccatggaaagaaatatgattcccttttctttaagttttatttaacttttcttttggacttttgggtagttgtttttttttgttttgttttgtttttttgagaaacagctacagctttgggtcatttttaactactgtattcccacaaggaatccccagatatttatgtatcttgatgttcagacatttatgtgttgataattttttaattatttaaatgtacttatattaagaaaaatatcaagtactacattttcttttgttcttgatagtagccaaagttaaatgtatcacattgaagaaggctagaaaaaaagaatgagtaatgtgatcgcttggttatccagaagtattgtttacattaaactccctttcatgttaatcaaacaagtgagtagctcacgcagcaacgtttttaataggatttttagacactgagggtcactccaaggatcagaagtatggaattttctgccaggctcaacaagggtctcatatctaacttcctccttaaaacagagaaggtcaatctagttccagagggttgaggcaggtgccaataattacatctttggagaggatttgatttctgcccagggatttgctcaccccaaggtcatctgataatttcacagatgctgtgtaacagaacacagccaaagtaaactgtgtaggggagccacatttacataggaaccaaatcaatgaatttaggggttacgattatagcaatttaagggcccaccagaagcaggcctcgaggagtcaatttgcctctgtgtgcctcagtggagacaagtgggaaaacatggtcccacctgtgcgagaccccctgtcctgtgctgctcactcaacaacatctttgtgttgctttcaccaggctgagaccctaccctatggggtatatgggcttttacctgtgcaccagtgtgacaggaaagattcatgtcactactgtccgtggctacaattcaaaggtatccaatgtcgctgtaaattttatggcactatttttattggaggatttggtcagaatgcagttgttgtacaactcataaatactaactgctgattttgacacatgtgtgctccaaatgatctggtggttatttaacgtacctcttaaaattcgttgaaacgatttcaggtcaactctgaagagtatttgaaagcaggacttcagaacagtgtttgatttttattttataaatttaagcattcaaattaggcaaatctttggctgcaggcagcaaaaacagctggacttatttaaaacaacttgtttttgagttttcttatatatatattgattatttgttttacacacatgcagtagcactttggtaagagttaaagagtaaagcagcttatgttgtcaggtcgttcttatctagagaagagctatagcagatctcggacaaactcagaatatattcactttcatttttgacaggattccctccacaactcagtttcatatattattccgtattacatttttgcagctaaattaccataaaatgtcagcaaatgtaaaaatttaatttctgaaaagcaccattagcccatttcccccaaattaaacgtaaatgttttttttcagcacatgttaccatgtctgacctgcaaaaatgctggagaaaaatgaaggaaaaaattatgtttttcagtttaattctgttaactgaagatattccaactcaaaaccagcctcatgctctgattagataatcttttacattgaacctttactctcaaagccatgtgtggagggggcttgtcactattgtaggctcactggattggtcatttagagtttcacagactcttaccagcatatatagtatttaattgtttcaaaaaaaatcaaactgtagttgttttggcgataggtctcacgcaacacatttttgtatgtgtgtgtgtgtgcgtgtgtgtgtgtgtgtgtgaaaaattgcattcattgacttcaggtagattaaggtatctttttattcattgccctcaggaaagttaaggtatcaatgagacccttaagccaatcatgtaataactgcatgtgtctggtccaggagaagtattgaataagccatttctactgcttactcatgtccctatttatgatttcaacatggatacatatttcagttctttctttttctcactatctgaaaatacatttccctccctctcttccccccaatatctccctttttttctctcttcctctatcttccaaaccccactttctccctcctccttttcctgtgttctcttaagcagatagcacatacccccacccagtaccaaatttcagaacacaagaaggtccagttcttcccccttcacataaaggaacatggtttgtcagcctttctcctgtttatgggtttcttccagcagaacagagacattgccaaccatattggatctgcttgctgtccaaaccagcaaactttcctgggcaaatcacaatcagtgagtaaatagacagcctttctgctgccttgggtttctgtgcagataaacagaaatgctctgattagaaaggaaatgaatggttccactcaaatgtcctgcaatttaggattgcagatttctgccttgaaatacctgtttctttgggacattccgtcctgatgatttttatttttgttggtttttatttttggggggaatgacatgtttgggtcttttatacatgaaaatttgtttgacaataatctcacaaaacatattttacatctgaacaaaatgcctttttgtttaccgtagcgtatacatttgttttgggatttttgtgtgtttgttgggaattttgtttttagccaggtcagtattgatgaggctgatcatttggctctttttttccttccagaagagttgcatcaacaaagttaattgtatttatgtatgtaaatagattttaagcttcattataaaatattgttaatgcctataactttttttcaatttttttgtgtgtgtttctaaggactttttcttaggtttgctaaatactgtagggaaaaaaatgcttctttctactttgtttattttagactttaaaatgagctacttcttattcacttttgtaaacagctaatagcatggttccaattttttttaagttcactttttttgttctaggggaaatgaatgtgcaaaaaaagaaaaagaactgttggttatttgtgttattctggatgtataaaaatcaatggaaaaaaataaactttcaaattgaaatgacggtataacacatctactgaaaaagcaacgggaaatgtggtcctatttaagccagcccccacctagggtctatttgtgtggcagttattgggtttggtcacaaaacatcctgaaaattcgtgcgtgggcttctttctccctggtacaaacgtatggaatgcttcttaaaggggaactgtcaagctggtgtcttcagccagatgacatgagagaatatcccagaaccctctctccaaggtgtttctagatagcacaggagagcaggcactgcactgtccacagtccacggtacacagtcgggtgggccgcctcccctctcctgggagcattcgtcgtgcccagcctgagcagggcagctggactgctgctgttcaggagccaccagagccttcctctctttgtaccacagtttcttctgtaaatccagtgttacaatcagtgtgaatggcaaataaacagtttgacaagtacatacaccata

SEQ ID NO: 3734 - DNA, 792 bp, Homo sapiens
  source 1..792: mol_type = genomic DNA
gagcatcaccaacccacagccaaggcggcgctggctttttttttttttttaatctttaacaatttgaatatttgtttttacaaaggtaaaagaaatcattgagtcccccgccttcagaagagggtgcattttcaggaggaagcgatggcttcagacagcatatttgagtcatttccttcgtacccacagtgcttcatgagagaatgcatacttggaatgaatccttctagagacgtccacgatgccagcacgagccgccgcttcacgccgccttccaccgcgctgagcccaggcaagatgagcgaggcgttgccgctgggcgccccggacgccggcgctgccctggccggcaagctgaggagcggcgaccgcagcatggtggaggtgctggccgaccacccgggcgagctggtgcgcaccgacagccccaacttcctctgctccgtgctgcctacgcactggcgctgcaacaagaccctgcccatcgctttcaaggtggtggccctaggggatgttccagatggcactctggtcactgtgatggctggcaatgatgaaaactactcggctgagctgagaaatgctaccgcagccatgaagaaccaggttgcaagatttaatgacctcaggtttgtcggtcgaagtggaagagggaaaagcttcactctgaccatcactgtcttcacaaacccaccgcaagtcgccacctaccacagagccatcaaaatcacagtggatgggccccgagaacctcgaaactctttgacctggcctcggtatcctcacatttaa

SEQ ID NO: 3735 - DNA, 2720 bp, Homo sapiens
  source 1..2720: mol_type = genomic DNA
catagagccagcgggcgcgggcgggacgggcgccccgcggccggacccagccagggcaccacgctgcccggccctgcgccgccaggcacttctttccggggctcctagggacgccagaaggaagtcaacctctgctgcttctccttggcctgcgttggaccttcctttttttgttgtttttttttgtttttcccctttcttccttttgaattaactggcttcttggctggatgttttcaacttctttcctggctgcgaacttttccccaattgttttccttttacaacagggggagaaagtgctctgtggtccgaggcgagccgtgaagttgcgtgtgcgtggcagtgtgcgtggcaggatgtgcgtgcgtgtgtaacccgagccgcccgatctgtttcgatctgcgccgcggagccctccctcaaggcccgctccacctgctgcggttacgcggcgctcgtgggtgttcgtgcctcggagcagctaaccggcgggtgctgggcgacggtggaggagtatcgtctcgctgctgcccgagtcagggctgagtcacccagctgatgtagacagtggctgccttccgaagagtgcgtgtttgcatgtgtgtgactctgcggctgctcaactcccaacaaaccagaggaccagccacaaacttaaccaacatccccaaacccgagttcacagatgtgggagagctgtagaaccctgagtgtcatcgactgggccttcttatgattgttgttttaagattagctgaagatctctgaaacgctgaattttctgcactgagcgttttgacagaattcattgagagaacagagaacatgacaagtacttctagctcagcactgctccaactactgaagctgattttcaaggctacttaaaaaaatctgcagcgtacattaatggatttctgttgtgtttaaattctccacagattgtattgtaaatattttatgaagtagagcatatgtatatatttatatatacgtgcacatacattagtagcactacctttggaagtctcagctcttgcttttcgggactgaagccagttttgcatgataaaagtggccttgttacgggagataattgtgttctgttgggactttagacaaaactcacctgcaaaaaactgacaggcattaactactggaacttccaaataatgtgtttgctgatcgttttactcttcgcataaatattttaggaagtgtatgagaattttgccttcaggaacttttctaacagccaaagacagaacttaacctctgcaagcaagattcgtggaagatagtctccactttttaatgcactaagcaatcggttgctaggagcccatcctgggtcagaggccgatccgcagaaccagaacgttttcccctcctggactgttagtaacttagtctccctcctcccctaaccacccccgcccccccccaccccccgcagtaataaaggcccctgaacgtgtatgttggtctcccgggagctgcttgctgaagatccgcgcccctgtcgccgtctggtaggagctgtttgcagggtcctaactcaatcggcttgttgtgatgcgtatccccgtagatgccagcacgagccgccgcttcacgccgccttccaccgcgctgagcccaggcaagatgagcgaggcgttgccgctgggcgccccggacgccggcgctgccctggccggcaagctgaggagcggcgaccgcagcatggtggaggtgctggccgaccacccgggcgagctggtgcgcaccgacagccccaacttcctctgctccgtgctgcctacgcactggcgctgcaacaagaccctgcccatcgctttcaaggtggtggccctaggggatgttccagatggcactctggtcactgtgatggctggcaatgatgaaaactactcggctgagctgagaaatgctaccgcagccatgaagaaccaggttgcaagatttaatgacctcaggtttgtcggtcgaagtggaagagggaaaagcttcactctgaccatcactgtcttcacaaacccaccgcaagtcgccacctaccacagagccatcaaaatcacagtggatgggccccgagaacctcgaagacatcggcagaaactagatgatcagaccaagcccgggagcttgtccttttccgagcggctcagtgaactggagcagctgcggcgcacagccatgagggtcagcccacaccacccagcccccacgcccaaccctcgtgcctccctgaaccactccactgcctttaaccctcagcctcagagtcagatgcaggaggaagacacagcaccctggagatgttaaggcagaagtcagttcttctgtccatccctctccccagccaggatagagctatcttttccatctcatcctcagaagagactcagaagaaagatgacagccctcagaatgcacgttatgaggaaggcagaatgtgggtctgtaattcctccgtgtcccttctccccctctgcaaaccgtcgtaacaataatagttcctaacacatgggacaattgtgaggattaaatgagttagcctgcagaaatcacttgatgcacagcacatgggaagcattgtgtgtatttattaatccttcacaaagtctttgagatatatttttatcaaatatttagcatggatcccggtacactttcaatacttaataaatggtcaatgttattctttttcacta

SEQ ID NO: 3736 - DNA, 1770 bp, Homo sapiens
  source 1..1770: mol_type = genomic DNA
atgcttcattcgcctcacaaacaaccacagaaccacaagtgcggtgcaaactttctccaggaggacagcaagaagtctctggtttttaaatggttaatctccgcaggtcactaccagccaccgagaccaacagagtcatttaaggctgcaagcagtatttacaacagagggtacaagttctatctgaaaaaaaaaggagggactatggcatcaaacagcctcttcagcacagtgacaccatgtcagcaaaacttcttttgggatccgagcaccagccggcgcttcagccccccctccagcagcctgcagcccggcaaaatgagcgacgtgagcccggtggtggctgcgcaacagcagcagcaacagcagcagcagcaacagcagcagcagcagcagcaacagcagcagcagcagcaggaggcggcggcggcggctgcggcggcggcggcggctgcggcggcggcagctgcagtgccccggttgcggccgccccacgacaaccgcaccatggtggagatcatcgccgaccacccggccgaactcgtccgcaccgacagccccaacttcctgtgctcggtgctgccctcgcactggcgctgcaacaagaccctgcccgtggccttcaaggtggtagccctcggagaggtaccagatgggactgtggttactgtcatggcgggtaacgatgaaaattattctgctgagctccggaatgcctctgctgttatgaaaaaccaagtagcaaggttcaacgatctgagatttgtgggccggagtggacgaggcaagagtttcaccttgaccataaccgtcttcacaaatcctccccaagtagctacctatcacagagcaattaaagttacagtagatggacctcgggaacccagaaggcacagacagaagcttgatgactctaaacctagtttgttctctgaccgcctcagtgatttagggcgcattcctcatcccagtatgagagtaggtgtcccgcctcagaacccacggccctccctgaactctgcaccaagtccttttaatccacaaggacagagtcagattacagaccccaggcaggcacagtcttccccgccgtggtcctatgaccagtcttacccctcctacctgagccagatgacgtccccgtccatccactctaccaccccgctgtcttccacacggggcactgggcttcctgccatcaccgatgtgcctaggcgcatttcagatgatgacactgccacctctgacttctgcctctggccttccactctcagtaagaagagccaggcaggtgcttcagaactgggccctttttcagaccccaggcagttcccaagcatttcatccctcactgagagccgcttctccaacccacgaatgcactatccagccacctttacttacaccccgccagtcacctcaggcatgtccctcggtatgtccgccaccactcactaccacacctacctgccaccaccctaccccggctcttcccaaagccagagtggacccttccagaccagcagcactccatatctctactatggcacttcgtcaggatcctatcagtttcccatggtgccggggggagaccggtctccttccagaatgcttccgccatgcaccaccacctcgaatggcagcacgctattaaatccaaatttgcctaaccagaatgatggtgttgacgctgatggaagccacagcagttccccaactgttttgaattctagtggcagaatggatgaatctgtttggcgaccatattga

SEQ ID NO: 3737 - DNA, 5700 bp, Homo sapiens
  source 1..5700: mol_type = genomic DNA
ggactccaactgggagggggcgccagcgcacccaggacgcggtgccccaagggaccccattccaagctgcaaactcaagtcccccgcctccccaggccaaacacacccccgcgcccgttcgcagctgccaccccgggtgttccaaagactccggcaaagatctgcgcctcccgggtctccctacccgccagcccgactgcgccgcatcgccagactctgttggcccatcagactccgcccggcagtcggcctcatcaaacttgatttctcacctcctcagccccatcacctccatcctctttccccccgtctcgccttcacccccccaatttcctccttgcccctcatttccaccctcctccccctcccccggccacttcgctaacttgtggctgttgtgatgcgtattcccgtagatccgagcaccagccggcgcttcagccccccctccagcagcctgcagcccggcaaaatgagcgacgtgagcccggtggtggctgcgcaacagcagcagcaacagcagcagcagcaacagcagcagcagcagcagcaacagcagcagcagcagcaggaggcggcggcggcggctgcggcggcggcggcggctgcggcggcggcagctgcagtgccccggttgcggccgccccacgacaaccgcaccatggtggagatcatcgccgaccacccggccgaactcgtccgcaccgacagccccaacttcctgtgctcggtgctgccctcgcactggcgctgcaacaagaccctgcccgtggccttcaaggtggtagccctcggagaggtaccagatgggactgtggttactgtcatggcgggtaacgatgaaaattattctgctgagctccggaatgcctctgctgttatgaaaaaccaagtagcaaggttcaacgatctgagatttgtgggccggagtggacgaggcaagagtttcaccttgaccataaccgtcttcacaaatcctccccaagtagctacctatcacagagcaattaaagttacagtagatggacctcgggaacccagaaggcacagacagaagcttgatgactctaaacctagtttgttctctgaccgcctcagtgatttagggcgcattcctcatcccagtatgagagtaggtgtcccgcctcagaacccacggccctccctgaactctgcaccaagtccttttaatccacaaggacagagtcagattacagaccccaggcaggcacagtcttccccgccgtggtcctatgaccagtcttacccctcctacctgagccagatgacgtccccgtccatccactctaccaccccgctgtcttccacacggggcactgggcttcctgccatcaccgatgtgcctaggcgcatttcagatgatgacactgccacctctgacttctgcctctggccttccactctcagtaagaagagccaggcaggtgcttcagaactgggccctttttcagaccccaggcagttcccaagcatttcatccctcactgagagccgcttctccaacccacgaatgcactatccagccacctttacttacaccccgccagtcacctcaggcatgtccctcggtatgtccgccaccactcactaccacacctacctgccaccaccctaccccggctcttcccaaagccagagtggacccttccagaccagcagcactccatatctctactatggcacttcgtcaggatcctatcagtttcccatggtgccggggggagaccggtctccttccagaatgcttccgccatgcaccaccacctcgaatggcagcacgctattaaatccaaatttgcctaaccagaatgatggtgttgacgctgatggaagccacagcagttccccaactgttttgaattctagtggcagaatggatgaatctgtttggcgaccatattgaaattcctcagcagtggcccagtggtatctgggggccacatcccacacgtatcaatatatacatatatagagagagtgcatatatatgtatatcgattagctatctacaaagtgcctattttttagaagatttttcattcactcactcagtcatgatcttgcagccataagagggtagatattgagaagcagaaggctcaagagagacaattgcaatcgagcttcagattgtttactatttaagatgtacttttacaaaggaacaaagaagggaaaaggtatttttgtttttgttgtttggtctgttatcatcaataacctgttcatatgccaattcagagaggtggactccaggttcaggagggagaagagcaaagccgcttcctctctgtgctttgaaacttcacaccctcacggtggcagctgtgtatggaccagtgccctccgcagacagctcacaaaaccagttgaggtgcactaaagggacatgaggtagaatggatgcttccatcacagtaccatcattcagaataactcttccaatttctgctttcagacatgctgcaggtcctcatctgaactgttgggttcgtttttttttttttttttcctgctccaagaaagtgacttcaaaaataactgatcaggatagattattttattttactttttaacactccttctccccttttcccactgaaccaaaaagaaatcccatccctaaaacctgccttctccttttatgcaaaactgaaaatggcaatacattattatagccataatggtatagatagtgattgcgtttggctatgtgttgttttctttttttttaaattatgaatatgtgtaaaatctgaggtaacttgctaacgtgaatggtcatataactttaaagatatatttataattatttaatgacatttggacccttgaaacatttcttagtgtattgatatgttgacttcggtctctaaaagtgctctttattaaataacaaatttcttcagtggtctagagccatatctgaaatattgctaagcaatttcagttcatccaggcacaatgtgattttaaaaaatacttccatctccaaatattttagatatagattgtttttgtgatgtatgaaggaaatgttatgtttagttctttcagatctttgaatgcctctaacacagctttgccttctaaagcggtaattagggatttaaaaaacaacctttagccctttatcagcatgaaatgctggagtgatgtggttttctaatttctttggggtaattatgactcttgtcatattaaaaagacaagcacaagtaaatcattgaactacagaaaaatgttctgtggtttcatagttaagcaaaactctaaatcgccaggcttcatagcaaagacatagtcagctaaaagccgcacatgtggatagagggttcaattatgagacacctagtacaggagagcaaaattgcaccagagattcttaaccaaccagccttaccaaacaacacaacaggggaaccccaatctgccttacccaaggccccactggcagctttccacagaatttgcatttagaggagcagaatgacatcactgtcctttgggagtaggtcctctgaaaaggcagcaggttccagcaggtagctgagctgagaggacatatggcccacggggacctacagacagcctttgacatttgtatttcttacaatggagggccaaggagggcaaggggctgtggagtttggtgtctactagtgtgtatgaatttgagctagagtccttctgtggcatgcactttgaccactcctggcagtcacatggcagatttccaagtgcaaatccttaatccaaacaaggatcatctaatgacaccaccaggccaatccctgctctcctccccgaaaagtcagggtcccttcattggaatcctccacccacccaagcagaatttagcagagatttgccttcaaaccctaacggcccccttgttctctggtccttctcaaacccacctttgtaggccacccagcattgcaggacagcgtgtggggcagctggacctgtgcttcctgcctgggagtctcccttggaattcatcctgactccttctaataaaaatggatgggaaagcaaaacactttgccttctaaaggccgtataccaagtatgcttagataaataagccacttttctattacttaagtaagaaggaagtagtaattgatactatttattgtttgtgtgtggtagcttgaagcacaccactgtccatttatttgtaagtgtaaaatatgtgtgtttgtttcagcagcacttaaaaaagccagtgtctggttacacatttcaattttaattaattgacataaaaatgctaccgccagtgccagctgcatcctatttaattaaaaaggtactatatttgtacattattttttaatgttaaaagggcttttttaagtttacagtacacataccgagtgactttagggatgcttttgtgttgaaatgttactatagtggctgcaggcagcaacccagaaacactttagaagctttttttccttgggaaaaattcaagcacttcttccctccaccctcactccaaccaccccaatgggggtaattcacatttcttagaacaaattctgcccttttttggtctagggattaaaattttgtttttctttctttctttttttttttttttcactgaacccttaatttgcactgggtcatgtgtttgatttgtgatttcaagaccaaagcaaagtcttactactactgtggaaccatgtactagttcctgggaattaaaatagcgtggttctctttgtagcacaaacattgctggaatttgcagtcttttcaatgcagccacatttttatccatttcagttgtctcacaaattttaacccatatcagagttccagaacaggtaccacagctttggttttagattagtggaataacattcagcccagaactgagaaactcaacagattaactatcgtttgctctttagacggtctcactgcctctcacttgccagagccctttcaaaatgagcagagaagtccacaccattagggaccatctgtgataaattcagaagggaggagatgtgtgtacagctttaaggattccctcaattccgaggaaagggactggcccagaatccaggttaatacatggaaacacgaagcattagcaaaagtaataattatacctatggtatttgaaagaacaataataaaagacacttcttccaaaccttgaatttgttgtttttagaaaacgaatgcatttaaaaatattttctatgtgagaattttttagatgtgtgtttacttcatgtttacaaataactgtttgctttttaatgcagtactttgaaatatatcagccaaaaccataacttacaataatttcttaggtattctgaataaaattccatttcttttggatatgctttaccattcttaggtttctgtggaacaaaaatatttgtagcattttgtgtaaatacaagctttcatttttattttttccaattgctattgcccaagaattgctttccatgcacatattgtaaaaattccgctttgtgccacaggtcatgattgtggatgagtttactcttaacttcaaagggactatttgtattgtatgttgcaactgtaaattgaattatttggcatttttctcatgattgtaatattaatttgaagtttgaatttaattttcaataaaatggcttttttggttttgtt

SEQ ID NO: 3738 - DNA, 5634 bp, Homo sapiens
  source 1..5634: mol_type = genomic DNA
ggactccaactgggagggggcgccagcgcacccaggacgcggtgccccaagggaccccattccaagctgcaaactcaagtcccccgcctccccaggccaaacacacccccgcgcccgttcgcagctgccaccccgggtgttccaaagactccggcaaagatctgcgcctcccgggtctccctacccgccagcccgactgcgccgcatcgccagactctgttggcccatcagactccgcccggcagtcggcctcatcaaacttgatttctcacctcctcagccccatcacctccatcctctttccccccgtctcgccttcacccccccaatttcctccttgcccctcatttccaccctcctccccctcccccggccacttcgctaacttgtggctgttgtgatgcgtattcccgtagatccgagcaccagccggcgcttcagccccccctccagcagcctgcagcccggcaaaatgagcgacgtgagcccggtggtggctgcgcaacagcagcagcaacagcagcagcagcaacagcagcagcagcagcagcaacagcagcagcagcagcaggaggcggcggcggcggctgcggcggcggcggcggctgcggcggcggcagctgcagtgccccggttgcggccgccccacgacaaccgcaccatggtggagatcatcgccgaccacccggccgaactcgtccgcaccgacagccccaacttcctgtgctcggtgctgccctcgcactggcgctgcaacaagaccctgcccgtggccttcaaggtggtagccctcggagaggtaccagatgggactgtggttactgtcatggcgggtaacgatgaaaattattctgctgagctccggaatgcctctgctgttatgaaaaaccaagtagcaaggttcaacgatctgagatttgtgggccggagtggacgaggcaagagtttcaccttgaccataaccgtcttcacaaatcctccccaagtagctacctatcacagagcaattaaagttacagtagatggacctcgggaacccagaaggcacagacagaagcttgatgactctaaacctagtttgttctctgaccgcctcagtgatttagggcgcattcctcatcccagtatgagagtaggtgtcccgcctcagaacccacggccctccctgaactctgcaccaagtccttttaatccacaaggacagagtcagattacagaccccaggcaggcacagtcttccccgccgtggtcctatgaccagtcttacccctcctacctgagccagatgacgtccccgtccatccactctaccaccccgctgtcttccacacggggcactgggcttcctgccatcaccgatgtgcctaggcgcatttcaggtgcttcagaactgggccctttttcagaccccaggcagttcccaagcatttcatccctcactgagagccgcttctccaacccacgaatgcactatccagccacctttacttacaccccgccagtcacctcaggcatgtccctcggtatgtccgccaccactcactaccacacctacctgccaccaccctaccccggctcttcccaaagccagagtggacccttccagaccagcagcactccatatctctactatggcacttcgtcaggatcctatcagtttcccatggtgccggggggagaccggtctccttccagaatgcttccgccatgcaccaccacctcgaatggcagcacgctattaaatccaaatttgcctaaccagaatgatggtgttgacgctgatggaagccacagcagttccccaactgttttgaattctagtggcagaatggatgaatctgtttggcgaccatattgaaattcctcagcagtggcccagtggtatctgggggccacatcccacacgtatcaatatatacatatatagagagagtgcatatatatgtatatcgattagctatctacaaagtgcctattttttagaagatttttcattcactcactcagtcatgatcttgcagccataagagggtagatattgagaagcagaaggctcaagagagacaattgcaatcgagcttcagattgtttactatttaagatgtacttttacaaaggaacaaagaagggaaaaggtatttttgtttttgttgtttggtctgttatcatcaataacctgttcatatgccaattcagagaggtggactccaggttcaggagggagaagagcaaagccgcttcctctctgtgctttgaaacttcacaccctcacggtggcagctgtgtatggaccagtgccctccgcagacagctcacaaaaccagttgaggtgcactaaagggacatgaggtagaatggatgcttccatcacagtaccatcattcagaataactcttccaatttctgctttcagacatgctgcaggtcctcatctgaactgttgggttcgtttttttttttttttttcctgctccaagaaagtgacttcaaaaataactgatcaggatagattattttattttactttttaacactccttctccccttttcccactgaaccaaaaagaaatcccatccctaaaacctgccttctccttttatgcaaaactgaaaatggcaatacattattatagccataatggtatagatagtgattgcgtttggctatgtgttgttttctttttttttaaattatgaatatgtgtaaaatctgaggtaacttgctaacgtgaatggtcatataactttaaagatatatttataattatttaatgacatttggacccttgaaacatttcttagtgtattgatatgttgacttcggtctctaaaagtgctctttattaaataacaaatttcttcagtggtctagagccatatctgaaatattgctaagcaatttcagttcatccaggcacaatgtgattttaaaaaatacttccatctccaaatattttagatatagattgtttttgtgatgtatgaaggaaatgttatgtttagttctttcagatctttgaatgcctctaacacagctttgccttctaaagcggtaattagggatttaaaaaacaacctttagccctttatcagcatgaaatgctggagtgatgtggttttctaatttctttggggtaattatgactcttgtcatattaaaaagacaagcacaagtaaatcattgaactacagaaaaatgttctgtggtttcatagttaagcaaaactctaaatcgccaggcttcatagcaaagacatagtcagctaaaagccgcacatgtggatagagggttcaattatgagacacctagtacaggagagcaaaattgcaccagagattcttaaccaaccagccttaccaaacaacacaacaggggaaccccaatctgccttacccaaggccccactggcagctttccacagaatttgcatttagaggagcagaatgacatcactgtcctttgggagtaggtcctctgaaaaggcagcaggttccagcaggtagctgagctgagaggacatatggcccacggggacctacagacagcctttgacatttgtatttcttacaatggagggccaaggagggcaaggggctgtggagtttggtgtctactagtgtgtatgaatttgagctagagtccttctgtggcatgcactttgaccactcctggcagtcacatggcagatttccaagtgcaaatccttaatccaaacaaggatcatctaatgacaccaccaggccaatccctgctctcctccccgaaaagtcagggtcccttcattggaatcctccacccacccaagcagaatttagcagagatttgccttcaaaccctaacggcccccttgttctctggtccttctcaaacccacctttgtaggccacccagcattgcaggacagcgtgtggggcagctggacctgtgcttcctgcctgggagtctcccttggaattcatcctgactccttctaataaaaatggatgggaaagcaaaacactttgccttctaaaggccgtataccaagtatgcttagataaataagccacttttctattacttaagtaagaaggaagtagtaattgatactatttattgtttgtgtgtggtagcttgaagcacaccactgtccatttatttgtaagtgtaaaatatgtgtgtttgtttcagcagcacttaaaaaagccagtgtctggttacacatttcaattttaattaattgacataaaaatgctaccgccagtgccagctgcatcctatttaattaaaaaggtactatatttgtacattattttttaatgttaaaagggcttttttaagtttacagtacacataccgagtgactttagggatgcttttgtgttgaaatgttactatagtggctgcaggcagcaacccagaaacactttagaagctttttttccttgggaaaaattcaagcacttcttccctccaccctcactccaaccaccccaatgggggtaattcacatttcttagaacaaattctgcccttttttggtctagggattaaaattttgtttttctttctttctttttttttttttttcactgaacccttaatttgcactgggtcatgtgtttgatttgtgatttcaagaccaaagcaaagtcttactactactgtggaaccatgtactagttcctgggaattaaaatagcgtggttctctttgtagcacaaacattgctggaatttgcagtcttttcaatgcagccacatttttatccatttcagttgtctcacaaattttaacccatatcagagttccagaacaggtaccacagctttggttttagattagtggaataacattcagcccagaactgagaaactcaacagattaactatcgtttgctctttagacggtctcactgcctctcacttgccagagccctttcaaaatgagcagagaagtccacaccattagggaccatctgtgataaattcagaagggaggagatgtgtgtacagctttaaggattccctcaattccgaggaaagggactggcccagaatccaggttaatacatggaaacacgaagcattagcaaaagtaataattatacctatggtatttgaaagaacaataataaaagacacttcttccaaaccttgaatttgttgtttttagaaaacgaatgcatttaaaaatattttctatgtgagaattttttagatgtgtgtttacttcatgtttacaaataactgtttgctttttaatgcagtactttgaaatatatcagccaaaaccataacttacaataatttcttaggtattctgaataaaattccatttcttttggatatgctttaccattcttaggtttctgtggaacaaaaatatttgtagcattttgtgtaaatacaagctttcatttttattttttccaattgctattgcccaagaattgctttccatgcacatattgtaaaaattccgctttgtgccacaggtcatgattgtggatgagtttactcttaacttcaaagggactatttgtattgtatgttgcaactgtaaattgaattatttggcatttttctcatgattgtaatattaatttgaagtttgaatttaattttcaataaaatggcttttttggttttgtt

SEQ ID NO: 3739 - DNA, 1588 bp, Homo sapiens
  source 1..1588: mol_type = genomic DNA
atggcatcaaacagcctcttcagcacagtgacaccatgtcagcaaaacttcttttgggatccgagcaccagccggcgcttcagccccccctccagcagcctgcagcccggcaaaatgagcgacgtgagcccggtggtggctgcgcaacagcagcagcaacagcagcagcagcaacagcagcagcagcagcagcaacagcagcagcagcagcaggaggcggcggcggcggctgcggcggcggcggcggctgcggcggcggcagctgcagtgccccggttgcggccgccccacgacaaccgcaccatggtggagatcatcgccgaccacccggccgaactcgtccgcaccgacagccccaacttcctgtgctcggtgctgccctcgcactggcgctgcaacaagaccctgcccgtggccttcaaggtggtagccctcggagaggtaccagatgggactgtggttactgtcatggcgggtaacgatgaaaattattctgctgagctccggaatgcctctgctgttatgaaaaaccaagtagcaaggttcaacgatctgagatttgtgggccggagtggacgaggcaagagtttcaccttgaccataaccgtcttcacaaatcctccccaagtagctacctatcacagagcaattaaagttacagtagatggacctcgggaacccagaaggcacagacagaagcttgatgactctaaacctagtttgttctctgaccgcctcagtgatttagggcgcattcctcatcccagtatgagagtaggtgtcccgcctcagaacccacggccctccctgaactctgcaccaagtccttttaatccacaaggacagagtcagattacagaccccaggcaggcacagtcttccccgccgtggtcctatgaccagtcttacccctcctacctgagccagatgacgtccccgtccatccactctaccaccccgctgtcttccacacggggcactgggcttcctgccatcaccgatgtgcctaggcgcatttcaggtgcttcagaactgggccctttttcagaccccaggcagttcccaagcatttcatccctcactgagagccgcttctccaacccacgaatgcactatccagccacctttacttacaccccgccagtcacctcaggcatgtccctcggtatgtccgccaccactcactaccacacctacctgccaccaccctaccccggctcttcccaaagccagagtggacccttccagaccagcagcactccatatctctactatggcacttcgtcaggatcctatcagtttcccatggtgccggggggagaccggtctccttccagaatgcttccgccatgcaccaccacctcgaatggcagcacgctattaaatccaaatttgcctaaccagaatgatggtgttgacgctgatggaagccacagcagttccccaactgttttgaattctagtggcagaatggatgaatctgtttggcgaccatattgaaattcctcagcagtggcccagtggtatctgggggccacatcccacacgtatcaatatatacatatatagagagagtgcatatatatgt

SEQ ID NO: 3740 - DNA, 5698 bp, Homo sapiens
  source 1..5698: mol_type = genomic DNA
caaactttctccaggaggacagcaagaagtctctggtttttaaatggttaatctccgcaggtcactaccagccaccgagaccaacagagtcagtgagtgctctctaaccacagtctatgcagtaatagtaggtccttcaaatatttgctcattctctttttgttttgtttctttgcttttcacatgttaccagctacataatttcttgacagaaaaaaataaatataaagtctatgtactccaggcatactgtaaaactaaaacaaggtttgggtatggtttgtattttcagtttaaggctgcaagcagtatttacaacagagggtacaagttctatctgaaaaaaaaaggagggactatggcatcaaacagcctcttcagcacagtgacaccatgtcagcaaaacttcttttgggatccgagcaccagccggcgcttcagccccccctccagcagcctgcagcccggcaaaatgagcgacgtgagcccggtggtggctgcgcaacagcagcagcaacagcagcagcagcaacagcagcagcagcagcagcaacagcagcagcagcagcaggaggcggcggcggcggctgcggcggcggcggcggctgcggcggcggcagctgcagtgccccggttgcggccgccccacgacaaccgcaccatggtggagatcatcgccgaccacccggccgaactcgtccgcaccgacagccccaacttcctgtgctcggtgctgccctcgcactggcgctgcaacaagaccctgcccgtggccttcaaggtggtagccctcggagaggtaccagatgggactgtggttactgtcatggcgggtaacgatgaaaattattctgctgagctccggaatgcctctgctgttatgaaaaaccaagtagcaaggttcaacgatctgagatttgtgggccggagtggacgaggcaagagtttcaccttgaccataaccgtcttcacaaatcctccccaagtagctacctatcacagagcaattaaagttacagtagatggacctcgggaacccagaaggcacagacagaagcttgatgactctaaacctagtttgttctctgaccgcctcagtgatttagggcgcattcctcatcccagtatgagagtaggtgtcccgcctcagaacccacggccctccctgaactctgcaccaagtccttttaatccacaaggacagagtcagattacagaccccaggcaggcacagtcttccccgccgtggtcctatgaccagtcttacccctcctacctgagccagatgacgtccccgtccatccactctaccaccccgctgtcttccacacggggcactgggcttcctgccatcaccgatgtgcctaggcgcatttcagatgatgacactgccacctctgacttctgcctctggccttccactctcagtaagaagagccaggcaggtgcttcagaactgggccctttttcagaccccaggcagttcccaagcatttcatccctcactgagagccgcttctccaacccacgaatgcactatccagccacctttacttacaccccgccagtcacctcaggcatgtccctcggtatgtccgccaccactcactaccacacctacctgccaccaccctaccccggctcttcccaaagccagagtggacccttccagaccagcagcactccatatctctactatggcacttcgtcaggatcctatcagtttcccatggtgccggggggagaccggtctccttccagaatgcttccgccatgcaccaccacctcgaatggcagcacgctattaaatccaaatttgcctaaccagaatgatggtgttgacgctgatggaagccacagcagttccccaactgttttgaattctagtggcagaatggatgaatctgtttggcgaccatattgaaattcctcagcagtggcccagtggtatctgggggccacatcccacacgtatcaatatatacatatatagagagagtgcatatatatgtatatcgattagctatctacaaagtgcctattttttagaagatttttcattcactcactcagtcatgatcttgcagccataagagggtagatattgagaagcagaaggctcaagagagacaattgcaatcgagcttcagattgtttactatttaagatgtacttttacaaaggaacaaagaagggaaaaggtatttttgtttttgttgtttggtctgttatcatcaataacctgttcatatgccaattcagagaggtggactccaggttcaggagggagaagagcaaagccgcttcctctctgtgctttgaaacttcacaccctcacggtggcagctgtgtatggaccagtgccctccgcagacagctcacaaaaccagttgaggtgcactaaagggacatgaggtagaatggatgcttccatcacagtaccatcattcagaataactcttccaatttctgctttcagacatgctgcaggtcctcatctgaactgttgggttcgtttttttttttttttttcctgctccaagaaagtgacttcaaaaataactgatcaggatagattattttattttactttttaacactccttctccccttttcccactgaaccaaaaagaaatcccatccctaaaacctgccttctccttttatgcaaaactgaaaatggcaatacattattatagccataatggtatagatagtgattgcgtttggctatgtgttgttttctttttttttaaattatgaatatgtgtaaaatctgaggtaacttgctaacgtgaatggtcatataactttaaagatatatttataattatttaatgacatttggacccttgaaacatttcttagtgtattgatatgttgacttcggtctctaaaagtgctctttattaaataacaaatttcttcagtggtctagagccatatctgaaatattgctaagcaatttcagttcatccaggcacaatgtgattttaaaaaatacttccatctccaaatattttagatatagattgtttttgtgatgtatgaaggaaatgttatgtttagttctttcagatctttgaatgcctctaacacagctttgccttctaaagcggtaattagggatttaaaaaacaacctttagccctttatcagcatgaaatgctggagtgatgtggttttctaatttctttggggtaattatgactcttgtcatattaaaaagacaagcacaagtaaatcattgaactacagaaaaatgttctgtggtttcatagttaagcaaaactctaaatcgccaggcttcatagcaaagacatagtcagctaaaagccgcacatgtggatagagggttcaattatgagacacctagtacaggagagcaaaattgcaccagagattcttaaccaaccagccttaccaaacaacacaacaggggaaccccaatctgccttacccaaggccccactggcagctttccacagaatttgcatttagaggagcagaatgacatcactgtcctttgggagtaggtcctctgaaaaggcagcaggttccagcaggtagctgagctgagaggacatatggcccacggggacctacagacagcctttgacatttgtatttcttacaatggagggccaaggagggcaaggggctgtggagtttggtgtctactagtgtgtatgaatttgagctagagtccttctgtggcatgcactttgaccactcctggcagtcacatggcagatttccaagtgcaaatccttaatccaaacaaggatcatctaatgacaccaccaggccaatccctgctctcctccccgaaaagtcagggtcccttcattggaatcctccacccacccaagcagaatttagcagagatttgccttcaaaccctaacggcccccttgttctctggtccttctcaaacccacctttgtaggccacccagcattgcaggacagcgtgtggggcagctggacctgtgcttcctgcctgggagtctcccttggaattcatcctgactccttctaataaaaatggatgggaaagcaaaacactttgccttctaaaggccgtataccaagtatgcttagataaataagccacttttctattacttaagtaagaaggaagtagtaattgatactatttattgtttgtgtgtggtagcttgaagcacaccactgtccatttatttgtaagtgtaaaatatgtgtgtttgtttcagcagcacttaaaaaagccagtgtctggttacacatttcaattttaattaattgacataaaaatgctaccgccagtgccagctgcatcctatttaattaaaaaggtactatatttgtacattattttttaatgttaaaagggcttttttaagtttacagtacacataccgagtgactttagggatgcttttgtgttgaaatgttactatagtggctgcaggcagcaacccagaaacactttagaagctttttttccttgggaaaaattcaagcacttcttccctccaccctcactccaaccaccccaatgggggtaattcacatttcttagaacaaattctgcccttttttggtctagggattaaaattttgtttttctttctttctttttttttttttttcactgaacccttaatttgcactgggtcatgtgtttgatttgtgatttcaagaccaaagcaaagtcttactactactgtggaaccatgtactagttcctgggaattaaaatagcgtggttctctttgtagcacaaacattgctggaatttgcagtcttttcaatgcagccacatttttatccatttcagttgtctcacaaattttaacccatatcagagttccagaacaggtaccacagctttggttttagattagtggaataacattcagcccagaactgagaaactcaacagattaactatcgtttgctctttagacggtctcactgcctctcacttgccagagccctttcaaaatgagcagagaagtccacaccattagggaccatctgtgataaattcagaagggaggagatgtgtgtacagctttaaggattccctcaattccgaggaaagggactggcccagaatccaggttaatacatggaaacacgaagcattagcaaaagtaataattatacctatggtatttgaaagaacaataataaaagacacttcttccaaaccttgaatttgttgtttttagaaaacgaatgcatttaaaaatattttctatgtgagaattttttagatgtgtgtttacttcatgtttacaaataactgtttgctttttaatgcagtactttgaaatatatcagccaaaaccataacttacaataatttcttaggtattctgaataaaattccatttcttttggatatgctttaccattcttaggtttctgtggaacaaaaatatttgtagcattttgtgtaaatacaagctttcatttttattttttccaattgctattgcccaagaattgctttccatgcacatattgtaaaaattccgctttgtgccacaggtcatgattgtggatgagtttactcttaacttcaaagggactatttgtattgtatgttgcaactgtaaattgaattatttggcatttttctcatgattgtaatattaatttgaagtttgaatttaattttcaataaaatggcttttttggttttg

SEQ ID NO: 3741 - DNA, 5544 bp, Homo sapiens
  source 1..5544: mol_type = genomic DNA
atgcttcattcgcctcacaaacaaccacagaaccacaagtgcggtgcaaactttctccaggaggacagcaagaagtctctggtttttaaatggttaatctccgcaggtcactaccagccaccgagaccaacagagtcatttaaggctgcaagcagtatttacaacagagggtacaagttctatctgaaaaaaaaaggagggactatggcatcaaacagcctcttcagcacagtgacaccatgtcagcaaaacttcttttgggatccgagcaccagccggcgcttcagccccccctccagcagcctgcagcccggcaaaatgagcgacgtgagcccggtggtggctgcgcaacagcagcagcaacagcagcagcagcaacagcagcagcagcagcagcaacagcagcagcagcagcaggaggcggcggcggcggctgcggcggcggcggcggctgcggcggcggcagctgcagtgccccggttgcggccgccccacgacaaccgcaccatggtggagatcatcgccgaccacccggccgaactcgtccgcaccgacagccccaacttcctgtgctcggtgctgccctcgcactggcgctgcaacaagaccctgcccgtggccttcaaggtggtagccctcggagaggtaccagatgggactgtggttactgtcatggcgggtaacgatgaaaattattctgctgagctccggaatgcctctgctgttatgaaaaaccaagtagcaaggttcaacgatctgagatttgtgggccggagtggacgaggcaagagtttcaccttgaccataaccgtcttcacaaatcctccccaagtagctacctatcacagagcaattaaagttacagtagatggacctcgggaacccagaaggcacagacagaagcttgatgactctaaacctagtttgttctctgaccgcctcagtgatttagggcgcattcctcatcccagtatgagagtaggtgtcccgcctcagaacccacggccctccctgaactctgcaccaagtccttttaatccacaaggacagagtcagattacagaccccaggcaggcacagtcttccccgccgtggtcctatgaccagtcttacccctcctacctgagccagatgacgtccccgtccatccactctaccaccccgctgtcttccacacggggcactgggcttcctgccatcaccgatgtgcctaggcgcatttcagatgatgacactgccacctctgacttctgcctctggccttccactctcagtaagaagagccaggcaggtgcttcagaactgggccctttttcagaccccaggcagttcccaagcatttcatccctcactgagagccgcttctccaacccacgaatgcactatccagccacctttacttacaccccgccagtcacctcaggcatgtccctcggtatgtccgccaccactcactaccacacctacctgccaccaccctaccccggctcttcccaaagccagagtggacccttccagaccagcagcactccatatctctactatggcacttcgtcaggatcctatcagtttcccatggtgccggggggagaccggtctccttccagaatgcttccgccatgcaccaccacctcgaatggcagcacgctattaaatccaaatttgcctaaccagaatgatggtgttgacgctgatggaagccacagcagttccccaactgttttgaattctagtggcagaatggatgaatctgtttggcgaccatattgaaattcctcagcagtggcccagtggtatctgggggccacatcccacacgtatcaatatatacatatatagagagagtgcatatatatgtatatcgattagctatctacaaagtgcctattttttagaagatttttcattcactcactcagtcatgatcttgcagccataagagggtagatattgagaagcagaaggctcaagagagacaattgcaatcgagcttcagattgtttactatttaagatgtacttttacaaaggaacaaagaagggaaaaggtatttttgtttttgttgtttggtctgttatcatcaataacctgttcatatgccaattcagagaggtggactccaggttcaggagggagaagagcaaagccgcttcctctctgtgctttgaaacttcacaccctcacggtggcagctgtgtatggaccagtgccctccgcagacagctcacaaaaccagttgaggtgcactaaagggacatgaggtagaatggatgcttccatcacagtaccatcattcagaataactcttccaatttctgctttcagacatgctgcaggtcctcatctgaactgttgggttcgtttttttttttttttttcctgctccaagaaagtgacttcaaaaataactgatcaggatagattattttattttactttttaacactccttctccccttttcccactgaaccaaaaagaaatcccatccctaaaacctgccttctccttttatgcaaaactgaaaatggcaatacattattatagccataatggtatagatagtgattgcgtttggctatgtgttgttttctttttttttaaattatgaatatgtgtaaaatctgaggtaacttgctaacgtgaatggtcatataactttaaagatatatttataattatttaatgacatttggacccttgaaacatttcttagtgtattgatatgttgacttcggtctctaaaagtgctctttattaaataacaaatttcttcagtggtctagagccatatctgaaatattgctaagcaatttcagttcatccaggcacaatgtgattttaaaaaatacttccatctccaaatattttagatatagattgtttttgtgatgtatgaaggaaatgttatgtttagttctttcagatctttgaatgcctctaacacagctttgccttctaaagcggtaattagggatttaaaaaacaacctttagccctttatcagcatgaaatgctggagtgatgtggttttctaatttctttggggtaattatgactcttgtcatattaaaaagacaagcacaagtaaatcattgaactacagaaaaatgttctgtggtttcatagttaagcaaaactctaaatcgccaggcttcatagcaaagacatagtcagctaaaagccgcacatgtggatagagggttcaattatgagacacctagtacaggagagcaaaattgcaccagagattcttaaccaaccagccttaccaaacaacacaacaggggaaccccaatctgccttacccaaggccccactggcagctttccacagaatttgcatttagaggagcagaatgacatcactgtcctttgggagtaggtcctctgaaaaggcagcaggttccagcaggtagctgagctgagaggacatatggcccacggggacctacagacagcctttgacatttgtatttcttacaatggagggccaaggagggcaaggggctgtggagtttggtgtctactagtgtgtatgaatttgagctagagtccttctgtggcatgcactttgaccactcctggcagtcacatggcagatttccaagtgcaaatccttaatccaaacaaggatcatctaatgacaccaccaggccaatccctgctctcctccccgaaaagtcagggtcccttcattggaatcctccacccacccaagcagaatttagcagagatttgccttcaaaccctaacggcccccttgttctctggtccttctcaaacccacctttgtaggccacccagcattgcaggacagcgtgtggggcagctggacctgtgcttcctgcctgggagtctcccttggaattcatcctgactccttctaataaaaatggatgggaaagcaaaacactttgccttctaaaggccgtataccaagtatgcttagataaataagccacttttctattacttaagtaagaaggaagtagtaattgatactatttattgtttgtgtgtggtagcttgaagcacaccactgtccatttatttgtaagtgtaaaatatgtgtgtttgtttcagcagcacttaaaaaagccagtgtctggttacacatttcaattttaattaattgacataaaaatgctaccgccagtgccagctgcatcctatttaattaaaaaggtactatatttgtacattattttttaatgttaaaagggcttttttaagtttacagtacacataccgagtgactttagggatgcttttgtgttgaaatgttactatagtggctgcaggcagcaacccagaaacactttagaagctttttttccttgggaaaaattcaagcacttcttccctccaccctcactccaaccaccccaatgggggtaattcacatttcttagaacaaattctgcccttttttggtctagggattaaaattttgtttttctttctttctttttttttttttttcactgaacccttaatttgcactgggtcatgtgtttgatttgtgatttcaagaccaaagcaaagtcttactactactgtggaaccatgtactagttcctgggaattaaaatagcgtggttctctttgtagcacaaacattgctggaatttgcagtcttttcaatgcagccacatttttatccatttcagttgtctcacaaattttaacccatatcagagttccagaacaggtaccacagctttggttttagattagtggaataacattcagcccagaactgagaaactcaacagattaactatcgtttgctctttagacggtctcactgcctctcacttgccagagccctttcaaaatgagcagagaagtccacaccattagggaccatctgtgataaattcagaagggaggagatgtgtgtacagctttaaggattccctcaattccgaggaaagggactggcccagaatccaggttaatacatggaaacacgaagcattagcaaaagtaataattatacctatggtatttgaaagaacaataataaaagacacttcttccaaaccttgaatttgttgtttttagaaaacgaatgcatttaaaaatattttctatgtgagaattttttagatgtgtgtttacttcatgtttacaaataactgtttgctttttaatgcagtactttgaaatatatcagccaaaaccataacttacaataatttcttaggtattctgaataaaattccatttcttttggatatgctttaccattcttaggtttctgtggaacaaaaatatttgtagcattttgtgtaaatacaagctttcatttttattttttccaattgctattgcccaagaattgctttccatgcacatattgtaaaaattccgctttgtgccacaggtcatgattgtggatgagtttactcttaacttcaaagggactatttgtattgtatgttgcaactgtaaattgaattatttggcatttttctcatgattgtaatattaatttgaagtttgaatttaattttcaataaaatggcttttttggttttg

SEQ ID NO: 3742 - DNA, 1704 bp, Homo sapiens
  source 1..1704: mol_type = genomic DNA
atgcttcattcgcctcacaaacaaccacagaaccacaagtgcggtgcaaactttctccaggaggacagcaagaagtctctggtttttaaatggttaatctccgcaggtcactaccagccaccgagaccaacagagtcatttaaggctgcaagcagtatttacaacagagggtacaagttctatctgaaaaaaaaaggagggactatggcatcaaacagcctcttcagcacagtgacaccatgtcagcaaaacttcttttgggatccgagcaccagccggcgcttcagccccccctccagcagcctgcagcccggcaaaatgagcgacgtgagcccggtggtggctgcgcaacagcagcagcaacagcagcagcagcaacagcagcagcagcagcagcaacagcagcagcagcagcaggaggcggcggcggcggctgcggcggcggcggcggctgcggcggcggcagctgcagtgccccggttgcggccgccccacgacaaccgcaccatggtggagatcatcgccgaccacccggccgaactcgtccgcaccgacagccccaacttcctgtgctcggtgctgccctcgcactggcgctgcaacaagaccctgcccgtggccttcaaggtggtagccctcggagaggtaccagatgggactgtggttactgtcatggcgggtaacgatgaaaattattctgctgagctccggaatgcctctgctgttatgaaaaaccaagtagcaaggttcaacgatctgagatttgtgggccggagtggacgaggcaagagtttcaccttgaccataaccgtcttcacaaatcctccccaagtagctacctatcacagagcaattaaagttacagtagatggacctcgggaacccagaaggcacagacagaagcttgatgactctaaacctagtttgttctctgaccgcctcagtgatttagggcgcattcctcatcccagtatgagagtaggtgtcccgcctcagaacccacggccctccctgaactctgcaccaagtccttttaatccacaaggacagagtcagattacagaccccaggcaggcacagtcttccccgccgtggtcctatgaccagtcttacccctcctacctgagccagatgacgtccccgtccatccactctaccaccccgctgtcttccacacggggcactgggcttcctgccatcaccgatgtgcctaggcgcatttcaggtgcttcagaactgggccctttttcagaccccaggcagttcccaagcatttcatccctcactgagagccgcttctccaacccacgaatgcactatccagccacctttacttacaccccgccagtcacctcaggcatgtccctcggtatgtccgccaccactcactaccacacctacctgccaccaccctaccccggctcttcccaaagccagagtggacccttccagaccagcagcactccatatctctactatggcacttcgtcaggatcctatcagtttcccatggtgccggggggagaccggtctccttccagaatgcttccgccatgcaccaccacctcgaatggcagcacgctattaaatccaaatttgcctaaccagaatgatggtgttgacgctgatggaagccacagcagttccccaactgttttgaattctagtggcagaatggatgaatctgtttggcgaccatattga

SEQ ID NO: 3743 - DNA, 3861 bp, Homo sapiens
  source 1..3861: mol_type = genomic DNA
gccgctgttatgcgtattcccgtagacccaagcaccagccgccgcttcacacctccctccccggccttcccctgcggcggcggcggcggcaagatgggcgagaacagcggcgcgctgagcgcgcaggcggccgtggggcccggagggcgcgcccggcccgaggtgcgctcgatggtggacgtgctggcggaccacgcaggcgagctcgtgcgcaccgacagccccaacttcctctgctccgtgctgccctcgcactggcgctgcaacaagacgctgcccgtcgccttcaaggtggtggcattgggggacgtgccggatggtacggtggtgactgtgatggcaggcaatgacgagaactactccgctgagctgcgcaatgcctcggccgtcatgaagaaccaggtggccaggttcaacgaccttcgcttcgtgggccgcagtgggcgagggaagagtttcaccctgaccatcactgtgttcaccaaccccacccaagtggcgacctaccaccgagccatcaaggtgaccgtggacggaccccgggagcccagacggcaccggcagaagctggaggaccagaccaagccgttccctgaccgctttggggacctggaacggctgcgcatgcgggtgacaccgagcacacccagcccccgaggctcactcagcaccacaagccacttcagcagccagccccagaccccaatccaaggcacctcggaactgaacccattctccgacccccgccagtttgaccgctccttccccacgctgccaaccctcacggagagccgcttcccagaccccaggatgcattatcccggggccatgtcagctgccttcccctacagcgccacgccctcgggcacgagcatcagcagcctcagcgtggcgggcatgccggccaccagccgcttccaccatacctacctcccgccaccctacccgggggccccgcagaaccagagcgggcccttccaggccaacccgtccccctaccacctctactacgggacatcctctggctcctaccagttctccatggtggccggcagcagcagtgggggcgaccgctcacctacccgcatgctggcctcttgcaccagcagcgctgcctctgtcgccgccggcaacctcatgaaccccagcctgggcggccagagtgatggcgtggaggccgacggcagccacagcaactcacccacggccctgagcacgccaggccgcatggatgaggccgtgtggcggccctactgaccgccctggtggactcctcccgctggaggcggggaccctaacaaccttcaagaccagtgatgggccggctccgaggctccgggcgggaatgggacctgcgctccagggtggtctcggtcccagggtggtcccagctggtgggagcctctggctgcatctgtgcagccacatccttgtacagaggcataggttaccacccccaccccggcccgggatactgcccccggcccagatcctggccgtctcatcccatacttctgtggggaatcagcctcctgccacccccccggaaggacctcactgtctccagctatgcccagtgctgcatgggacccatgtctcctgggacagaggccatctctcttccagagagaggcagcattggcccacaggataagcctcaggccctgggaaacctcccgacccctgcaccttcgttggagcccctgcatcccctgggtccagccccctctgcatttacacagatttgagtcagaactggaaagtgtcccccacccccaccaccctcgagcggggttcccctcattgtacagatggggcaggacccagcacgctgctggcagagatggtttgagaacacatccaagccagtccccccagcccagcttcccctccgttcctaactgttggctttcccccagccgcacgggtcccaggccccagagaagatgagtctatggcatcaggttcttaaacccaggaaagcacctacagaccggctcctccatgcactttaccagctcaacgcatccactctctgttctcttggcagggcgggggaggggggataggaggtcccctttcccctaggtggtctcataattccatttgtggagagaacaggagggccagatagataggtcctagcagaaggcattgaggtgagggatcattttgggtcagacatcaatgtccctgtcccccctgggtccagccaagctgtgccccatcccccaagcctcctgggaggatccagccaaatcttgcgactcctggcacacacctgtctgtaacctgttttgtgctctgaaagcaaatagtcctgagcaaaaaaaaaaaaaaaacaaaaaaacaaaaaaaaaacaaaacagtttttaaaactgattttagaaaaagaagcttaatctaacgttttcaaacacaaggtctcttacaggtatagttccgtgattatgatagctctgtgattataagcaacatccccgccccctctcccccccgcggacccccagctgcctcctgagggtgtggggttattagggtctcaatactttctcaaggggctacactccccatcaggcagcatcccaccagcctgcaccacaggctcccctgggaggacgagggaaacgctgatgagacgctgggcatctctcctctgtggctctaggacatctgtccaggaggctgggcggaggtgggcaggatgtgagaggtggggagtactggctgtgcgtggcaggacagaagcactgtaaagggctctccagccgcagctcagctgcactgcgttccgaggtgaagtcttgcccctgaattttgcaaaatgggaaagtgggcgcttgcccaagggccaggctgcatggattctcacatcagagttctctggccctagaaaggcttagaaaaggcgtaagggaactcataaaggctagcagcatgcggtattttaactttctgcctcggcctctgtggatgcagaaatctgccctacaaaatgctcttcattggttgtctctgtgagagcactgtccccacccaacctgtcacaacggccagaaccatacaccagagacacactggcaggttaggcagtccttctggtgatcctattccattccctcctgctgcggtttctcttggcctgtcctcactggaaaaacagtctccatctcctcaaaatagttgctgactccctgcacccaaggggcctctccatgccttcttaggaagcagctatgaatccattgtccttgtagtttcttccctcctgttctctggttatagctggtcccaggtcagcgtgggaggcacctttgggttcccagtgcccagcactttgtagtctcatcccagattactaacccttcctgatcctggagaggcagggatagtaaataaattgctcttcctaccccatcccccatcccctgacaaaaagtgacggcagccgtactgagtctgtaaggcccaaagtgggtacagacagcctgggctggtaaaagtaggtccttatttacaaggctgcgttaaagttgtactaggcaaacacactgatgtaggaagcacgaggaaaggaagacgttttgatatagtgttactgtgagcctgtcagtagtgggtaccaatcttttgtgacatattgtcatgctgaggtgtgacacctgctgcactcatctgatgtaaaaccatcccagagctggcgagaggatggagctgggtggaaactgctttgcactatcgtttgcttggtgtttgtttttaacgcacaacttgcttgtacagtaaactgtcttctgtactatttaactgtaaaatggaattttgactgatttgttacaataatataactctgagatgtgt

SEQ ID NO: 3744 - DNA, 2629 bp, Homo sapiens
  source 1..2629: mol_type = genomic DNA
ggcggcccactctgctctgtcagcttcggagctcctccaccctggctgccgaaagccccttcccgccatctaatgatacactctgcatacgcttctgttgagaatttgtggctagacattcctgtgggaccgggaatccaaattcttggtagctagaggaaaaaaaaataaaacaacagccaaccaagtgaatcccaacccaaccccctgaagggctgaaaattctcgccttcttcagagcggggcatggcatcgaacagcatcttcgactccttcccgacctactcgccgaccttcatccgcgacccaagcaccagccgccgcttcacacctccctccccggccttcccctgcggcggcggcggcggcaagatgggcgagaacagcggcgcgctgagcgcgcaggcggccgtggggcccggagggcgcgcccggcccgaggtgcgctcgatggtggacgtgctggcggaccacgcaggcgagctcgtgcgcaccgacagccccaacttcctctgctccgtgctgccctcgcactggcgctgcaacaagacgctgcccgtcgccttcaaggtggtggcattgggggacgtgccggatggtacggtggtgactgtgatggcaggcaatgacgagaactactccgctgagctgcgcaatgcctcggccgtcatgaagaaccaggtggccaggttcaacgaccttcgcttcgtgggccgcagtgggcgagggaagagtttcaccctgaccatcactgtgttcaccaaccccacccaagtggcgacctaccaccgagccatcaaggtgaccgtggacggaccccgggagcccagacggcaccggcagaagctggaggaccagaccaagccgttccctgaccgctttggggacctggaacggctgcgcatgcgggtgacaccgagcacacccagcccccgaggctcactcagcaccacaagccacttcagcagccagccccagaccccaatccaaggcacctcggaactgaacccattctccgacccccgccagtttgaccgctccttccccacgctgccaaccctcacggagagccgcttcccagaccccaggatgcattatcccggggccatgtcagctgccttcccctacagcgccacgccctcgggcacgagcatcagcagcctcagcgtggcgggcatgccggccaccagccgcttccaccatacctacctcccgccaccctacccgggggccccgcagaaccagagcgggcccttccaggccaacccgtccccctaccacctctactacgggacatcctctggctcctaccagttctccatggtggccggcagcagcagtgggggcgaccgctcacctacccgcatgctggcctcttgcaccagcagcgctgcctctgtcgccgccggcaacctcatgaaccccagcctgggcggccagagtgatggcgtggaggccgacggcagccacagcaactcacccacggccctgagcacgccaggccgcatggatgaggccgtgtggcggccctactgaccgccctggtggactcctcccgctggaggcggggaccctaacaaccttcaagaccagtgatgggccggctccgaggctccgggcgggaatgggacctgcgctccagggtggtctcggtcccagggtggtcccagctggtgggagcctctggctgcatctgtgcagccacatccttgtacagaggcataggttaccacccccaccccggcccgggatactgcccccggcccagatcctggccgtctcatcccatacttctgtggggaatcagcctcctgccacccccccggaaggacctcactgtctccagctatgcccagtgctgcatgggacccatgtctcctgggacagaggccatctctcttccagagagaggcagcattggcccacaggataagcctcaggccctgggaaacctcccgacccctgcaccttcgttggagcccctgcatcccctgggtccagccccctctgcatttacacagatttgagtcagaactggaaagtgtcccccacccccaccaccctcgagcggggttcccctcattgtacagatggggcaggacccagcacgctgctggcagagatggtttgagaacacatccaagccagtccccccagcccagcttcccctccgttcctaactgttggctttcccccagccgcacgggtcccaggccccagagaagatgagtctatggcatcaggttcttaaacccaggaaagcacctacagaccggctcctccatgcactttaccagctcaacgcatccactctctgttctcttggcagggcgggggaggggggataggaggtcccctttcccctaggtggtctcataattccatttgtggagagaacaggagggccagatagataggtcctagcagaaggcattgaggtgagggatcattttgggtcagacatcaatgtccctgtcccccctgggtccagccaagctgtgccccatcccccaagcctcctgggaggatccagccaaatcttgcgactcctggcacacacctgtctgtaacctgttttgtgctctgaaagcaaatagtcctgagcaaaaaaaaaaaaaaaacaaaaaaa

SEQ ID NO: 3745 - DNA, 4340 bp, Homo sapiens
  source 1..4340: mol_type = genomic DNA
attcattcattccccgtggcactggaggcggcccactctgctctgtcagcttcggagctcctccaccctggctgccgaaagccccttcccgccatctaatgatacactctgcatacgcttctgttgagaatttgtggctagacattcctgtgggaccgggaatccaaattcttgggtacaaacagaaacttactttccttggggatttttttctctctctcactcacacacactctcgcgttctttccttttttctttttcgtagcagcaggggggaaaaaagagacaaaaacaaaacaaaaaacaacaaaaagcaacaccccccccttttattttcaaaagtagctagaggaaaaaaaaataaaacaacagccaaccaagtgaatcccaacccaaccccctgaagggctgaaaattctcgccttcttcagagcggggcatggcatcgaacagcatcttcgactccttcccgacctactcgccgaccttcatccgcgacccaagcaccagccgccgcttcacacctccctccccggccttcccctgcggcggcggcggcggcaagatgggcgagaacagcggcgcgctgagcgcgcaggcggccgtggggcccggagggcgcgcccggcccgaggtgcgctcgatggtggacgtgctggcggaccacgcaggcgagctcgtgcgcaccgacagccccaacttcctctgctccgtgctgccctcgcactggcgctgcaacaagacgctgcccgtcgccttcaaggtggtggcattgggggacgtgccggatggtacggtggtgactgtgatggcaggcaatgacgagaactactccgctgagctgcgcaatgcctcggccgtcatgaagaaccaggtggccaggttcaacgaccttcgcttcgtgggccgcagtgggcgagggaagagtttcaccctgaccatcactgtgttcaccaaccccacccaagtggcgacctaccaccgagccatcaaggtgaccgtggacggaccccgggagcccagacggcaccggcagaagctggaggaccagaccaagccgttccctgaccgctttggggacctggaacggctgcgcatgcgggtgacaccgagcacacccagcccccgaggctcactcagcaccacaagccacttcagcagccagccccagaccccaatccaaggcacctcggaactgaacccattctccgacccccgccagtttgaccgctccttccccacgctgccaaccctcacggagagccgcttcccagaccccaggatgcattatcccggggccatgtcagctgccttcccctacagcgccacgccctcgggcacgagcatcagcagcctcagcgtggcgggcatgccggccaccagccgcttccaccatacctacctcccgccaccctacccgggggccccgcagaaccagagcgggcccttccaggccaacccgtccccctaccacctctactacgggacatcctctggctcctaccagttctccatggtggccggcagcagcagtgggggcgaccgctcacctacccgcatgctggcctcttgcaccagcagcgctgcctctgtcgccgccggcaacctcatgaaccccagcctgggcggccagagtgatggcgtggaggccgacggcagccacagcaactcacccacggccctgagcacgccaggccgcatggatgaggccgtgtggcggccctactgaccgccctggtggactcctcccgctggaggcggggaccctaacaaccttcaagaccagtgatgggccggctccgaggctccgggcgggaatgggacctgcgctccagggtggtctcggtcccagggtggtcccagctggtgggagcctctggctgcatctgtgcagccacatccttgtacagaggcataggttaccacccccaccccggcccgggatactgcccccggcccagatcctggccgtctcatcccatacttctgtggggaatcagcctcctgccacccccccggaaggacctcactgtctccagctatgcccagtgctgcatgggacccatgtctcctgggacagaggccatctctcttccagagagaggcagcattggcccacaggataagcctcaggccctgggaaacctcccgacccctgcaccttcgttggagcccctgcatcccctgggtccagccccctctgcatttacacagatttgagtcagaactggaaagtgtcccccacccccaccaccctcgagcggggttcccctcattgtacagatggggcaggacccagcacgctgctggcagagatggtttgagaacacatccaagccagtccccccagcccagcttcccctccgttcctaactgttggctttcccccagccgcacgggtcccaggccccagagaagatgagtctatggcatcaggttcttaaacccaggaaagcacctacagaccggctcctccatgcactttaccagctcaacgcatccactctctgttctcttggcagggcgggggaggggggataggaggtcccctttcccctaggtggtctcataattccatttgtggagagaacaggagggccagatagataggtcctagcagaaggcattgaggtgagggatcattttgggtcagacatcaatgtccctgtcccccctgggtccagccaagctgtgccccatcccccaagcctcctgggaggatccagccaaatcttgcgactcctggcacacacctgtctgtaacctgttttgtgctctgaaagcaaatagtcctgagcaaaaaaaaaaaaaaaacaaaaaaacaaaaaaaaaacaaaacagtttttaaaactgattttagaaaaagaagcttaatctaacgttttcaaacacaaggtctcttacaggtatagttccgtgattatgatagctctgtgattataagcaacatccccgccccctctcccccccgcggacccccagctgcctcctgagggtgtggggttattagggtctcaatactttctcaaggggctacactccccatcaggcagcatcccaccagcctgcaccacaggctcccctgggaggacgagggaaacgctgatgagacgctgggcatctctcctctgtggctctaggacatctgtccaggaggctgggcggaggtgggcaggatgtgagaggtggggagtactggctgtgcgtggcaggacagaagcactgtaaagggctctccagccgcagctcagctgcactgcgttccgaggtgaagtcttgcccctgaattttgcaaaatgggaaagtgggcgcttgcccaagggccaggctgcatggattctcacatcagagttctctggccctagaaaggcttagaaaaggcgtaagggaactcataaaggctagcagcatgcggtattttaactttctgcctcggcctctgtggatgcagaaatctgccctacaaaatgctcttcattggttgtctctgtgagagcactgtccccacccaacctgtcacaacggccagaaccatacaccagagacacactggcaggttaggcagtccttctggtgatcctattccattccctcctgctgcggtttctcttggcctgtcctcactggaaaaacagtctccatctcctcaaaatagttgctgactccctgcacccaaggggcctctccatgccttcttaggaagcagctatgaatccattgtccttgtagtttcttccctcctgttctctggttatagctggtcccaggtcagcgtgggaggcacctttgggttcccagtgcccagcactttgtagtctcatcccagattactaacccttcctgatcctggagaggcagggatagtaaataaattgctcttcctaccccatcccccatcccctgacaaaaagtgacggcagccgtactgagtctgtaaggcccaaagtgggtacagacagcctgggctggtaaaagtaggtccttatttacaaggctgcgttaaagttgtactaggcaaacacactgatgtaggaagcacgaggaaaggaagacgttttgatatagtgttactgtgagcctgtcagtagtgggtaccaatcttttgtgacatattgtcatgctgaggtgtgacacctgctgcactcatctgatgtaaaaccatcccagagctggcgagaggatggagctgggtggaaactgctttgcactatcgtttgcttggtgtttgtttttaacgcacaacttgcttgtacagtaaactgtcttctgtactatttaactgtaaaatggaattttgactgatttgttacaataatataactctgagatgtgtggaagga

SEQ ID NO: 3746 - DNA, 1338 bp, Homo sapiens
  source 1..1338: mol_type = genomic DNA
ctggaggatttgttctggggctgcggccgcccccgggggaagccgcgccgtctccgcctgcccggcgccctgacggccgctgttatgcgtattcccgtagacccaagcaccagccgccgcttcacacctccctccccggccttcccctgcggcggcggcggcggcaagatgggcgagaacagcggcgcgctgagcgcgcaggcggccgtggggcccggagggcgcgcccggcccgaggtgcgctcgatggtggacgtgctggcggaccacgcaggcgagctcgtgcgcaccgacagccccaacttcctctgctccgtgctgccctcgcactggcgctgcaacaagacgctgcccgtcgccttcaaggtggtggcattgggggacgtgccggatggtacggtggtgactgtgatggcaggcaatgacgagaactactccgctgagctgcgcaatgcctcggccgtcatgaagaaccaggtggccaggttcaacgaccttcgcttcgtgggccgcagtgggcgagggaagagtttcaccctgaccatcactgtgttcaccaaccccacccaagtggcgacctaccaccgagccatcaaggtgaccgtggacggaccccgggagcccagacgcacctcggaactgaacccattctccgacccccgccagtttgaccgctccttccccacgctgccaaccctcacggagagccgcttcccagaccccaggatgcattatcccggggccatgtcagctgccttcccctacagcgccacgccctcgggcacgagcatcagcagcctcagcgtggcgggcatgccggccaccagccgcttccaccatacctacctcccgccaccctacccgggggccccgcagaaccagagcgggcccttccaggccaacccgtccccctaccacctctactacgggacatcctctggctcctaccagttctccatggtggccggcagcagcagtgggggcgaccgctcacctacccgcatgctggcctcttgcaccagcagcgctgcctctgtcgccgccggcaacctcatgaaccccagcctgggcggccagagtgatggcgtggaggccgacggcagccacagcaactcacccacggccctgagcacgccaggccgcatggatgaggccgtgtggcggccctactgaccgccctggtggactcctcccgctggaggcggggaccctaacaaccttcaagaccagtgatgggccggctccgaggctccgggcgggaatgggacctgcgctccagggtggtctcggtcccagggtggtcccagctggtgggagcctctggctgcatctgtgcag

SEQ ID NO: 3747 - DNA, 1392 bp, Homo sapiens
  source 1..1392: mol_type = genomic DNA
gaaattttaccggacggcgctaggccgggatcggggcactgctctccagacgtttgctcggggatattatgcgtcccgaatggtggtggcattgggggacgtgccggatggtacggtggtgactgtgatggcaggcaatgacgagaactactccgctgagctgcgcaatgcctcggccgtcatgaagaaccaggtggccaggttcaacgaccttcgcttcgtgggccgcagtgggcgagggaagagtttcaccctgaccatcactgtgttcaccaaccccacccaagtggcgacctaccaccgagccatcaaggtgaccgtggacggaccccgggagcccagacggcaccggcagaagctggaggaccagaccaagccgttccctgaccgctttggggacctggaacggctgcgcatgcgggtgacaccgagcacacccagcccccgaggctcactcagcaccacaagccacttcagcagccagccccagaccccaatccaaggcacctcggaactgaacccattctccgacccccgccagtttgaccgctccttccccacgctgccaaccctcacggagagccgcttcccagaccccaggatgcattatcccggggccatgtcagctgccttcccctacagcgccacgccctcgggcacgagcatcagcagcctcagcgtggcgggcatgccggccaccagccgcttccaccatacctacctcccgccaccctacccgggggccccgcagaaccagagcgggcccttccaggccaacccgtccccctaccacctctactacgggacatcctctggctcctaccagttctccatggtggccggcagcagcagtgggggcgaccgctcacctacccgcatgctggcctcttgcaccagcagcgctgcctctgtcgccgccggcaacctcatgaaccccagcctgggcggccagagtgatggcgtggaggccgacggcagccacagcaactcacccacggccctgagcacgccaggccgcatggatgaggccgtgtggcggccctactgaccgccctggtggactcctcccgctggaggcggggaccctaacaaccttcaagaccagtgatgggccggctccgaggctccgggcgggaatgggacctgcgctccagggtggtctcggtcccagggtggtcccagctggtgggagcctctggctgcatctgtgcagccacatccttgtacagaggcataggttaccacccccaccccggcccgggatactgcccccggcccagatcctggccgtctcatcccatacttctgtggggaatcagcctcctgccacccccccggaaggacctcactgtctccagctatgcccagtgctgcatgggacccatgtctcct

SEQ ID NO: 3748 - DNA, 4048 bp, Homo sapiens
  source 1..4048: mol_type = genomic DNA
tatggtttgaagtggtgaacatggatttttctcggcttcacatgtacagtcctccccagtgtgtgccggagaacacgggctacacgtatgcgctcagttccagctattcttcagatgctctggattttgagacggagcacaaattggaccctgtatttgattctccacggatgtcccgccgtagtttgcgcctggccacgacagcatgcaccctgggggatggtgaggctgtgggtgccgacagcggcaccagcagcgctgtctccctgaagaaccgagcggccagaacaacaaaacagcgcagaagcacaaacaaatcagcttttagtatcaaccacgtgtcaaggcaggtcacgtcctctggcgtcagccacggcggcactgtcagcctgcaggatgctgtgactcgacggcctcctgtattggacgagtcttggattcgtgaacagaccacagtggaccacttctggggtcttgatgatgatggtgatcttaaaggtggaaataaagctgccattcagggaaacggggatgtgggagccgccgccgccaccgcgcacaacggcttctcctgcagcaactgcagcatgctgtccgagcgcaaggacgtgctcacggcgcaccccgcggcccccgggcccgtgtcgagagtttattctagggacaggaatcaaaaatgcgacgactgtaagggcaagaggcacctcgacgcgcaccccggtcgggcagggaccctctggcacatctgggcatgtgcaggttacttcttgctgcagattctgcgcaggatcggagctgtgggccaggctgtgtccaggacggcgtggtcggccctttggctggccgtggttgctccagggaaggcagcctctggagtgttctggtggctggggattggatggtaccagtttgttactttgatttcttggctgaatgtgtttcttcttaccaggtgccttcgaaacatctgcaagtttttagtcttgctcatcccactcttccttttactagcaggtctctccttacggggccagggcaatttcttttcgttcttgcccgtgttgaactgggcaagcatgcatagaacacagcgggtggatgacccccaggacgtgtttaaacccacgacttctcgcctgaagcagcctctgcagggtgacagtgaggcttttccgtggcattggatgagtggcgtggagcagcaggtggcctctctgtctggacagtgccaccaccatggtgagaatctccgagagctgaccactttgctacagaagctgcaggctcgggtggaccagatggaaggcggcgctgccgggccgtcagcttcggtcagagacgctgtgggacagcccccgagggagactgactttatggcctttcaccaagaacatgaagtgcgtatgtcacacttggaagatattctgggaaaactgagagaaaaatctgaggccatccagaaggaactagaacagaccaagcaaaaaacaatcagtgcggttggtgagcagctcctgcccacagtcgagcacctccagctggagctggatcagctaaagtcagagctgtccagctggcgacacgtgaagaccggctgtgagacagtggatgccgtacaagaaagagtggacgtgcaagtcagagaaatggtgaaactcctgttttccgaagatcagcaaggcggttctctggaacagctgctgcagaggttctcatcacagtttgtgagcaaaggcgacttgcagacgatgctgcgagacctgcagctgcagatcctgcggaacgtcacccaccacgtttccgtgaccaagcagctcccaacctcagaagccgtggtgtctgctgtgagcgaggcgggggcgtctggaataacagaggcgcaagcacgtgccatcgtgaacagcgccttgaagctgtattcccaagataagaccgggatggtggactttgctctggaatctggtggtggcagcatcttgagtactcgctgttctgaaacttacgaaaccaaaacggcgctgatgagtctgtttgggatcccgctgtggtacttctcgcagtccccgcgcgtggtcatccagcctgacatttaccccggtaactgctgggcatttaaaggctcccaggggtacctggtggtgaggctctccatgatgatccacccagccgccttcactctggagcacatccctaagacgctgtcgccaacaggcaacatcagcagcgcccccaaggacttcgccgtctatggattagaaaatgagtatcaggaagaagggcagcttctgggacagttcacgtatgatcaggatggggagtcgctccagatgttccaggccctgaaaagacccgacgacacagctttccaaatagtggaacttcggattttttctaactggggccatcctgagtatacctgtctgtatcggttcagagttcatggcgaacctgtcaagtgaagacactactcattatttttgtacatttttgtatatactgggacagcgtgaaacactggaatccttcatggacgagggcatatacaatgatgggacagtgccacactccttcaataaacgtggctgctggccagaggacgtgagcgtgtgacgggcgccttggcgccacctgttgggtgctcactgcctctgcaggtgcagaggggtcagcagcaggagaagcgtgttgaacacgtggctctcagacactccttgtttttaacgggaagctctttgcatttgcatttcctcaacaaaggagcaaagcagaggaagctgagagtctggcgtgttcttgacgctttggtcttcagccttgcactggctcttctaaaggacttttggagggcagataatttcatctgttaaatccaacacacatttctttcagggaaaaacaatgtcaccaaattttcagagttctaaactcctttccttcaagccggaattttccttttttcagcaccagtaggtactaagtctccagatggggaaataactaaaatgtgtttttctgctttgttcgctcttacttctgaggaaggtttccagtcaggactcgctgtaccaatatccatggaggaatatgggagcgtttcgctctccttgtaggctgaagtcagtctgacttgaaggggcctggtttggatctaagcaaacacccagatggggttctctggtctcagcaaggcttttcctgttgggagtcacagtaaacagaaacccaaaaatctcatcttgggtgttttcagggcttgttttgagttttgctgaatagggagcgcaagacgccctgagcctccctctcactggtggtgataagaggagccgtctggtgtgtcagggtcacgaacccgttacatttcaggacgatcctttttccttcagcagcatttcttactggctgtggctggaatctgccttttatcacagctgtcaccattctcacgtgattcttgtgagactctttttggttataattactatttaatatttagactattttactgagcagactttataaatgagatatctacaaggcacttaaagtgttacagatgttttaccttaagaattatttaagttgtgttgggttaagacagttttcagtgtaccgtaaatgttgtgttttcagaaaaagacaaaacgatggtgctgactggttttctgtatattgcacaacagtcctcaaatacactgatgtatgaaactattcatacatcaagcagcatttttttcactctccttagaattggaactatgcagttaaggcagataaaatgtacagatgtttcatatattacaggttacatatataaatcaaaatttcctatataaaactgatttgggatttggggtggaaatattttgaatattaatttatttttaaagatgcaagataggactttgtgcaatgtatttttgtaaatgcttttcaaaatatctgtctttggtagtgcttctgctgctgccaccaaattgataagatgctattaagaggtttaaataaagagttttaatttttaaaagggcatgggatataaacagtc

SEQ ID NO: 3749 - DNA, 3812 bp, Homo sapiens
  source 1..3812: mol_type = genomic DNA
agagcgtcttctcgggcctgggcggcgcagacgaggcctgaggcggcggcgcgaggcagttccagctattcttcagatgctctggattttgagacggagcacaaattggaccctgtatttgattctccacggatgtcccgccgtagtttgcgcctggccacgacagcatgcaccctgggggatggtgaggctgtgggtgccgacagcggcaccagcagcgctgtctccctgaagaaccgagcggccagaacaacaaaacagcgcagaagcacaaacaaatcagcttttagtatcaaccacgtgtcaaggcaggtcacgtcctctggcgtcagccacggcggcactgtcagcctgcaggatgctgtgactcgacggcctcctgtattggacgagtcttggattcgtgaacagaccacagtggaccacttctggggtcttgatgatgatggtgatcttaaaggtggaaataaagctgccattcagggaaacggggatgtgggagccgccgccgccaccgcgcacaacggcttctcctgcagcaactgcagcatgctgtccgagcgcaaggacgtgctcacggcgcaccccgcggcccccgggcccgtgtcgagagtttattctagggacaggaatcaaaaatggaaggcagcctctggagtgttctggtggctggggattggatggtaccagtttgttactttgatttcttggctgaatgtgtttcttcttaccaggtgccttcgaaacatctgcaagtttttagtcttgctcatcccactcttccttttactagcaggtctctccttacggggccagggcaatttcttttcgttcttgcccgtgttgaactgggcaagcatgcatagaacacagcgggtggatgacccccaggacgtgtttaaacccacgacttctcgcctgaagcagcctctgcagggtgacagtgaggcttttccgtggcattggatgagtggcgtggagcagcaggtggcctctctgtctggacagtgccaccaccatggtgagaatctccgagagctgaccactttgctacagaagctgcaggctcgggtggaccagatggaaggcggcgctgccgggccgtcagcttcggtcagagacgctgtgggacagcccccgagggagactgactttatggcctttcaccaagaacatgaagtgcgtatgtcacacttggaagatattctgggaaaactgagagaaaaatctgaggccatccagaaggaactagaacagaccaagcaaaaaacaatcagtgcggttggtgagcagctcctgcccacagtcgagcacctccagctggagctggatcagctaaagtcagagctgtccagctggcgacacgtgaagaccggctgtgagacagtggatgccgtacaagaaagagtggacgtgcaagtcagagaaatggtgaaactcctgttttccgaagatcagcaaggcggttctctggaacagctgctgcagaggttctcatcacagtttgtgagcaaaggcgacttgcagacgatgctgcgagacctgcagctgcagatcctgcggaacgtcacccaccacgtttccgtgaccaagcagctcccaacctcagaagccgtggtgtctgctgtgagcgaggcgggggcgtctggaataacagaggcgcaagcacgtgccatcgtgaacagcgccttgaagctgtattcccaagataagaccgggatggtggactttgctctggaatctggtggtggcagcatcttgagtactcgctgttctgaaacttacgaaaccaaaacggcgctgatgagtctgtttgggatcccgctgtggtacttctcgcagtccccgcgcgtggtcatccagcctgacatttaccccggtaactgctgggcatttaaaggctcccaggggtacctggtggtgaggctctccatgatgatccacccagccgccttcactctggagcacatccctaagacgctgtcgccaacaggcaacatcagcagcgcccccaaggacttcgccgtctatggattagaaaatgagtatcaggaagaagggcagcttctgggacagttcacgtatgatcaggatggggagtcgctccagatgttccaggccctgaaaagacccgacgacacagctttccaaatagtggaacttcggattttttctaactggggccatcctgagtatacctgtctgtatcggttcagagttcatggcgaacctgtcaagtgaagacactactcattatttttgtacatttttgtatatactgggacagcgtgaaacactggaatccttcatggacgagggcatatacaatgatgggacagtgccacactccttcaataaacgtggctgctggccagaggacgtgagcgtgtgacgggcgccttggcgccacctgttgggtgctcactgcctctgcaggtgcagaggggtcagcagcaggagaagcgtgttgaacacgtggctctcagacactccttgtttttaacgggaagctctttgcatttgcatttcctcaacaaaggagcaaagcagaggaagctgagagtctggcgtgttcttgacgctttggtcttcagccttgcactggctcttctaaaggacttttggagggcagataatttcatctgttaaatccaacacacatttctttcagggaaaaacaatgtcaccaaattttcagagttctaaactcctttccttcaagccggaattttccttttttcagcaccagtaggtactaagtctccagatggggaaataactaaaatgtgtttttctgctttgttcgctcttacttctgaggaaggtttccagtcaggactcgctgtaccaatatccatggaggaatatgggagcgtttcgctctccttgtaggctgaagtcagtctgacttgaaggggcctggtttggatctaagcaaacacccagatggggttctctggtctcagcaaggcttttcctgttgggagtcacagtaaacagaaacccaaaaatctcatcttgggtgttttcagggcttgttttgagttttgctgaatagggagcgcaagacgccctgagcctccctctcactggtggtgataagaggagccgtctggtgtgtcagggtcacgaacccgttacatttcaggacgatcctttttccttcagcagcatttcttactggctgtggctggaatctgccttttatcacagctgtcaccattctcacgtgattcttgtgagactctttttggttataattactatttaatatttagactattttactgagcagactttataaatgagatatctacaaggcacttaaagtgttacagatgttttaccttaagaattatttaagttgtgttgggttaagacagttttcagtgtaccgtaaatgttgtgttttcagaaaaagacaaaacgatggtgctgactggttttctgtatattgcacaacagtcctcaaatacactgatgtatgaaactattcatacatcaagcagcatttttttcactctccttagaattggaactatgcagttaaggcagataaaatgtacagatgtttcatatattacaggttacatatataaatcaaaatttcctatataaaactgatttgggatttggggtggaaatattttgaatattaatttatttttaaagatgcaagataggactttgtgcaatgtatttttgtaaatgcttttcaaaatatctgtctttggtagtgcttctgctgctgccaccaaattgataagatgctattaagaggtttaaataaagagttttaatttttaaaaggg

SEQ ID NO: 3750 - DNA, 3953 bp, Homo sapiens
  source 1..3953: mol_type = genomic DNA
gcagtatggtttgaagtggtgaacatggatttttctcggcttcacatgtacagtcctccccagtgtgtgccggagaacacgggctacacgtatgcgctcagttccagctattcttcagatgctctggattttgagacggagcacaaattggaccctgtatttgattctccacggatgtcccgccgtagtttgcgcctggccacgacagcatgcaccctgggggatggtgaggctgtgggtgccgacagcggcaccagcagcgctgtctccctgaagaaccgagcggccagaacaacaaaacagcgcagaagcacaaacaaatcagcttttagtatcaaccacgtgtcaaggcaggtcacgtcctctggcgtcagccacggcggcactgtcagcctgcaggatgctgtgactcgacggcctcctgtattggacgagtcttggattcgtgaacagaccacagtggaccacttctggggtcttgatgatgatggtgatcttaaaggtggaaataaagctgccattcagggaaacggggatgtgggagccgccgccgccaccgcgcacaacggcttctcctgcagcaactgcagcatgctgtccgagcgcaaggacgtgctcacggcgcaccccgcggcccccgggcccgtgtcgagagtttattctagggacaggaatcaaaaatgttacttcttgctgcagattctgcgcaggatcggagctgtgggccaggctgtgtccaggacggcgtggtcggccctttggctggccgtggttgctccagggaaggcagcctctggagtgttctggtggctggggattggatggtaccagtttgttactttgatttcttggctgaatgtgtttcttcttaccaggtgccttcgaaacatctgcaagtttttagtcttgctcatcccactcttccttttactagcaggtctctccttacggggccagggcaatttcttttcgttcttgcccgtgttgaactgggcaagcatgcatagaacacagcgggtggatgacccccaggacgtgtttaaacccacgacttctcgcctgaagcagcctctgcagggtgacagtgaggcttttccgtggcattggatgagtggcgtggagcagcaggtggcctctctgtctggacagtgccaccaccatggtgagaatctccgagagctgaccactttgctacagaagctgcaggctcgggtggaccagatggaaggcggcgctgccgggccgtcagcttcggtcagagacgctgtgggacagcccccgagggagactgactttatggcctttcaccaagaacatgaagtgcgtatgtcacacttggaagatattctgggaaaactgagagaaaaatctgaggccatccagaaggaactagaacagaccaagcaaaaaacaatcagtgcggttggtgagcagctcctgcccacagtcgagcacctccagctggagctggatcagctaaagtcagagctgtccagctggcgacacgtgaagaccggctgtgagacagtggatgccgtacaagaaagagtggacgtgcaagtcagagaaatggtgaaactcctgttttccgaagatcagcaaggcggttctctggaacagctgctgcagaggttctcatcacagtttgtgagcaaaggcgacttgcagacgatgctgcgagacctgcagctgcagatcctgcggaacgtcacccaccacgtttccgtgaccaagcagctcccaacctcagaagccgtggtgtctgctgtgagcgaggcgggggcgtctggaataacagaggcgcaagcacgtgccatcgtgaacagcgccttgaagctgtattcccaagataagaccgggatggtggactttgctctggaatctggtggtggcagcatcttgagtactcgctgttctgaaacttacgaaaccaaaacggcgctgatgagtctgtttgggatcccgctgtggtacttctcgcagtccccgcgcgtggtcatccagcctgacatttaccccggtaactgctgggcatttaaaggctcccaggggtacctggtggtgaggctctccatgatgatccacccagccgccttcactctggagcacatccctaagacgctgtcgccaacaggcaacatcagcagcgcccccaaggacttcgccgtctatggattagaaaatgagtatcaggaagaagggcagcttctgggacagttcacgtatgatcaggatggggagtcgctccagatgttccaggccctgaaaagacccgacgacacagctttccaaatagtggaacttcggattttttctaactggggccatcctgagtatacctgtctgtatcggttcagagttcatggcgaacctgtcaagtgaagacactactcattatttttgtacatttttgtatatactgggacagcgtgaaacactggaatccttcatggacgagggcatatacaatgatgggacagtgccacactccttcaataaacgtggctgctggccagaggacgtgagcgtgtgacgggcgccttggcgccacctgttgggtgctcactgcctctgcaggtgcagaggggtcagcagcaggagaagcgtgttgaacacgtggctctcagacactccttgtttttaacgggaagctctttgcatttgcatttcctcaacaaaggagcaaagcagaggaagctgagagtctggcgtgttcttgacgctttggtcttcagccttgcactggctcttctaaaggacttttggagggcagataatttcatctgttaaatccaacacacatttctttcagggaaaaacaatgtcaccaaattttcagagttctaaactcctttccttcaagccggaattttccttttttcagcaccagtaggtactaagtctccagatggggaaataactaaaatgtgtttttctgctttgttcgctcttacttctgaggaaggtttccagtcaggactcgctgtaccaatatccatggaggaatatgggagcgtttcgctctccttgtaggctgaagtcagtctgacttgaaggggcctggtttggatctaagcaaacacccagatggggttctctggtctcagcaaggcttttcctgttgggagtcacagtaaacagaaacccaaaaatctcatcttgggtgttttcagggcttgttttgagttttgctgaatagggagcgcaagacgccctgagcctccctctcactggtggtgataagaggagccgtctggtgtgtcagggtcacgaacccgttacatttcaggacgatcctttttccttcagcagcatttcttactggctgtggctggaatctgccttttatcacagctgtcaccattctcacgtgattcttgtgagactctttttggttataattactatttaatatttagactattttactgagcagactttataaatgagatatctacaaggcacttaaagtgttacagatgttttaccttaagaattatttaagttgtgttgggttaagacagttttcagtgtaccgtaaatgttgtgttttcagaaaaagacaaaacgatggtgctgactggttttctgtatattgcacaacagtcctcaaatacactgatgtatgaaactattcatacatcaagcagcatttttttcactctccttagaattggaactatgcagttaaggcagataaaatgtacagatgtttcatatattacaggttacatatataaatcaaaatttcctatataaaactgatttgggatttggggtggaaatattttgaatattaatttatttttaaagatgcaagataggactttgtgcaatgtatttttgtaaatgcttttcaaaatatctgtctttggtagtgcttctgctgctgccaccaaattgataagatgctattaagaggtttaaataaagagttttaatttttaaaaggg

SEQ ID NO: 3751 - DNA, 978 bp, Homo sapiens
  source 1..978: mol_type = genomic DNA
agtatggtttgaagtggtgaacatggatttttctcggcttcacatgtacagtcctccccagtgtgtgccggagaacacgggctacacgtatgcgctcagttccagctattcttcagatgctctggattttgagacggagcacaaattggaccctgtatttgattctccacggatgtcccgccgtagtttgcgcctggccacgacagcatgcaccctgggggatggtgaggctgtgggtgccgacagcggcaccagcagcgctgtctccctgaagaaccgagcggccagaacaacaaaacagcgcagaagcacaaacaaatcagcttttagtatcaaccacgtgtcaaggcaggtcacgtcctctggcgtcagccacggcggcactgtcagcctgcaggatgctgtgactcgacggcctcctgtattggacgagtcttggattcgtgaacagaccacagtggaccacttctggggtcttgatgatgatggtgatcttaaaggtggaaataaagctgccattcagggaaacggggatgtgggagccgccgccgccaccgcgcacaacggcttctcctgcagcaactgcagcatgctgtccgagcgcaaggacgtgctcacggcgcaccccgcggcccccgggcccgtgtcgagagtttattctagggacaggaatcaaaaatgtaagtctcagtcctttaaaactcagaaaaaggtgtgttttccaaatttaatatttcctttctgtaagtctcagtgtctgcactatttgtcttggagacttaaaattatcccttgaaagcataagaagtacaccccaaaccagctttgtccttcctgtcctcttctagtttacattttatgtggttagtaattttgtacctaaaagtatttgaaattctataaatttggacttgacgtgagcaaaagaaaatttctacgtaagcgaaactaataaaactacagtcactttcagatgca

SEQ ID NO: 3752 - DNA, 4062 bp, Homo sapiens
  source 1..4062: mol_type = genomic DNA
gcagtatggtttgaagtggtgaacatggatttttctcggcttcacatgtacagtcctccccagtgtgtgccggagaacacgggctacacgtatgcgctcagttccagctattcttcagatgctctggattttgagacggagcacaaattggaccctgtatttgattctccacggatgtcccgccgtagtttgcgcctggccacgacagcatgcaccctgggggatggtgaggctgtgggtgccgacagcggcaccagcagcgctgtctccctgaagaaccgagcggccagaacaacaaaacagcgcagaagcacaaacaaatcagcttttagtatcaaccacgtgtcaaggcaggtcacgtcctctggcgtcagccacggcggcactgtcagcctgcaggatgctgtgactcgacggcctcctgtattggacgagtcttggattcgtgaacagaccacagtggaccacttctggggtcttgatgatgatggtgatcttaaaggtggaaataaagctgccattcagggaaacggggatgtgggagccgccgccgccaccgcgcacaacggcttctcctgcagcaactgcagcatgctgtccgagcgcaaggacgtgctcacggcgcaccccgcggcccccgggcccgtgtcgagagtttattctagggacaggaatcaaaaatgcgacgactgtaagggcaagaggcacctcgacgcgcacacagccgcccactcgcagtcgccacggctgcccggtcgggcagggaccctctggcacatctgggcatgtgcaggttacttcttgctgcagattctgcgcaggatcggagctgtgggccaggctgtgtccaggacggcgtggtcggccctttggctggccgtggttgctccagggaaggcagcctctggagtgttctggtggctggggattggatggtaccagtttgttactttgatttcttggctgaatgtgtttcttcttaccaggtgccttcgaaacatctgcaagtttttagtcttgctcatcccactcttccttttactagcaggtctctccttacggggccagggcaatttcttttcgttcttgcccgtgttgaactgggcaagcatgcatagaacacagcgggtggatgacccccaggacgtgtttaaacccacgacttctcgcctgaagcagcctctgcagggtgacagtgaggcttttccgtggcattggatgagtggcgtggagcagcaggtggcctctctgtctggacagtgccaccaccatggtgagaatctccgagagctgaccactttgctacagaagctgcaggctcgggtggaccagatggaaggcggcgctgccgggccgtcagcttcggtcagagacgctgtgggacagcccccgagggagactgactttatggcctttcaccaagaacatgaagtgcgtatgtcacacttggaagatattctgggaaaactgagagaaaaatctgaggccatccagaaggaactagaacagaccaagcaaaaaacaatcagtgcggttggtgagcagctcctgcccacagtcgagcacctccagctggagctggatcagctaaagtcagagctgtccagctggcgacacgtgaagaccggctgtgagacagtggatgccgtacaagaaagagtggacgtgcaagtcagagaaatggtgaaactcctgttttccgaagatcagcaaggcggttctctggaacagctgctgcagaggttctcatcacagtttgtgagcaaaggcgacttgcagacgatgctgcgagacctgcagctgcagatcctgcggaacgtcacccaccacgtttccgtgaccaagcagctcccaacctcagaagccgtggtgtctgctgtgagcgaggcgggggcgtctggaataacagaggcgcaagcacgtgccatcgtgaacagcgccttgaagctgtattcccaagataagaccgggatggtggactttgctctggaatctggtggtggcagcatcttgagtactcgctgttctgaaacttacgaaaccaaaacggcgctgatgagtctgtttgggatcccgctgtggtacttctcgcagtccccgcgcgtggtcatccagcctgacatttaccccggtaactgctgggcatttaaaggctcccaggggtacctggtggtgaggctctccatgatgatccacccagccgccttcactctggagcacatccctaagacgctgtcgccaacaggcaacatcagcagcgcccccaaggacttcgccgtctatggattagaaaatgagtatcaggaagaagggcagcttctgggacagttcacgtatgatcaggatggggagtcgctccagatgttccaggccctgaaaagacccgacgacacagctttccaaatagtggaacttcggattttttctaactggggccatcctgagtatacctgtctgtatcggttcagagttcatggcgaacctgtcaagtgaagacactactcattatttttgtacatttttgtatatactgggacagcgtgaaacactggaatccttcatggacgagggcatatacaatgatgggacagtgccacactccttcaataaacgtggctgctggccagaggacgtgagcgtgtgacgggcgccttggcgccacctgttgggtgctcactgcctctgcaggtgcagaggggtcagcagcaggagaagcgtgttgaacacgtggctctcagacactccttgtttttaacgggaagctctttgcatttgcatttcctcaacaaaggagcaaagcagaggaagctgagagtctggcgtgttcttgacgctttggtcttcagccttgcactggctcttctaaaggacttttggagggcagataatttcatctgttaaatccaacacacatttctttcagggaaaaacaatgtcaccaaattttcagagttctaaactcctttccttcaagccggaattttccttttttcagcaccagtaggtactaagtctccagatggggaaataactaaaatgtgtttttctgctttgttcgctcttacttctgaggaaggtttccagtcaggactcgctgtaccaatatccatggaggaatatgggagcgtttcgctctccttgtaggctgaagtcagtctgacttgaaggggcctggtttggatctaagcaaacacccagatggggttctctggtctcagcaaggcttttcctgttgggagtcacagtaaacagaaacccaaaaatctcatcttgggtgttttcagggcttgttttgagttttgctgaatagggagcgcaagacgccctgagcctccctctcactggtggtgataagaggagccgtctggtgtgtcagggtcacgaacccgttacatttcaggacgatcctttttccttcagcagcatttcttactggctgtggctggaatctgccttttatcacagctgtcaccattctcacgtgattcttgtgagactctttttggttataattactatttaatatttagactattttactgagcagactttataaatgagatatctacaaggcacttaaagtgttacagatgttttaccttaagaattatttaagttgtgttgggttaagacagttttcagtgtaccgtaaatgttgtgttttcagaaaaagacaaaacgatggtgctgactggttttctgtatattgcacaacagtcctcaaatacactgatgtatgaaactattcatacatcaagcagcatttttttcactctccttagaattggaactatgcagttaaggcagataaaatgtacagatgtttcatatattacaggttacatatataaatcaaaatttcctatataaaactgatttgggatttggggtggaaatattttgaatattaatttatttttaaagatgcaagataggactttgtgcaatgtatttttgtaaatgcttttcaaaatatctgtctttggtagtgcttctgctgctgccaccaaattgataagatgctattaagaggtttaaataaagagttttaatttttaaaag

SEQ ID NO: 3753 - DNA, 1822 bp, Homo sapiens
  source 1..1822: mol_type = genomic DNA
caagtggttttaatgaagctcagttatgaatcagaaaattacaaattgaaaactcatgaatcaaaagattgtgaatccgaaagctataagtcaaaaagccatgaatcaaaagctcatgccagttactatgggagaatgaatgtgagagaggttctcagagaggatggccacctcagtgtaaatggggaagcgctgtggaaggcagcctctggagtgttctggtggctggggattggatggtaccagtttgttactttgatttcttggctgaatgtgtttcttcttaccaggtgccttcgaaacatctgcaagtttttagtcttgctcatcccactcttccttttactagcaggtctctccttacggggccagggcaatttcttttcgttcttgcccgtgttgaactgggcaagcatgcatagaacacagcgggtggatgacccccaggacgtgtttaaacccacgacttctcgcctgaagcagcctctgcagggtgacagtgaggcttttccgtggcattggatgagtggcgtggagcagcaggtggcctctctgtctggacagtgccaccaccatggtgagaatctccgagagctgaccactttgctacagaagctgcaggctcgggtggaccagatggaaggcggcgctgccgggccgtcagcttcgactgactttatggcctttcaccaagaacatgaagtgcgtatgtcacacttggaagatattctgggaaaactgagagaaaaatctgaggccatccagaaggaactagaacagaccaagcaaaaaacaatcagtgcggttggtgagcagctcctgcccacagtcgagcacctccagctggagctggatcagctaaagtcagagctgtccagctggcgacacgtgaagaccggctgtgagacagtggatgccgtacaagaaagagtggacgtgcaagtcagagaaatggtgaaactcctgttttccgaagatcagcaaggcggttctctggaacagctgctgcagaggttctcatcacagtttgtgagcaaaggcgacttgcagacgatgctgcgagacctgcagctgcagatcctgcggaacgtcacccaccacgtttccgtgaccaagcagctcccaacctcagaagccgtggtgtctgctgtgagcgaggcgggggcgtctggaataacagaggcgcaagcacgtgccatcgtgaacagcgccttgaagctgtattcccaagataagaccgggatggtggactttgctctggaatctggtggtggcagcatcttgagtactcgctgttctgaaacttacgaaaccaaaacggcgctgatgagtctgtttgggatcccgctgtggtacttctcgcagtccccgcgcgtggtcatccagcctgacatttaccccggtaactgctgggcatttaaaggctcccaggggtacctggtggtgaggctctccatgatgatccacccagccgccttcactctggagcacatccctaagacgctgtcgccaacaggcaacatcagcagcgcccccaaggacttcgccgtctatggattagaaaatgagtatcaggaagaagggcagcttctgggacagttcacgtatgatcaggatggggagtcgctccagatgttccaggccctgaaaagacccgacgacacagctttccaaatagtggaacttcggattttttctaactggggccatcctgagtatacctgtctgtatcggttcagagttcatggcgaacctgtcaagtgaagacactactcattatttttgtacatttttgtatatactgggacagcgtgaaacactg

SEQ ID NO: 3754 - DNA, 540 bp, Homo sapiens
  source 1..540: mol_type = genomic DNA
aatatactcaacactttctaacctaaaaaatatcctgttttttggtgaggaaaaaagtgtaaatagtgccttaagcttttttgttattcaccctgcagtttcttttctgattctgagatgcttgtgagagcttcagccatctaggaacgcatacgctgctgcttgaccacgctgtagcagtatggtttgaagtggtgaacatggatttttctcggcttcacatgtacagtcctccccagtgtgtgccggagaacacgggctacacgtatgcgctcagttccagctattcttcagatgctctggattttgagacggagcacaaattggaccctgtatttgattctccacggatgtcccgccgtagtttgcgcctggccacgacagcatgcaccctgggggatggtgaggctgtgggtgccgacagcggcaccagcagcgctgtctccctgaagaaccgagcggccagaacaacaaaacagcgcagaagcacaaacaaatcagcttttagtatcaaccacgtgtcaaggcaggtcacgtcct

SEQ ID NO: 3755 - DNA, 633 bp, Homo sapiens
  source 1..633: mol_type = genomic DNA
gcgcaggtgaagacgcccggagaccctggcggtcgtggcgcagggggttgtggtctctccatgctgcccaggtcggactcctaggctcaagcgatcccctcgccccagcctgcctggaggcgcgcgcgtggtctccgcgccctgttgcgccttcaaagtgcccagaatggtgtctggtgcaaaataagcagcggcggggaacaccttgccactgtcaccgtcatggggaggatttctcccggctccccagggctccccaggacagtttcttttctgattctgagatgcttgtgagagcttcagccatctaggaacgcatacgctgctgcttgaccacgctgtagcagtatggtttgaagtggtgaacatggatttttctcggcttcacatgtacagtcctccccagtgtgtgccggagaacacgggctacacgtatgcgctcagttccagctattcttcagatgctctggattttgagacggagcacaaattggaccctgtatttgattctccacggatgtcccgccgtagtttgcgcctggccacgacagcatgcaccctgggggatggtgaggctgtgggtgccgacagcggcaccagcagcgctgtctccctgaagaaccgagcggccag

SEQ ID NO: 3756 - DNA, 3868 bp, Homo sapiens
  source 1..3868: mol_type = genomic DNA
tatggtttgaagtggtgaacatggatttttctcggcttcacatgtacagtcctccccagtgtgtgccggagaacacgggctacacgtatgcgctcagttccagctattcttcagatgctctggattttgagacggagcacaaattggaccctgtatttgattctccacggatgtcccgccgtagtttgcgcctggccacgacagcatgcaccctgggggatggtgaggctgtgggtgccgacagcggcaccagcagcgctgtctccctgaagaaccgagcggccagaacaacaaaacagcgcagaagcacaaacaaatcagcttttagtatcaaccacgtgtcaaggcaggtcacgtcctctggcgtcagccacggcggcactgtcagcctgcaggatgctgtgactcgacggcctcctgtattggacgagtcttggattcgtgaacagaccacagtggaccacttctggggtcttgatgatgatggtgatcttaaaggtggaaataaagctgccattcagggaaacggggatgtgggagccgccgccgccaccgcgcacaacggcttctcctgcagcaactgcagcatgctgtccgagcgcaaggacgtgctcacggcgcaccccgcggcccccgggcccgtgtcgagagtttattctagggacaggaatcaaaaatggaaggcagcctctggagtgttctggtggctggggattggatggtaccagtttgttactttgatttcttggctgaatgtgtttcttcttaccaggtgccttcgaaacatctgcaagtttttagtcttgctcatcccactcttccttttactagcaggtctctccttacggggccagggcaatttcttttcgttcttgcccgtgttgaactgggcaagcatgcatagaacacagcgggtggatgacccccaggacgtgtttaaacccacgacttctcgcctgaagcagcctctgcagggtgacagtgaggcttttccgtggcattggatgagtggcgtggagcagcaggtggcctctctgtctggacagtgccaccaccatggtgagaatctccgagagctgaccactttgctacagaagctgcaggctcgggtggaccagatggaaggcggcgctgccgggccgtcagcttcggtcagagacgctgtgggacagcccccgagggagactgactttatggcctttcaccaagaacatgaagtgcgtatgtcacacttggaagatattctgggaaaactgagagaaaaatctgaggccatccagaaggaactagaacagaccaagcaaaaaacaatcagtgcggttggtgagcagctcctgcccacagtcgagcacctccagctggagctggatcagctaaagtcagagctgtccagctggcgacacgtgaagaccggctgtgagacagtggatgccgtacaagaaagagtggacgtgcaagtcagagaaatggtgaaactcctgttttccgaagatcagcaaggcggttctctggaacagctgctgcagaggttctcatcacagtttgtgagcaaaggcgacttgcagacgatgctgcgagacctgcagctgcagatcctgcggaacgtcacccaccacgtttccgtgaccaagcagctcccaacctcagaagccgtggtgtctgctgtgagcgaggcgggggcgtctggaataacagaggcgcaagcacgtgccatcgtgaacagcgccttgaagctgtattcccaagataagaccgggatggtggactttgctctggaatctggtggtggcagcatcttgagtactcgctgttctgaaacttacgaaaccaaaacggcgctgatgagtctgtttgggatcccgctgtggtacttctcgcagtccccgcgcgtggtcatccagcctgacatttaccccggtaactgctgggcatttaaaggctcccaggggtacctggtggtgaggctctccatgatgatccacccagccgccttcactctggagcacatccctaagacgctgtcgccaacaggcaacatcagcagcgcccccaaggacttcgccgtctatggattagaaaatgagtatcaggaagaagggcagcttctgggacagttcacgtatgatcaggatggggagtcgctccagatgttccaggccctgaaaagacccgacgacacagctttccaaatagtggaacttcggattttttctaactggggccatcctgagtatacctgtctgtatcggttcagagttcatggcgaacctgtcaagtgaagacactactcattatttttgtacatttttgtatatactgggacagcgtgaaacactggaatccttcatggacgagggcatatacaatgatgggacagtgccacactccttcaataaacgtggctgctggccagaggacgtgagcgtgtgacgggcgccttggcgccacctgttgggtgctcactgcctctgcaggtgcagaggggtcagcagcaggagaagcgtgttgaacacgtggctctcagacactccttgtttttaacgggaagctctttgcatttgcatttcctcaacaaaggagcaaagcagaggaagctgagagtctggcgtgttcttgacgctttggtcttcagccttgcactggctcttctaaaggacttttggagggcagataatttcatctgttaaatccaacacacatttctttcagggaaaaacaatgtcaccaaattttcagagttctaaactcctttccttcaagccggaattttccttttttcagcaccagtaggtactaagtctccagatggggaaataactaaaatgtgtttttctgctttgttcgctcttacttctgaggaaggtttccagtcaggactcgctgtaccaatatccatggaggaatatgggagcgtttcgctctccttgtaggctgaagtcagtctgacttgaaggggcctggtttggatctaagcaaacacccagatggggttctctggtctcagcaaggcttttcctgttgggagtcacagtaaacagaaacccaaaaatctcatcttgggtgttttcagggcttgttttgagttttgctgaatagggagcgcaagacgccctgagcctccctctcactggtggtgataagaggagccgtctggtgtgtcagggtcacgaacccgttacatttcaggacgatcctttttccttcagcagcatttcttactggctgtggctggaatctgccttttatcacagctgtcaccattctcacgtgattcttgtgagactctttttggttataattactatttaatatttagactattttactgagcagactttataaatgagatatctacaaggcacttaaagtgttacagatgttttaccttaagaattatttaagttgtgttgggttaagacagttttcagtgtaccgtaaatgttgtgttttcagaaaaagacaaaacgatggtgctgactggttttctgtatattgcacaacagtcctcaaatacactgatgtatgaaactattcatacatcaagcagcatttttttcactctccttagaattggaactatgcagttaaggcagataaaatgtacagatgtttcatatattacaggttacatatataaatcaaaatttcctatataaaactgatttgggatttggggtggaaatattttgaatattaatttatttttaaagatgcaagataggactttgtgcaatgtatttttgtaaatgcttttcaaaatatctgtctttggtagtgcttctgctgctgccaccaaattgataagatgctattaagaggtttaaataaagagttttaatttttaaaagggcatgggatataaacagtc

SEQ ID NO: 3757 - DNA, 676 bp, Homo sapiens
  source 1..676: mol_type = genomic DNA
ttctcgggcctgggcggcgcagacgaggcctgaggcggcggcgcgaggcagtttcttttctgattctgagatgcttgtgagagcttcagccatctaggaacgcatacgctgctgcttgaccacgctgtagcagtatggtttgaagtggtgaacatggatttttctcggcttcacatgtacagtcctccccagtgtgtgccggagaacacgggctacacgtatgcgctcagttccagctattcttcagatgctctggattttgagacggagcacaaattggaccctgtatttgattctccacggatgtcccgccgtagtttgcgcctggccacgacagcatgcaccctgggggatggtgaggctgtgggtgccgacagcggcaccagcagcgctgtctccctgaagaaccgagcggccagaacaacaaaacagcgcagaagcacaaacaaatcagcttttagtatcaaccacgtgtcaaggcaggtcacgtcctctggcgtcagccacggcggcactgtcagcctgcaggatgctgtgactcgacggcctcctgtattggacgagtcttggattcgtgaacagaccacagtggaccacttctggggtcttgatgatgatggtgatcttaaaggtggaaataaagctgccattcagggaaacggggatgtgggagccg

SEQ ID NO: 3758 - DNA, 626 bp, Homo sapiens
  source 1..626: mol_type = genomic DNA
ggggggacgcggggtcgcggcctgggcgccctcagcgcgggctgcgccagggcctcctgggccaacggctgccgcccccgcccgtcccgcgccccgcagctaccccggcccgcgcagtttcttttctgattctgagatgcttgtgagagcttcagccatctaggaacgcatacgctgctgcttgaccacgctgtagcagtatggtttgaagtggtgaacatggatttttctcggcttcacatgtacagtcctccccagtgtgtgccggagaacacgggctacacgtatgcgctcagttccagctattcttcagatgctctggattttgagacggagcacaaattggaccctgtatttgattctccacggatgtcccgccgtagtttgcgcctggccacgacagcatgcaccctgggggatggtgaggctgtgggtgccgacagcggcaccagcagcgctgtctccctgaagaaccgagcggccagaacaacaaaacagcgcagaagcacaaacaaatcagcttttagtatcaaccacgtgtcaaggcaggtcacgtcctctggcgtcagccacggcggcactgtcagcctgcaggatgctgtgactcgacggcctcctgtattgga

SEQ ID NO: 3759 - DNA, 537 bp, Homo sapiens
  source 1..537: mol_type = genomic DNA
agacgaggcctgaggcggcggcgcgaggcagggttgtggtctctccatgctgcccaggtcggactcctaggctcaagcgatcccctcgccccagcctgcctggaggcgcgcgcgtggtctccgcgccctgttgcgccttcaaagtgcccagaatggtgtctggtgcaaaataagcagcggcggggaacaccttgccactgtcaccgtcatggggaggatttctcccggctccccagggctccccaggacagtatggtttgaagtggtgaacatggatttttctcggcttcacatgtacagtcctccccagtgtgtgccggagaacacgggctacacgtatgcgctcagttccagctattcttcagatgctctggattttgagacggagcacaaattggaccctgtatttgattctccacggatgtcccgccgtagtttgcgcctggccacgacagcatgcaccctgggggatggtgaggctgtgggtgccgacagcggcaccagcagcgctgtctccctgaagaaccgagcggccag

SEQ ID NO: 3760 - DNA, 3717 bp, Homo sapiens
  source 1..3717: mol_type = genomic DNA
agagcgtcttctcgggcctgggcggcgcagacgaggcctgaggcggcggcgcgaggcagtatggtttgaagtggtgaacatggatttttctcggcttcacatgtacagtcctccccagtgtgtgccggagaacacgggctacacgtatgcgctcagttccagctattcttcagatgctctggattttgagacggagcacaaattggaccctgtatttgattctccacggatgtcccgccgtagtttgcgcctggccacgacagcatgcaccctgggggatggtgaggctgtgggtgccgacagcggcaccagcagcgctgtctccctgaagaaccgagcggccagaacaacaaaacagcgcagaagcacaaacaaatcagcttttagtatcaaccacgtgtcaaggcaggtcacgtcctctggcgtcagccacggcggcactgtcagcctgcaggatgctgtgactcgacggcctcctgtattggacgagtcttggattcgtgaacagaccacagtggaccacttctgggggaaggcagcctctggagtgttctggtggctggggattggatggtaccagtttgttactttgatttcttggctgaatgtgtttcttcttaccaggtgccttcgaaacatctgcaagtttttagtcttgctcatcccactcttccttttactaggtctctccttacggggccagggcaatttcttttcgttcttgcccgtgttgaactgggcaagcatgcatagaacacagcgggtggatgacccccaggacgtgtttaaacccacgacttctcgcctgaagcagcctctgcagggtgacagtgaggcttttccgtggcattggatgagtggcgtggagcagcaggtggcctctctgtctggacagtgccaccaccatggtgagaatctccgagagctgaccactttgctacagaagctgcaggctcgggtggaccagatggaaggcggcgctgccgggccgtcagcttcggtcagagacgctgtgggacagcccccgagggagactgactttatggcctttcaccaagaacatgaagtgcgtatgtcacacttggaagatattctgggaaaactgagagaaaaatctgaggccatccagaaggaactagaacagaccaagcaaaaaacaatcagtgcggttggtgagcagctcctgcccacagtcgagcacctccagctggagctggatcagctaaagtcagagctgtccagctggcgacacgtgaagaccggctgtgagacagtggatgccgtacaagaaagagtggacgtgcaagtcagagaaatggtgaaactcctgttttccgaagatcagcaaggcggttctctggaacagctgctgcagaggttctcatcacagtttgtgagcaaaggcgacttgcagacgatgctgcgagacctgcagctgcagatcctgcggaacgtcacccaccacgtttccgtgaccaagcagctcccaacctcagaagccgtggtgtctgctgtgagcgaggcgggggcgtctggaataacagaggcgcaagcacgtgccatcgtgaacagcgccttgaagctgtattcccaagataagaccgggatggtggactttgctctggaatctggtggtggcagcatcttgagtactcgctgttctgaaacttacgaaaccaaaacggcgctgatgagtctgtttgggatcccgctgtggtacttctcgcagtccccgcgcgtggtcatccagcctgacatttaccccggtaactgctgggcatttaaaggctcccaggggtacctggtggtgaggctctccatgatgatccacccagccgccttcactctggagcacatccctaagacgctgtcgccaacaggcaacatcagcagcgcccccaaggacttcgccgtctatggattagaaaatgagtatcaggaagaagggcagcttctgggacagttcacgtatgatcaggatggggagtcgctccagatgttccaggccctgaaaagacccgacgacacagctttccaaatagtggaacttcggattttttctaactggggccatcctgagtatacctgtctgtatcggttcagagttcatggcgaacctgtcaagtgaagacactactcattatttttgtacatttttgtatatactgggacagcgtgaaacactggaatccttcatggacgagggcatatacaatgatgggacagtgccacactccttcaataaacgtggctgctggccagaggacgtgagcgtgtgacgggcgccttggcgccacctgttgggtgctcactgcctctgcaggtgcagaggggtcagcagcaggagaagcgtgttgaacacgtggctctcagacactccttgtttttaacgggaagctctttgcatttgcatttcctcaacaaaggagcaaagcagaggaagctgagagtctggcgtgttcttgacgctttggtcttcagccttgcactggctcttctaaaggacttttggagggcagataatttcatctgttaaatccaacacacatttctttcagggaaaaacaatgtcaccaaattttcagagttctaaactcctttccttcaagccggaattttccttttttcagcaccagtaggtactaagtctccagatggggaaataactaaaatgtgtttttctgctttgttcgctcttacttctgaggaaggtttccagtcaggactcgctgtaccaatatccatggaggaatatgggagcgtttcgctctccttgtaggctgaagtcagtctgacttgaaggggcctggtttggatctaagcaaacacccagatggggttctctggtctcagcaaggcttttcctgttgggagtcacagtaaacagaaacccaaaaatctcatcttgggtgttttcagggcttgttttgagttttgctgaatagggagcgcaagacgccctgagcctccctctcactggtggtgataagaggagccgtctggtgtgtcagggtcacgaacccgttacatttcaggacgatcctttttccttcagcagcatttcttactggctgtggctggaatctgccttttatcacagctgtcaccattctcacgtgattcttgtgagactctttttggttataattactatttaatatttagactattttactgagcagactttataaatgagatatctacaaggcacttaaagtgttacagatgttttaccttaagaattatttaagttgtgttgggttaagacagttttcagtgtaccgtaaatgttgtgttttcagaaaaagacaaaacgatggtgctgactggttttctgtatattgcacaacagtcctcaaatacactgatgtatgaaactattcatacatcaagcagcatttttttcactctccttagaattggaactatgcagttaaggcagataaaatgtacagatgtttcatatattacaggttacatatataaatcaaaatttcctatataaaactgatttgggatttggggtggaaatattttgaatattaatttatttttaaagatgcaagataggactttgtgcaatgtatttttgtaaatgcttttcaaaatatctgtctttggtagtgcttctgctgctgccaccaaattgataagatgctattaagaggtttaaataaagagttttaatttttaaaagggcatgggatataaacagtc

SEQ ID NO: 3761 - DNA, 4514 bp, Homo sapiens
  source 1..4514: mol_type = genomic DNA
atgggagacgtgcggaaggccaaggaggcactggccgaggtgcagatccctcccccagatgcgggcccctcccccagatgcaaaccccccccagcagagcgtcttctcgggcctgggcggcgcagacgaggcctgaggcggcggcgcgaggcagtatggtttgaagtggtgaacatggatttttctcggcttcacatgtacagtcctccccagtgtgtgccggagaacacgggctacacgtatgcgctcagttccagctattcttcagatgctctggattttgagacggagcacaaattggaccctgtatttgattctccacggatgtcccgccgtagtttgcgcctggccacgacagcatgcaccctgggggatggtgaggctgtgggtgccgacagcggcaccagcagcgctgtctccctgaagaaccgagcggccagaacaacaaaacagcgcagaagcacaaacaaatcagcttttagtatcaaccacgtgtcaaggcaggtcacgtcctctggcgtcagccacggcggcactgtcagcctgcaggatgctgtgactcgacggcctcctgtattggacgagtcttggattcgtgaacagaccacagtggaccacttctggggtcttgatgatgatggtgatcttaaaggtggaaataaagctgccattcagggaaacggggatgtgggagccgccgccgccaccgcgcacaacggcttctcctgcagcaactgcagcatgctgtccgagcgcaaggacgtgctcacggcgcaccccgcggcccccgggcccgtgtcgagagtttattctagggacaggaatcaaaaatgcggtgcgtctttctacgtgaataggattttgtggctggccagatacactgcatcatctttttcatcatttttagttcaactttttcaagtggttttaatgaagctcagttatgaatcagaaaattacaaattgaaaactcatgaatcaaaagattgtgaatccgaaagctataagtcaaaaagccatgaatcaaaagctcatgccagttactatgggagaatgaatgtgagagaggttctcagagaggatggccacctcagtgtaaatggggaagcgctgtgcgacgactgtaagggcaagaggcacctcgacgcgcacacagccgcccactcgcagtcgccacggctgcccggtcgggcagggaccctctggcacatctgggcatgtgcaggttacttcttgctgcagattctgcgcaggatcggagctgtgggccaggctgtgtccaggacggcgtggtcggccctttggctggccgtggttgctccagggaaggcagcctctggagtgttctggtggctggggattggatggtaccagtttgttactttgatttcttggctgaatgtgtttcttcttaccaggtgccttcgaaacatctgcaagtttttagtcttgctcatcccactcttccttttactagcaggtctctccttacggggccagggcaatttcttttcgttcttgcccgtgttgaactgggcaagcatgcatagaacacagcgggtggatgacccccaggacgtgtttaaacccacgacttctcgcctgaagcagcctctgcagggtgacagtgaggcttttccgtggcattggatgagtggcgtggagcagcaggtggcctctctgtctggacagtgccaccaccatggtgagaatctccgagagctgaccactttgctacagaagctgcaggctcgggtggaccagatggaaggcggcgctgccgggccgtcagcttcggtcagagacgctgtgggacagcccccgagggagactgactttatggcctttcaccaagaacatgaagtgcgtatgtcacacttggaagatattctgggaaaactgagagaaaaatctgaggccatccagaaggaactagaacagaccaagcaaaaaacaatcagtgcggttggtgagcagctcctgcccacagtcgagcacctccagctggagctggatcagctaaagtcagagctgtccagctggcgacacgtgaagaccggctgtgagacagtggatgccgtacaagaaagagtggacgtgcaagtcagagaaatggtgaaactcctgttttccgaagatcagcaaggcggttctctggaacagctgctgcagaggttctcatcacagtttgtgagcaaaggcgacttgcagacgatgctgcgagacctgcagctgcagatcctgcggaacgtcacccaccacgtttccgtgaccaagcagctcccaacctcagaagccgtggtgtctgctgtgagcgaggcgggggcgtctggaataacagaggcgcaagcacgtgccatcgtgaacagcgccttgaagctgtattcccaagataagaccgggatggtggactttgctctggaatctggtggtggcagcatcttgagtactcgctgttctgaaacttacgaaaccaaaacggcgctgatgagtctgtttgggatcccgctgtggtacttctcgcagtccccgcgcgtggtcatccagcctgacatttaccccggtaactgctgggcatttaaaggctcccaggggtacctggtggtgaggctctccatgatgatccacccagccgccttcactctggagcacatccctaagacgctgtcgccaacaggcaacatcagcagcgcccccaaggacttcgccgtctatggattagaaaatgagtatcaggaagaagggcagcttctgggacagttcacgtatgatcaggatggggagtcgctccagatgttccaggccctgaaaagacccgacgacacagctttccaaatagtggaacttcggattttttctaactggggccatcctgagtatacctgtctgtatcggttcagagttcatggcgaacctgtcaagtgaagacactactcattatttttgtacatttttgtatatactgggacagcgtgaaacactggaatccttcatggacgagggcatatacaatgatgggacagtgccacactccttcaataaacgtggctgctggccagaggacgtgagcgtgtgacgggcgccttggcgccacctgttgggtgctcactgcctctgcaggtgcagaggggtcagcagcaggagaagcgtgttgaacacgtggctctcagacactccttgtttttaacgggaagctctttgcatttgcatttcctcaacaaaggagcaaagcagaggaagctgagagtctggcgtgttcttgacgctttggtcttcagccttgcactggctcttctaaaggacttttggagggcagataatttcatctgttaaatccaacacacatttctttcagggaaaaacaatgtcaccaaattttcagagttctaaactcctttccttcaagccggaattttccttttttcagcaccagtaggtactaagtctccagatggggaaataactaaaatgtgtttttctgctttgttcgctcttacttctgaggaaggtttccagtcaggactcgctgtaccaatatccatggaggaatatgggagcgtttcgctctccttgtaggctgaagtcagtctgacttgaaggggcctggtttggatctaagcaaacacccagatggggttctctggtctcagcaaggcttttcctgttgggagtcacagtaaacagaaacccaaaaatctcatcttgggtgttttcagggcttgttttgagttttgctgaatagggagcgcaagacgccctgagcctccctctcactggtggtgataagaggagccgtctggtgtgtcagggtcacgaacccgttacatttcaggacgatcctttttccttcagcagcatttcttactggctgtggctggaatctgccttttatcacagctgtcaccattctcacgtgattcttgtgagactctttttggttataattactatttaatatttagactattttactgagcagactttataaatgagatatctacaaggcacttaaagtgttacagatgttttaccttaagaattatttaagttgtgttgggttaagacagttttcagtgtaccgtaaatgttgtgttttcagaaaaagacaaaacgatggtgctgactggttttctgtatattgcacaacagtcctcaaatacactgatgtatgaaactattcatacatcaagcagcatttttttcactctccttagaattggaactatgcagttaaggcagataaaatgtacagatgtttcatatattacaggttacatatataaatcaaaatttcctatataaaactgatttgggatttggggtggaaatattttgaatattaatttatttttaaagatgcaagataggactttgtgcaatgtatttttgtaaatgcttttcaaaatatctgtctttggtagtgcttctgctgctgccaccaaattgataagatgctattaagaggtttaaataaagagttttaatttttaaaagggcatgggatataaacagtc

SEQ ID NO: 3762 - DNA, 1309 bp, Homo sapiens
  source 1..1309: mol_type = genomic DNA
agagcgtcttctcgggcctgggcggcgcagacgaggcctgaggcggcggcgcgaggcagggttgtggtctctccatgctgcccaggtcggactcctaggctcaagcgatcccctcgccccagcctgcctggaggcgcgcgcgtggtctccgcgccctgttgcgccttcaaagtgcccagaatggtgtctggtgcaaaataagcagcggcggggaacaccttgccactgtcaccgtcatggggaggatttctcccggctccccagggctccccaggacagtatggtttgaagtggtgaacatggatttttctcggcttcacatgtacagtcctccccagtgtgtgccggagaacacgggctacacgtatgcgctcagttccagctattcttcagatgctctggattttgagacggagcacaaattggaccctgtatttgattctccacggatgtcccgccgtagtttgcgcctggccacgacagcatgcaccctgggggatggtgaggctgtgggtgccgacagcggcaccagcagcgctgtctccctgaagaaccgagcggccagaacaacaaaacagcgcagaagcacaaacaaatcagcttttagtatcaaccacgtgtcaaggcaggtcacgtcctctggcgtcagccacggcggcactgtcagcctgcaggatgctgtgactcgacggcctcctgtattggacgagtcttggattcgtgaacagaccacagtggaccacttctggggtcttgatgatgatggtgatcttaaaggtggaaataaagctgccattcagggaaacggggatgtgggagccgccgccgccaccgcgcacaacggcttctcctgcagcaactgcagcatgctgtccgagcgcaaggacgtgctcacggcgcaccccgcggcccccgggcccgtgtcgagagtttattctagggacaggaatcaaaaatgtaagtctcagtcctttaaaactcagaaaaaggtgtgttttccaaatttaatatttcctttctgtaagtctcagtgtctgcactatttgtcttggagacttaaaattatcccttgaaagcataagaagtacaccccaaaccagctttgtccttcctgtcctcttctagtttacattttatgtggttagtaattttgtacctaaaagtatttgaaattctataaatttggacttgacgtgagcaaaagaaaatttctacgtaagcgaaactaataaaactacagtcactttcagatgcacacctttatttttataaaacggcacagatgttcacacatactgaaggagtggct

SEQ ID NO: 3763 - DNA, 563 bp, Homo sapiens
  source 1..563: mol_type = genomic DNA
agagcaggcctgcgcacctcaggagcccaggcatggtgtataggtggagggtagcctacattggatccaggccaaggccctgtcctgtgccgggctcctctgcgttttcttttctgattctgagatgcttgtgagagcttcagccatctaggaacgcatacgctgctgcttgaccacgctgtagcagtatggtttgaagtggtgaacatggatttttctcggcttcacatgtacagtcctccccagtgtgtgccggagaacacgggctacacgtatgcgctcagttccagctattcttcagatgctctggattttgagacggagcacaaattggaccctgtatttgattctccacggatgtcccgccgtagtttgcgcctggccacgacagcatgcaccctgggggatggtgaggctgtgggtgccgacagcggcaccagcagcgctgtctccctgaagaaccgagcggccagaacaacaaaacagcgcagaagcacaaacaaatcagcttttagtatcaaccacgtgtcaaggcaggtcacgtcctctggcgtcagccacgg

SEQ ID NO: 3764 - DNA, 4712 bp, Homo sapiens
  source 1..4712: mol_type = genomic DNA
atgcggcgcggccccggaggcagcagcagcggcggcggcagccggagcagtaggcacccgagcagcgccagcggccgagcgggcggcttcctggcctgggcgctccggtggcggcggaggtgcgcgcggagccatggttatcatgtcggagttcagcgcggaccccgcgggccagggtcagggccagcagaagcccctccgggtgggtttttacgacatcgagcggaccctgggcaaaggcaacttcgcggtggtgaagctggcgcggcatcgagtcaccaaaacgcaggttgcaataaaaataattgataaaacacgattagattcaagcaatttggagaaaatctatcgtgaggttcagctgatgaagcttctgaaccatccacacatcataaagctttaccaggttatggaaacaaaggacatgctttacatcgtcactgaatttgctaaaaatggagaaatgtttgattatttgacttccaacgggcacctgagtgagaacgaggcgcggaagaagttctggcaaatcctgtcggccgtggagtactgtcacgaccatcacatcgtccaccgggacctcaagaccgagaacctcctgctggatggcaacatggacatcaagctggcagattttggatttgggaatttctacaagtcaggagagcctctgtccacgtggtgtgggagccccccgtatgccgccccggaagtctttgaggggaaggagtatgaaggcccccagctggacatctggagcctgggcgtggtgctgtacgtcctggtctgcggttctctccccttcgatgggcctaacctgccgacgctgagacagcgggtgctggagggccgcttccgcatccccttcttcatgtctcaagactgtgagagcctgatccgccgcatgctggtggtggaccccgccaggcgcatcaccatcgcccagatccggcagcaccggtggatgcgggctgagccctgcttgccgggacccgcctgccccgccttctccgcacacagctacacctccaacctgggcgactacgatgagcaggcgctgggtatcatgcagaccctgggcgtggaccggcagaggacggtggagtcactgcaaaacagcagctataaccactttgctgccatttattacctcctccttgagcggctcaaggagtatcggaatgcccagtgcgcccgccccgggcctgccaggcagccgcggcctcggagctcggacctcagtggtttggaggtgcctcaggaaggtctttccaccgaccctttccgacctgccttgctgtgcccgcagccgcagaccttggtgcagtccgtcctccaggccgagatggactgtgagctccagagctcgctgcagtggcccttgttcttcccggtggatgccagctgcagcggagtgttccggccccggcccgtgtccccaagcagcctgctggacacagccatcagtgaggaggccaggcaggggccgggcctagaggaggagcaggacacgcaggagtccctgcccagcagcacgggccggaggcacaccctggccgaggtctccacccgcctctccccactcaccgcgccatgtatagtcgtctccccctccaccacggcaagtcctgcagagggaaccagctctgacagttgtctgaccttctctgcgagcaaaagccccgcggggctcagtggcaccccggccactcaggggctgctgggcgcctgctccccggtcaggctggcctcgcccttcctggggtcgcagtccgccaccccagtgctgcaggctcaggggggcttgggaggagctgttctgctccctgtcagcttccaggagggacggcgggcgtcggacacctcactgactcaagggctgaaggcctttcggcagcagctgaggaagaccacgcggaccaaagggtttctgggactgaacaaaatcaaggggctggctcgccaggtgtgccaggcccccgccagccgggccagcaggggcggcctgagccccttccacgcccctgcacagagcccaggcctgcacggcggcgcagccggcagccgggagggctggagcctgctggaggaggtgctagagcagcagaggctgctccagttacagcaccacccggccgctgcacccggctgctcccaggccccccagccggcccctgccccgtttgtgatcgccccctgtgatggccctggggctgccccgctccccagcaccctcctcacgtcggggctcccgctgctgccgcccccactcctgcagaccggcgcgtccccggtggcctcagcggcgcagctcctggacacacacctgcacattggcaccggccccaccgccctccccgctgtgcccccaccacgcctggccaggctggccccaggttgtgagcccctggggctgctgcagggggactgtgagatggaggacctgatgccctgctccctaggcacgtttgtcctggtgcagtgagggcagccctgcatcctggcacggacactgactcttacagcaataacttcagaggaggtgaagacatctggcctcaaagccaagaactttctagaagcgaaataagcaatacgttaggtgttttggctttttagtttatttttgttttatttttttcttgcactgagtgacctcaactttgagtagggactggaaactttaggaagaaagataattgaggggcgtgtctgggggcgggggcaggaggggagcggggtggagggaacacgtgcagtgccgtggtgtggggatctcggcccctctctctgggttcgtcgtggttgagatgattacctcggacgtctacggaaacgagcgggcgcattgttgtccgcttgtgtgtgtgtgtgtgtgtgtgtgtgtgcgcgtgcattgattactatccatttctttagtcaacgctctccacttcctgatttctgctttaaggaaaactgtgaactttctgcttcatgtatcagttttaaagcagcccaggcaaagatcatctacagattctaggaattctctcccctgaaatcaaaacctggaagacttttttttcttattttagttgagaagtttcataaactgctcaaggattagttttccaggactctgcggaggaacggcaggaagaacctcagagagggcagaggtgacttcaaagtgctggggactccgtcctgagggtcacttggccctgagcccctgcgtgcccttgcggaagcccagaagcttcttcctgctgcacctcccgtttccgctgctgctgacgtttatgcatttcatgatggggtccaacaagaacacctgacttgggtgaagttgtgcaatattggaggctgactgtagggctgggcagctgggagacaggctcatggctcatggctcatggctcagggcggtgcctgccctgggccgggacccccctccccaccccccacctaggctttttgggttttgttcaaggaaggtaaagtgagaggtttaggtcagtgtttttaagtttttgttttttttttaaagcaaatcctgtatatgtatctacatgggagacaggtagacactacttatttgttacattttgtactatacgtttgtgttccaggtttcagcttccctcgctcctgttgttaagaagcgtccctgtcagcacaggtgtgcattgaggaaggggccccagggccttcgctccctcagcactggggtggaggcggcaggaaggggcggcccttacctggcaggtctgggcgcacctttagcaggtggactccgtggggctccaccagccagaagcctctggaaggcaacgaaggcaatgctgctccctgagtccagtccccgcccccaaacccagcccaggtgccttcagctacttcggcttcttaaaccctgcagtgttaaacagaggcattgagaaaggggaaaggcgggtatttttaaaagccaaagattgacccagttacttgagggtagggaggcgggcccagtgcaggaggctgcatccctggcctgctggtgcccaccgggggctgtgcctgtgccgggccgcagggaagctggctgcccccattcctgctgctgctgctgctgctgctctgtggctgtttcaaagactgggcgaaaggctgtccggagggcagaccaggtgccttgccgcagagaaaacaccaaagtctcctgttcgctcataaagaagtttttgggatgggagagaatccagaccatcttggggcagccaggcccttgccttcatttttacagaggtagcacaactgattccaacacaaaaccccttcccctttttaaaatgatttctgttctaatgccatagatcaaaggcctcagaaaccattgtgtgtttcctctttgaagcaatgacaagcactttactttcacggtggtttttgttttttcttattgctgtggaacctcttttggaggacgttaaaggcgtgttttacttgtttttttaagagtgtgtgatgtgtgttttgtagatttcttgacagtgctgtaatacagacggcaatgcaatagcctatttaaagacactacgtgatctgattgagatgtacatagtttttttttttaccataactgaattattttatctcttatgttaacatgagaaatgtatgccaaatgattagttgatgtatgttttttaatttaatatttaaataaaatatttggaaggaaaaaa

SEQ ID NO: 3765 - DNA, 7711 bp, Homo sapiens
  source 1..7711: mol_type = genomic DNA
attttgaagagaggggtcccggggagctccctccaagatctagaggctccgcggccacccctgccgggtcctgccaagacttgctagaaggaacgagtcgcgtgccttagttagttggttcccgtcacaggaagaaacgcctttgcagtgggtttaattgcttctgggccgagcgaattccccgccgtacaactcagtggtgcggactttgcctcctgctaccctgttgctgcgccgagcggggtgggaaagtttctggagttgtcagtcgcgcagcccgtggccacctagacccgaggtgcgggcgcctgcgaagggcccccgcggggtggccggggccgccggggcatgcagcgcgggggcgcggctcggtgacgccgcgggcggggacccggcatccgggcaggctgcgcgcgggtgcggggcgagggcgccgcggggactgggacgcacggcccgcgcgcgggacacggccatggaggacgcgggagcagctggcccggggccggagcctgagcccgagcccgagccggagcccgagcccgcgccggagccggaaccggagcccaagccgggtgctggcacatccgaggcgttctcccgactctggaccgacgtgatgggtatcctggacggttcactgggaaacatcgatgacctggcgcagcagtatgcagattattacaacacctgtttctccgacgtgtgcgagaggatggaggagctgcggaaacggcgggtttcccaggacctggaagtggagaaacccgatgctagccccacgtcacttcagctgcggtcccagatcgaagagtcgcttggcttctgtagcgccgtgtcaaccccagaagtggaaagaaagaaccctcttcataaatcaaactcagaagacagctctgtaggaaaaggagactggaagaagaaaaataagtatttctggcagaacttccgaaagaaccagaaaggaataatgagacagacttcaaaaggagaagacgttggttatgttgccagtgaaataacgatgagcgatgaggagcggattcagctaatgatgatggtcaaagaaaagatgatcacaattgaggaagcacttgctaggctcaaggaatacgaggcccagcaccggcagtcggctgccctggaccctgctgactggccagatggttcttacccaacgtttgatggctcatcaaactgcaattcaagagaacaatcggatgatgagactgaggagtcggtgaagtttaagaggttacacaagctggtaaactccactcgcagagtcagaaagaaactaattagggtggaagaaatgaaaaaacccagcactgaaggtggggaggagcacgtgtttgagaattcgccggtcctggatgaacggtccgccctctactctggcgtgcacaagaagccccttttctttgatggctctcctgagaaacctcccgaagatgactcagactctctcaccacgtctccatcctccagcagcctggacacctggggggctggccggaagttggtcaaaaccttcagcaaaggagagagccggggcctgattaagccccccaagaagatggggacattcttctcctacccagaagaagaaaaggcccagaaagtgtcccgctccctcaccgagggggagatgaagaagggtctcgggtccctaagccacgggagaacctgcagttttggaggatttgacttgacgaatcgctctctgcacgttggcagtaataattctgacccaatgggtaaagaaggagactttgtgtacaaagaagtcatcaaatcacctactgcctctcgcatctctcttgggaaaaaggtgaaatcagtgaaagagacgatgagaaagagaatgtctaaaaaatacagcagctctgtctctgagcaggactcgggccttgatggaatgcctggctcccctccgccttcacagcccgaccccgaacacttggacaagcccaagctcaaggccgggggttctgtagaaagtcttcgcagttctctcagtgggcagagctccatgagcggtcaaacagtgagcaccactgattcctcaaccagcaaccgggaaagcgtcaagtcggaagatggggatgacgaagagccgccttaccgaggcccgttctgcgggcgtgccagggtgcacaccgacttcacccccagtccctatgacacagactcactcaagctcaagaaaggagatatcatcgatataatcagcaagccacccatggggacctggatgggcctgctgaacaacaaagtcggcacgttcaagttcatctacgtggacgtgctcagtgaagacgaggagaaacccaaacgccccaccaggaggcgtcggaaaggacgaccaccccagcccaagtctgtggaggatctcctggatcggattaacctaaaagagcacatgcccactttcctgttcaatggatatgaagatttggacacctttaagctgctggaggaggaagacttggatgagttaaatatcagggacccggaacacagagctgttctcttgacagcagtggagctgttacaagagtatgacagtaacagcgaccagtcaggatcccaggagaagctgctcgttgacagccagggcctgagtggatgctcaccccgagactcaggatgctacgaaagcagtgagaacctggaaaacggcaagactcggaaagctagcctcctatctgccaagtcatccaccgagcccagcttgaagtcttttagcagaaaccagttgggcaattacccaacattgcctttaatgaaatcaggggatgcactgaagcagggacaggaggagggcaggctgggtggtggccttgccccagacacgtccaagagctgtgacccacctggtgtgactggtttgaataaaaaccgaagaagcctcccagtttccatctgccggagctgtgagaccctggagggcccccagactgtggacacttggccccgatcccattccctggatgaccttcaagtggagcctggtgctgagcaagacgtgcctaccgaggtgacagaaccgccccctcagattgtacctgaagtgccacagaagacgaccgcctcttccacgaaggcccagcccctggagcaagactctgctgtcgacaatgcattgctactgacccaaagcaagagattttctgaacctcagaaattgacaactaagaaactggagggctcaatcgcagcctctggtcgcggcctgtcaccccctcagtgtttgcccagaaactatgatgctcagcctcctggagctaaacacggtttagcaaggacgcctctggagggccacagaaaaggacacgagtttgaaggaacacaccatcccctgggcaccaaagaaggggtagatgctgagcagagaatgcagcccaaaattccatcacagcctccacctgttcctgccaaaaagagcagagaacgccttgctaacggactccaccctgttcccatgggccccagtggggccctccccagtcccgatgcgccatgcctgccagtgaaaaggggcagccccgccagccccaccagccctagcgactgtcccccagcactggctcccaggcctctctcagggcaggcgcctggcagcccaccaagcacaaggccgcccccctggctctcagagctccccgagaacacaagcctccaggagcacggtgtgaagctgggcccggctttgaccaggaaggtctcctgtgcccggggagtggatctagaaacgctcactgaaaacaagctgcacgctgaaggcatcgatctcacggaggagccgtattctgataagcatggccgctgtgggattcctgaagccctggtgcagagatacgcagaggacttggatcagcccgagcgggacgtcgccgccaacatggaccagatccgggtgaagcagcttcggaagcagcaccgcatggcgattccaagtggtggactcacggaaatctgccgaaagcccgtctctcctgggtgcatttcgtctgtgtcagattggctcatttccatcggtctgcccatgtacgccggcaccctctccaccgcgggcttcagcacactgagccaagtgccttctctgtctcacacttgccttcaggaggccggcatcacagaggagagacacataagaaagctcctatctgcagccagactcttcaaactgccgccaggccctgaggccatgtagccaggcccggaatgggcctctctggacaagagccaccctttcactgtgcatatgatgctgatgcaattcctccatcatctctggacgtgcagaccagatccagaagaaaggcctggcgtgtggccaaacagcgtgaaaccttggcacaggactgaggatcctctcctccagaaaagccccctcgaggaaataaattagtgcggttctctttgacccccaaagacaagacaagcacttatttttattttcagaagacaaaagaaccaagatgccaactggctgcgaatgctctatctccagtctgtctctgtgtactggtagaggctgggaggagtagggggcagcctgttccatttctgatagtgcccttgctcttctgtctgtcatcttgcaggatgcccgagggccagatgggcttagctaggccaaagtaacagactcaagagttattgtacattactgaccacgctcatttgttcaaaagttagaacatctggctgcaccaggaaaaaaaaaaaaaaaaagtcctgttcttctttagataaacaagagacattttcataattgctttctagcaatcagcttttatttgccttaatataagcttttaagcagttatctaactagtgtccacaaccctgtaaccatacttccacatcttcagcttaggcagacatcgaacctctctgggatgtttccagcaaaagtgagcttttctaatcgtctcattgtaacatggcttattttgtagaggtattcatcagccacacacttcatgttggtttttggtttttaagctaactacaaatctagtaaaaagctatctgaaattcacaaatatcatgtgtgtgcgtgcgtgcgtgcgcgtgtgtgtctgtattcatagtgactgcttttggttttaaccagtttagtatcgttactgtgtggatcgtcgcgctgcagtattgacttggaatcctgaccatgtccatcccaaaattcagtcctcagttaacggatcatgtttgcaaaaggtcactgtgaggctgcatatttcagaaagatgtccttaataagggaagtcatgtataagatgttttctaaaagacttttcagtattacaactaatactattattatccttctttttttatttagataattcttttaatttaaacaaaggttcactatggaaccagacaaatctcattagccatgtgttaagtatttgctactttaaattgttttacaactgatttcagcacattctatccttttttttttttgaaatggagtttcgctcttgtcacccaggctggagtgcaatggcacgatcttggctcactgcaacctcagtctcccaggttcaagtgattctcctgccttagcctcccgagtagctgggattataggcacccaccaccacgcccagctaatttttgtattattagtagagacagggtttcaccatgttggccaggctggtctcaaactcaactcctgacctcaggtggtccacccgcctcagcctcccaaagtgctgggattacaggtgtgagccaccgcacctggcctctgtcctcttttagtctagtgtctggttttctagcaaacagtaaatttaaacaagtaaactattatggtttccattgcttacaaaatgattttcctttacattcttatcatgaacactattttaagcatcaaatgcaatcatctaaaatataaaggtcaatcatttataatagaaacaccttgaccacaagcccttgattgaacattttataatatttcatctacttattaaaacaaataatttcccttgggttggaggggaagtgatttcataaattaattagaaagccatctttagcatattgcttatgtctggatccatgtttctgaggaaaaagacattctcaggtgatgtatttttttcatgcattagtatgcatttttaaaaaataatgcatgtttctttaataattaattttcatcttctataagatgccatgtgaagaagttgtggaaatgtagaataaaaagctaaagctgccaaatttctgttgaactcttaaaaacagctcatgtttgtttgtcctctcgggttgtggcctagcctatttgcaatgtaatgaagctgcagggttcttgtatagctaaagcgttcaatgcatttcacgtgctgtggtggatgtgggtgctgtagacaggcttcttctcttcctgctctcaaaatacctcggcttgacatttggacagatcctgtcattgtttaagctgagcaaaaaaccacacaaaagttgtgtaagagatgagataacaaaggagcgagagaaatctcatgtgaatttccaagttttaattcgttctccatgaaggattttcatttcagtgaaagtcgcagcagaagagggaactttctggagtttttgagaatgccaaaccacatttttatcacacttctttggaaatcaatgcctttgcatagaaaatcaaattcagggaccacaaagaattttcagtgggaatgtctagtctgaggggtctgaggttgtttttactttattgtgttgtttaaatattttaaaaatatctttagcgtttggtcttttttttttctgtaaacatttaatttggtctgagaaaagctgaatgtttgggtgtgacgtttgactgaggtggattggggctgcctgtggacattagtgaacaggtggtaggcttcaggaatatccagttttaatcagttgcatttggtacagaattttgagtaatggtgaaaattgttgtctttggaaagcacaaaagaaacctggaaaggcagttcggctcaggtagctacacataacattgtgtatgattttcacttcaaagctgtctggaaggaaatgcagtcagctccagctagtactatttatgtacccagataactaagatattgtttcatggccttgccttagtcagaggcccttttctctgtcctgaacccccaggtatgggtgaaattggaaattactaatctattggaaatcagttcctgacatagtaaagtttgctttcataactgcagcaaaaaaggtcaacttgccaagtcactgctgccatgtgtgtactgtattattttcagaaaaaaatataatagtctgagtccaagttatcttgatttaaaattgatagagaaaagaaactgtcgagcaagttatataacaactaacaacattgcactttctgtatatgaaatcaatatttaaataacttatttttctccattgctgttcttaaaaacattgtaagtagctgtaatataccagtaccaatatgttcttgcaattgcttcagcccaagaaagctgtgtattgttttaaaaattgtaaaaattattgtgatgattcatttagcataaagagaggtggacggaagggttttcctatgtatcaaaacttgtctataattatgtcatctatgtacctagaaaaaagtaaataaatttcttcagttgaatatgcc

SEQ ID NO: 3766 - DNA, 591 bp, Homo sapiens
  source 1..591: mol_type = genomic DNA
gagtcagagaggaagtcagagaccatttgaacgtatggccagcagctcacttcatggaggaacaagattgcagggacggttcactgggaaacatcgatgacctggcgcagcagtatgcagattattacaacacctgtttctccgacgtgtgcgagaggatggaggagctgcggaaacggcgggtttcccaggacctggaagtggagaaacccgatgctagccccacgtcacttcagctgcggtcccagatcgaagagtcgcttggcttctgtagcgccgtgtcaaccccagaagtggaaagaaagtaagtctttctccctctgcccaggaccaccttccaagaaggtgtcttttaggtccatgctgacggaaatcaaacaggcgatcatgtgcgtatgtactatggagttatgcgatgtcattttccttaacatgttgcatgcatgtgtgtgtatctaggtggctaagagtgtgttttgtaatgcagttggtgatgtctgaggattttgtgaagagttactgattttacacttattgtgaataaaccctaaataaatctccggaaatagaaagggaaaggataggtgcatt

SEQ ID NO: 3767 - DNA, 537 bp, Homo sapiens
  source 1..537: mol_type = genomic DNA
caggcccaggattttaaagacggttcactgggaaacatcgatgacctggcgcagcagtatgcagattattacaacacctgtttctccgacgtgtgcgagaggatggaggagctgcggaaacggcgggtttcccaggacctggaagtggagaaacccgatgctagccccacgtcacttcagctgcggtcccagatcgaagagtcgcttggcttctgtagcgccgtgtcaaccccagaagtggaaagaaagaaccctcttcataaatcaaactcagaagacagctctgtaggaaaaggagactggaagaagaaaaataagtatttctggcagaacttccgaaagaaccagaaaggaataatgagacagacttcaaaaggagaagacgttggttatgttgccagtgaaataacgatgagcgatgaggagcggattcagctaatgatgatggtcaaagaaaagatgatcacaattgaggaagcacttgctaggctcaaggaatacgaggcccagcaccggcagtcggctgccctggaccct

SEQ ID NO: 3768 - DNA, 2520 bp, Homo sapiens
  source 1..2520: mol_type = genomic DNA
gagattgcggagtttgatgctacaagagtgaagacgctctccgagtggggaggggggtgggaggtacaggacgtcttcagaattaccccttaggcttgctaaatgccgaagccgtcaagagaacaatcggatgatgagactgaggagtcggtgaagtttaagaggttacacaagctggtaaactccactcgcagagtcagaaagaaactaattagggtggaagaaatgaaaaaacccagcactgaaggtggggaggagcacgtgtttgagaattcgccggtcctggatgaacggtccgccctctactctggcgtgcacaagaagccccttttctttgatggctctcctgagaaacctcccgaagatgactcagactctctcaccacgtctccatcctccagcagcctggacacctggggggctggccggaagttggtcaaaaccttcagcaaaggagagagccggggcctgattaagccccccaagaagatggggacattcttctcctacccagaagaagaaaaggcccagaaagtgtcccgctccctcaccgagggggagatgaagaagggtctcgggtccctaagccacgggagaacctgcagttttggaggatttgacttgacgaatcgctctctgcacgttggcagtaataattctgacccaatgggtaaagaaggagactttgtgtacaaagaagtcatcaaatcacctactgcctctcgcatctctcttgggaaaaaggtgaaatcagtgaaagagacgatgagaaagagaatgtctaaaaaatacagcagctctgtctctgagcaggactcgggccttgatggaatgcctggctcccctccgccttcacagcccgaccccgaacacttggacaagcccaagctcaaggccgggggttctgtagaaagtcttcgcagttctctcagtgggcagagctccatgagcggtcaaacagtgagcaccactgattcctcaaccagcaaccgggaaagcgtcaagtcggaagatggggatgacgaagagccgccttaccgaggcccgttctgcgggcgtgccagggtgcacaccgacttcacccccagtccctatgacacagactcactcaagctcaagaaaggagatatcatcgatataatcagcaagccacccatggggacctggatgggcctgctgaacaacaaagtcggcacgttcaagttcatctacgtggacgtgctcagtgaagacgaggagaaacccaaacgccccaccaggaggcgtcggaaaggacgaccaccccagcccaagtctgtggaggatctcctggatcggattaacctaaaagagcacatgcccactttcctgttcaatggatatgaagatttggacacctttaagctgctggaggaggaagacttggatgagttaaatatcagggacccggaacacagagctgttctcttgacagcagtggagctgttacaagagtatgacagtaacagcgaccagtcaggatcccaggagaagctgctcgttgacagccagggcctgagtggatgctcaccccgagactcaggatgctacgaaagcagtgagaacctggaaaacggcaagactcggaaagctagcctcctatctgccaagtcatccaccgagcccagcttgaagtcttttagcagaaaccagttgggcaattacccaacattgcctttaatgaaatcaggggatgcactgaagcagggacaggaggagggcaggctgggtggtggccttgccccagacacgtccaagagctgtgacccacctggtgtgactggtttgaataaaaaccgaagaagcctcccagtttccatctgccggagctgtgagaccctggagggcccccagactgtggacacttggccccgatcccattccctggatgaccttcaagtggagcctggtgctgagcaagacgtgcctaccgaggtgacagaaccgccccctcagattgtacctgaagtgccacagaagacgaccgcctcttccacgaaggcccagcccctggagcaagactctgctgtcgacaatgcattgctactgacccaaagcaagagattttctgaacctcagaaattgacaactaagaaactggagggctcaatcgcagcctctggtcgcggcctgtcaccccctcagtgtttgcccagaaactatgatgctcagcctcctggagctaaacacggtttagcaaggacgcctctggagggccacagaaaaggacacgagtttgaaggaacacaccatcccctgggcaccaaagaaggggtagatgctgagcagagaatgcagcccaaaattccatcacagcctccacctgttcctgccaaaaagagcagagaacgccttgctaacggactccaccctgttcccatgggccccagtggggccctccccagtcccgatgcgccatgcctgccagtgaaaaggggcagccccgccagccccaccagccctagcgactgtcccccagcactggctcccaggcctctctca

SEQ ID NO: 3769 - DNA, 5075 bp, Homo sapiens
  source 1..5075: mol_type = genomic DNA
agtggcttttactagaaaaacaacagtgaatttgaatcaagttctgcaaatacagaaatcactaagatataagcagttccgtgaagtttgcaaccacctaaaaggataataaagttttcattctttataacatcagcattgttcctactgaaattaaaaagtgtggtcaaacacagtcactgaatcaaccgttttctttctgggcaaatgtggcatcttcattcactgagagaaaagggtcaccatgaattaacttgggcagttcgatgggaaagttaccagcgtttttggctaggatggggaagcggtgagtgagtaattctcttggcctgattggacaactgtaaacataaccttctccccccctcttctcagcgatttaaagctaaacaaaatgaaagtctgtttgaaaagcttgctgttggtgtcagagccgtgggatttcaaacctgggttttcaggatgcctgagtacatggatcctctaacacatatcccttcattatctctactgaatgtagctgatgttaggggaagttctgtgctggagacagggaatctcacagcactggactcatggagggtttttcttttgttttttaggctttttaaaaaaaatggttggtttttgcatgttaaggggattctagacctctggggtaggcagagttccagtggcctgtgaaagggaaaaatgagtgaagtttccttacgacatgactcatgtgtttttttctcatcatttctcgttttctactttcatcctgtccacgtatttgtgattcagagatgtcctgcaaacggggactgctgggttggtgcactgccggctggcttaagcataactgaagtttttctgccctaccctcttttccacagagaacctgcagttttggaggatttgacttgacgaatcgctctctgcacgttggcagtaataattctgacccaatgggtaaagaaggagactttgtgtacaaagaagtcatcaaatcacctactgcctctcgcatctctcttgggaaaaaggtgaaatcagtgaaagagacgatgagaaagagaatgtctaaaaaatacagcagctctgtctctgagcaggcggtcaaacagtgagcaccactgattcctcaaccagcaaccgggaaagcgtcaagtcggaagatggggatgacgaagagccgccttaccgaggcccgttctgcgggcgtgccagggtgcacaccgacttcacccccagtccctatgacacagactcactcaagctcaagaaaggagatatcatcgatataatcagcaagccacccatggggacctggatgggcctgctgaacaacaaagtcggcacgttcaagttcatctacgtggacgtgctcagtgaagacgaggagaaacccaaacgccccaccaggaggcgtcggaaaggacgaccaccccagcccaagtctgtggaggatctcctggatcggattaacctaaaagagcacatgcccactttcctgttcaatggatatgaagatttggacacctttaagctgctggaggaggaagacttggatgagttaaatatcagggacccggaacacagagctgttctcttgacagcagtggagctgttacaagagtatgacagtaacagcgaccagtcaggatcccaggagaagctgctcgttgacagccagggcctgagtggatgctcaccccgagactcaggatgctacgaaagcagtgagaacctggaaaacggcaagactcggaaagctagcctcctatctgccaagtcatccaccgagcccagcttgaagtcttttagcagaaaccagttgggcaattacccaacattgcctttaatgaaatcaggggatgcactgaagcagggacaggaggagggcaggctgggtggtggccttgccccagacacgtccaagagctgtgacccacctggtgtgactggtttgaataaaaaccgaagaagcctcccagtttccatctgccggagctgtgagaccctggagggcccccagactgtggacacttggccccgatcccattccctggatgaccttcaagtggagcctggtgctgagcaagacgtgcctaccgaggtgacagaaccgccccctcagattgtacctgaagtgccacagaagacgaccgcctcttccacgaaggcccagcccctggagcaagactctgctgtcgacaatgcattgctactgacccaaagcaagagattttctgaacctcagaaattgacaactaagaaactggagggctcaatcgcagcctctggtcgcggcctgtcaccccctcagtgtttgcccagaaactatgatgctcagcctcctggagctaaacacggtttagcaaggacgcctctggagggccacagaaaaggacacgagtttgaaggaacacaccatcccctgggcaccaaagaaggggtagatgctgagcagagaatgcagcccaaaattccatcacagcctccacctgttcctgccaaaaagagcagagaacgccttgctaacggactccaccctgttcccatgggccccagtggggccctccccagtcccgatgcgccatgcctgccagtgaaaaggggcagccccgccagccccaccagccctagcgactgtcccccagcactggctcccaggcctctctcagggcaggcgcctggcagcccaccaagcacaaggccgcccccctggctctcagagctccccgagaacacaagcctccaggagcacggtgtgaagctgggcccggctttgaccaggaaggtctcctgtgcccggggagtggatctagaaacgctcactgaaaacaagctgcacgctgaaggcatcgatctcacggaggagccgtattctgataagcatggccgctgtgggattcctgaagccctggtgcagagatacgcagaggacttggatcagcccgagcgggacgtcgccgccaacatggaccagatccgggtgaagcagcttcggaagcagcaccgcatggcgattccaagtggtggactcacggaaatctgccgaaagcccgtctctcctgggtgcatttcgtctgtgtcagattggctcatttccatcggtctgcccatgtacgccggcaccctctccaccgcgggcttcagcacactgagccaagtgccttctctgtctcacacttgccttcaggaggccggcatcacagaggagagacacataagaaagctcctatctgcagccagactcttcaaactgccgccaggccctgaggccatgtagccaggcccggaatgggcctctctggacaagagccaccctttcactgtgcatatgatgctgatgcaattcctccatcatctctggacgtgcagaccagatccagaagaaaggcctggcgtgtggccaaacagcgtgaaaccttggcacaggactgaggatcctctcctccagaaaagccccctcgaggaaataaattagtgcggttctctttgacccccaaagacaagacaagcacttatttttattttcagaagacaaaagaaccaagatgccaactggctgcgaatgctctatctccagtctgtctctgtgtactggtagaggctgggaggagtagggggcagcctgttccatttctgatagtgcccttgctcttctgtctgtcatcttgcaggatgcccgagggccagatgggcttagctaggccaaagtaacagactcaagagttattgtacattactgaccacgctcatttgttcaaaagttagaacatctggctgcaccaggaaaaaaaaaaaaaaaaagtcctgttcttctttagataaacaagagacattttcataattgctttctagcaatcagcttttatttgccttaatataagcttttaagcagttatctaactagtgtccacaaccctgtaaccatacttccacatcttcagcttaggcagacatcgaacctctctgggatgtttccagcaaaagtgagcttttctaatcgtctcattgtaacatggcttattttgtagaggtattcatcagccacacacttcatgttggtttttggtttttaagctaactacaaatctagtaaaaagctatctgaaattcacaaatatcatgtgtgtgcgtgcgtgcgtgcgcgtgtgtgtctgtattcatagtgactgcttttggttttaaccagtttagtatcgttactgtgtggatcgtcgcgctgcagtattgacttggaatcctgaccatgtccatcccaaaattcagtcctcagttaacggatcatgtttgcaaaaggtcactgtgaggctgcatatttcagaaagatgtccttaataagggaagtcatgtataagatgttttctaaaagacttttcagtattacaactaatactattattatccttctttttttatttagataattcttttaatttaaacaaaggttcactatggaaggaaatgcagtcagctccagctagtactatttatgtacccagataactaagatattgtttcatggccttgccttagtcagaggcccttttctctgtcctgaacccccaggtatgggtgaaattggaaattactaatctattggaaatcagttcctgacatagtaaagtttgctttcataactgcagcaaaaaaggtcaacttgccaagtcactgctgccatgtgtgtactgtattattttcagaaaaaaatataatagtctgagtccaagttatcttgatttaaaattgatagagaaaagaaactgtcgagcaagttatataacaactaacaacattgcactttctgtatatgaaatcaatatttaaataacttatttttctccattgctgttcttaaaaacattgtaagtagctgtaatataccagtaccaatatgttcttgcaattgcttcagcccaagaaagctgtgtattgttttaaaaattgtaaaaattattgtgatgattcatttagcataaagagaggtggacggaagggttttcctatgtatcaaaacttgtctataattatgtcatctatgtacctagaaaaaagtaaataaatttcttcagttgaatatg

SEQ ID NO: 3770 - DNA, 1869 bp, Homo sapiens
  source 1..1869: mol_type = genomic DNA
agggatcccaccccttctctgtgttttcactctgaagctctacacaactttacacctgaatgaacgccaaacctctatggatatataaagggaagcttgaggaggaatttcacagttacagtgcagaagcagaagcaaaagaattaaccagctcttcagtcaagcaaatcctctactcaccatgcttcctcctgccattcatttctatctccttccccttgcatgcatcctaatgaaaagctgtttggcttttaaaaatgatgccacagaaatcctttattcacatgtggttaaacctgttccagcacaccccagcagcaacagcacgttgaatcaagccagaaatggaggcaggcatttcagtaacactggactggatcggaacactcgggttcaagtgggttgccgggaactgcgttccaccaaatacatctctgatggccagtgcaccagcatcagccctctgaaggagctggtgtgtgctggcgagtgcttgcccctgccagtgctccctaactggattggaggaggctatggaacaaagtactggagcaggaggagctcccaggagtggcggtgtgtcaatgacaaaacccgtacccagagaatccagctgcagtgccaagatggcagcacacgcacctacaaaatcacagtagtcactgcctgcaagtgcaagaggtacacccggcagcacaacgagtccagtcacaactttgagagcatgtcacctgccaagccagtccagcatcacagagagcggaaaagagccagcaaatccagcaagcacagcatgagttagaactcagactcccataactagacttactagtaaccatctgctttacagatttgattgcttggaagactcaagcctgccactgctgttttctcacttgaaagtatatgctttctgctttgatcaaacccagcaagctgtcttaagtatcaggaccttctttgggaatagtttttccttttcaagtttttcaagatgtaggtatatccatgaatgcaatttgcatttaaattccacgtatcctgtagttttaattcctcattgttcttaaaagactgttgatactataaacatcagtgaatcattatattttaaaacagaaaagggcttctcagataccctccatctactggcccatcccctctcctaaacaaaactccttcaaaacaggttaaaaaaaatatgttgtcatgaatcttcacagtaacatttcagaaaggtgcttttttggtactcttcatgggaacagtttagcagccatgagtgatcttcctttgaaagagaatgaaagaccctgtgacatttcacttcaaaaataagccctgtagctctttacggtcgcatagtatgaaattataccctgcatgctgaccctcgcttggaatggaatgccagaaatgcatggcagcagctaataagtaaagctgattaactatttatttgtcaatgttattatttaatgagctttcacatgtgatttgtttcaaaactttaattttttaatgttttgaaactttttcatggacctaaatattttcctatatgatttgtggttgattagaaatatgaaatacatgttgtagatatgtaaaatgaatattttagtctccttattacatatatgttcatggtgaactttatcaatagtatggatctttttaaatcaataagatgctttgtaaagttgaaataagtaatactttcttgtttaatctgtgcaatcagaaggtgtcttgaccttcaattcaattggtttcttttaacaaaaataaacactgctaaaagttattgttgttgcctctaacatgtataaagggtgcaaaaattgtagaataaatgtataagggtaa

SEQ ID NO: 3771 - DNA, 2411 bp, Homo sapiens
  source 1..2411: mol_type = genomic DNA
aaaatatagagaagtggtctgatggttaattttatatataaatttgactggactaggggatgcccagaagctggtaaaacattatttatgggtgtgtttctgaggatgtttttggaagagattagcattagtattagtggactgagtaaacaagatcaccctcgccaacaggggtggatattatccaatccactgagggccccaatagaacagaaaaacagaggaatgtgaattcatgcttgcttctggagttaggacatccatcttctgccttcagacatcagcattcctagttctcaggtctctgggcttggactaaactacattactggctctctcctgggctccagattgcagacagcagattgtgggacttctcagcctccgtaatcaatcctgtcttggaacctgcttcttagagggcctggactaacatactctggtagtgcatgaagcatctgtgatcacagcgtgacaagaaaatagcacaaacaaacctatgaggacttgagagaattcaaaagggtcatgtagggatcccaccccttctctgtgttttcactctgaagctctacacaactttacacctgaatgaacgccaaacctctatggatatataaagggaagcttgaggaggaatttcacagttacagtgcagaagcagaagcaaaagaattaaccagctcttcagtcaagcaaatcctctactcaccatgcttcctcctgccattcatttctatctccttccccttgcatgcatcctaatgaaaagctgtttggcttttaaaaatgatgccacagaaatcctttattcacatgtggttaaacctgttccagcacaccccagcagcaacagcacgttgaatcaagccagaaatggaggcaggcatttcagtaacactggactggatcggaacagaacagaaagcttgacgagacaaaattatttctggctatttccaggtgcattcctgaggcagctgcaggaagctcgggttcaagtgggttgccgggaactgcgttccaccaaatacatctctgatggccagtgcaccagcatcagccctctgaaggagctggtgtgtgctggcgagtgcttgcccctgccagtgctccctaactggattggaggaggctatggaacaaagtactggagcaggaggagctcccaggagtggcggtgtgtcaatgacaaaacccgtacccagagaatccagctgcagtgccaagatggcagcacacgcacctacaaaatcacagtagtcactgcctgcaagtgcaagaggtacacccggcagcacaacgagtccagtcacaactttgagagcatgtcacctgccaagccagtccagcatcacagagagcggaaaagagccagcaaatccagcaagcacagcatgagttagaactcagactcccataactagacttactagtaaccatctgctttacagatttgattgcttggaagactcaagcctgccactgctgttttctcacttgaaagtatatgctttctgctttgatcaaacccagcaagctgtcttaagtatcaggaccttctttgggaatagtttttccttttcaagtttttcaagatgtaggtatatccatgaatgcaatttgcatttaaattccacgtatcctgtagttttaattcctcattgttcttaaaagactgttgatactataaacatcagtgaatcattatattttaaaacagaaaagggcttctcagataccctccatctactggcccatcccctctcctaaacaaaactccttcaaaacaggttaaaaaaaatatgttgtcatgaatcttcacagtaacatttcagaaaggtgcttttttggtactcttcatgggaacagtttagcagccatgagtgatcttcctttgaaagagaatgaaagaccctgtgacatttcacttcaaaaataagccctgtagctctttacggtcgcatagtatgaaattataccctgcatgctgaccctcgcttggaatggaatgccagaaatgcatggcagcagctaataagtaaagctgattaactatttatttgtcaatgttattatttaatgagctttcacatgtgatttgtttcaaaactttaattttttaatgttttgaaactttttcatggacctaaatattttcctatatgatttgtggttgattagaaatatgaaatacatgttgtagatatgtaaaatgaatattttagtctccttattacatatatgttcatggtgaactttatcaatagtatggatctttttaaatcaataagatgctttgtaaagttgaaataagtaatactttcttgtttaatctgtgcaatcagaaggtgtcttgaccttcaattcaattggtttcttttaacaaaaataaacactgctaaaagtta

SEQ ID NO: 3772 - DNA, 2916 bp, Homo sapiens
  source 1..2916: mol_type = genomic DNA
ctgcttggctttgaggaagagtggcagtactgcctcactgcataagggatgggatcagagaacagtgctttaaagagctatacactgagagaaccaccatttaccttaccctctggacttgctgtttatcccgctgtactgcaagatggcaaatttgcttcagtttttgtgtataagagagaaaatgaagacaaggttaataaagctgccaagcatttgaagacacttcgtcacccttgcttgctaagatttttatcttgtactgtggaagcggatggcattcatcttgtcactgagcgagtacagcccctggaagtggctttggaaacattgtcttctgcagaggtctgtgctgggatctatgacatattgctggctcttatcttccttcatgacagaggacacctaacacacaataatgtctgtttatcatctgtgtttgtgagtgaagatggacactggaagctaggaggaatggaaactgtttgtaaagtttctcaggccacaccagagtttctgaggagtattcagtcaataagagacccagcatctatccctcctgaagagatgtctccagaattcacaactctcccagagtgtcatggacatgcccgggatgccttttcatttggaacattggtggaaagtttgctcacaatcttaaatgaacaggtttcagcggatgttctctccagctttcaacagaccttgcactcaactttgctgaatcccattccaaaatgtcggccagcgctctgcaccttactatctcatgacttcttcagaaatgattttctggaagttgtgaatttcttgaaaagtttaacattgaagagtgaagaggagaaaacggaattctttaaatttctgctggacagagtcagctgcttgtcagaggaattgatagcttcaaggttggtgcctcttctgcttaatcagttggtgtttgcagagccagtggctgttaagagttttcttccttatctgcttggccccaaaaaagatcatgcgcagggagaaactccttgcttgctctcaccagccctgttccagtcacgggtgatccccgtgcttctccagttgtttgaagttcatgaagagcatgtgcggatggtgctgctgtctcacatcgaggcctacgtggagcacttcactcaggagcagctgaagaaagtcatcttgccacaggttttgctgggcctgcgtgatactagcgattccattgtggcaattactctgcatagcctagcagtgctggtctctctgcttggaccagaggtggttgtgggaggagaacgaaccaagatcttcaaacgcactgccccaagttttactaaaaatactgacctttctctagaagattctcctatgtgtgtcgtctgcagccatcacagtcagatctcgccaatcttggagaaccccttctctagcatattccctaaatgtttcttttctggcagcacgcccatcaacagcaagaagcacatacagcgagattactacaatactcttttacagacaggcgatccattttctcagcctattaaatttcccataaatggactctcagatgtaaaaaatacttcggaggacagtgaaaacttcccatcaagttctaaaaagtctgaggagtggcctgactggagtgaacctgaggagcctgaaaatcaaactgtcaacatacagatttggcctagagaaccttgtgatgatgtcaagtcccagtgcactaccttggatgtggaagagtcatcttgggatgactgcgagcccagcagcttagatactaaagtaaacccaggaggtggaatcactgctacaaaacctgttacctcaggggagcagaagcctattcctgctttgctttcactcactgaagagtctatgccttggaaatcaagcttaccccaaaagattagccttgtacaaaggggggatgacgcagaccaaatcgagccgccaaaagtgtcatcacaagaaaggccccttaaggttccatcagaacttggtttaggagaggaattcaccattcaagtaaaaaagaagccagtaaaagatcctgagatggattggtttgctgatatgatcccagaaattaagccttctgctgcttttcttatattacctgaactgaggacagaaatggtcccaaaaaaggatgatgtctccccagtgatgcagttttcctcaaaatttgctgcagcagaaattactgagggagaggctgaaggctgggaagaagaaggggagctgaactgggaagataataactggtgacaatagatgtgagttaaactttaggaaaaaggattccctttttttaaaaaaaatcaatacctcaaaagcaggctttgggacaagaaaaccccaaagtggcctgcttttcccatcccaggagctcattatccagtctgtgccaactgaagtaggagactgactgtgagtgctggctaaaagccctgggtggtgaggctcacagtactggtttccaggaggaagagcctttgtgcatttgactgaggccagtttctatgaagagcaagtagctgaggagaggtcgaatttactgctttttccaggacaattctggaagtaaagaaaatgtaattcaagctggttagcttaattttgtgccattctttaacataagagtaagctctattatgaaatacaactttaaaaaattttagctataaattatataaatgattttaaattgctgaggtttccttaggcagcttatttatttgtttacagttagactatctgagtaaatggttctttgtggacctaggcagttcctgactgttccacatgtagtacattgtaccaaagttcttaataagaatattccccacaatcctgttctctaaatgtcaaataaagattattttcactagattcaactttacaaaa

SEQ ID NO: 3773 - DNA, 2921 bp, Homo sapiens
  source 1..2921: mol_type = genomic DNA
tttccggacccgtctctatggtgtaggagaaacccggcccccagaagattgtgggtgtagtggccacagccttacaggcaggcaggggtggttggtgtcaacaggggggccaacagggtaccagagccaagaccctcggcctcctcccccgccgccttcctgcagatctgcttggctttgaggaagagtggcagtactgcctcactgcataagggatgggatcagagaacagtgctttaaagagctatacactgagagaaccaccatttaccttaccctctggacttgctgtttatcccgctgtactgcaagatggcaaatttgcttcagtttttgtgtataagagagaaaatgaagacaaggttaataaagctgccaagcatttgaagacacttcgtcacccttgcttgctaagatttttatcttgtactgtggaagcggatggcattcatcttgtcactgagcgagtacagcccctggaagtggctttggaaacattgtcttctgcagaggtctgtgctgggatctatgacatattgctggctcttatcttccttcatgacagaggacacctaacacacaataatgtctgtttatcatctgtgtttgtgagtgaagatggacactggaagctaggaggaatggaaactgtttgtaaagtttctcaggccacaccagagtttctgaggagtattcagtcaataagagacccagcatctatccctcctgaagagatgtctccagaattcacaactctcccagagtgtcatggacatgcccgggatgccttttcatttggaacattggtggaaagtttgctcacaatcttaaatgaacaggtttcagcggatgttctctccagctttcaacagaccttgcactcaactttgctgaatcccattccaaaatgtcggccagcgctctgcaccttactatctcatgacttcttcagaaatgattttctggaagttgtgaatttcttgaaaagtttaacattgaagagtgaagaggagaaaacggaattctttaaatttctgctggacagagtcagctgcttgtcagaggaattgatagcttcaaggttggtgcctcttctgcttaatcagttggtgtttgcagagccagtggctgttaagagttttcttccttatctgcttggccccaaaaaagatcatgcgcagggagaaactccttgcttgctctcaccagccctgttccagtcacgggtgatccccgtgcttctccagttgtttgaagttcatgaagagcatgtgcggatggtgctgctgtctcacatcgaggcctacgtggagcacttcactcaggagcagctgaagaaagtcatcttgccacaggttttgctgggcctgcgtgatactagcgattccattgtggcaattactctgcatagcctagcagtgctggtctctctgcttggaccagaggtggttgtgggaggagaacgaaccaagatcttcaaacgcactgccccaagttttactaaaaatactgacctttctctagaaggcgatccattttctcagcctattaaatttcccataaatggactctcagatgtaaaaaatacttcggaggacagtgaaaacttcccatcaagttctaaaaagtctgaggagtggcctgactggagtgaacctgaggagcctgaaaatcaaactgtcaacatacagatttggcctagagaaccttgtgatgatgtcaagtcccagtgcactaccttggatgtggaagagtcatcttgggatgactgcgagcccagcagcttagatactaaagtaaacccaggaggtggaatcactgctacaaaacctgttacctcaggggagcagaagcctattcctgctttgctttcactcactgaagagtctatgccttggaaatcaagcttaccccaaaagattagccttgtacaaaggggggatgacgcagaccaaatcgagccgccaaaagtgtcatcacaagaaaggccccttaaggttccatcagaacttggtttaggagaggaattcaccattcaagtaaaaaagaagccagtaaaagatcctgagatggattggtttgctgatatgatcccagaaattaagccttctgctgcttttcttatattacctgaactgaggacagaaatggtcccaaaaaaggatgatgtctccccagtgatgcagttttcctcaaaatttgctgcagcagaaattactgagggagaggctgaaggctgggaagaagaaggggagctgaactgggaagataataactggtgacaatagatgtgagttaaactttaggaaaaaggattccctttttttaaaaaaaatcaatacctcaaaagcaggctttgggacaagaaaaccccaaagtggcctgcttttcccatcccaggagctcattatccagtctgtgccaactgaagtaggagactgactgtgagtgctggctaaaagccctgggtggtgaggctcacagtactggtttccaggaggaagagcctttgtgcatttgactgaggccagtttctatgaagagcaagtagctgaggagaggtcgaatttactgctttttccaggacaattctggaagtaaagaaaatgtaattcaagctggttagcttaattttgtgccattctttaacataagagtaagctctattatgaaatacaactttaaaaaattttagctataaattatataaatgattttaaattgctgaggtttccttaggcagcttatttatttgtttacagttagactatctgagtaaatggttctttgtggacctaggcagttcctgactgttccacatgtagtacattgtaccaaagttcttaataagaatattccccacaatcctgttctctaaatgtcaaataaagattattttcactagattcaactttacaaaa

SEQ ID NO: 3774 - DNA, 3477 bp, Homo sapiens
  source 1..3477: mol_type = genomic DNA
atggtgtaggagaaacccggcccccagaagattgtgggtgtagtggccacagccttacaggcaggcaggggtggttggtgtcaacaggggggccaacagggtaccagagccaagaccctcggcctcctcccccgccgccttcctgcagatctgcttggctttgaggaagagtggcagtactgcctcactgcataagggatgggatcagagaacagtgctttaaagagctatacactgagagaaccaccatttaccttaccctctggacttgctgtttatcccgctgtactgcaagatggcaaatttgcttcagtttttgtgtataagagagaaaatgaagacaaggttaataaagctgccaagcatttgaagacacttcgtcacccttgcttgctaagatttttatcttgtactgtggaagcggatggcattcatcttgtcactgagcgagtacagcccctggaagtggctttggaaacattgtcttctgcagaggtctgtgctgggatctatgacatattgctggctcttatcttccttcatgacagaggacacctaacacacaataatgtctgtttatcatctgtgtttgtgagtgaagatggacactggaagctaggaggaatggaaactgtttgtaaagtttctcaggccacaccagagtttctgaggagtattcagtcaataagagacccagcatctatccctcctgaagagatgtctccagaattcacaactctcccagagtgtcatggacatgcccgggatgccttttcatttggaacattggtggaaagtttgctcacaatcttaaatgaacaggtttcagcggatgttctctccagctttcaacagaccttgcactcaactttgctgaatcccattccaaaatgtcggccagcgctctgcaccttactatctcatgacttcttcagaaatgattttctggaagttgtgaatttcttgaaaagtttaacattgaagagtgaagaggagaaaacggaattctttaaatttctgctggacagagtcagctgcttgtcagaggaattgatagcttcaaggttggtgcctcttctgcttaatcagttggtgtttgcagagccagtggctgttaagagttttcttccttatctgcttggccccaaaaaagatcatgcgcagggagaaactccttgcttgctctcaccagccctgttccagtcacgggtgatccccgtgcttctccagttgtttgaagttcatgaagagcatgtgcggatggtgctgctgtctcacatcgaggcctacgtggagcacttcactcaggagcagctgaagaaagtcatcttgccacaggttttgctgggcctgcgtgatactagcgattccattgtggcaattactctgcatagcctagcagtgctggtctctctgcttggaccagaggtggttgtgggaggagaacgaaccaagatcttcaaacgcactgccccaagttttactaaaaatactgacctttctctagaagattctcctatgtgtgtcgtctgcagccatcacagtcagatctcgccaatcttggagaaccccttctctagcatattccctaaatgtttcttttctggcagcacgcccatcaacagcaagaagcacatacagcgagattactacaatactcttttacagacaggcgatccattttctcagcctattaaatttcccataaatggactctcagatgtaaaaaatacttcggaggacagtgaaaacttcccatcaagttctaaaaagtctgaggagtggcctgactggagtgaacctgaggagcctgaaaatcaaactgtcaacatacagatttggcctagagaaccttgtgatgatgtcaagtcccagtgcactaccttggatgtggaagagtcatcttgggatgactgcgagcccagcagcttagatactaaagtaaacccaggaggtggaatcactgctacaaaacctgttacctcaggggagcagaagcctattcctgctttgctttcactcactgaagagtctatgccttggaaatcaagcttaccccaaaagattagccttgtacaaaggggggatgacgcagaccaaatcgagccgccaaaagtgtcatcacaagaaaggccccttaaggttccatcagaacttggtttaggagaggaattcaccattcaagtaaaaaagaagccagtaaaagatcctgagatggattggtttgctgatatgatcccagaaattaagccttctgctgcttttcttatattacctgaactgaggacagaaatggtcccaaaaaaggatgatgtctccccagtgatgcagttttcctcaaaatttgctgcagcagaaattactgagggagaggctgaaggctgggaagaagaaggggagctgaactgggaagataataactggtgacaatagatgtgagttaaactttaggaaaaaggattccctttttttaaaaaaaatcaatacctcaaaagcaggctttgggacaagaaaaccccaaagtggcctgcttttcccatcccaggagctcattatccagtctgtgccaactgaagtaggagactgactgtgagtgctggctaaaagccctgggtggtgaggctcacagtactggtttccaggaggaagagcctttgtgcatttgactgaggccagtttctatgaagagcaagtagctgaggagaggtcgaatttactgctttttccaggacaattctggaagtaaagaaaatgtaattcaagctggttagcttaattttgtgccattctttaacataagagtaagctctattatgaaatacaactttaaaaaattttagctataaattatataaatgattttaaattgctgaggtttccttaggcagcttatttatttgtttacagttagactatctgagtaaatggttctttgtggacctaggcagttcctgactgttccacatgtagtacattgtaccaaagttcttaataagaatattccccacaatcctgttctctaaatgtcaaataaagattattttcactagattcaactttacaaaatttgttttatatctgttagaaaatgtacagacataagtattttcagttgacaaagcatcaaacccagttctgcctagtgataagtttcaccctagagtatgtatgtaacgttttagcttatccatcctttcttggagcgcctccatttccattgaaagccaggctggagcaggacccttttggagtagtgactcagttgcttccaaagcccctgctattgtatgcagcgctgacctgtactcttcttcccaggggaactcctgacgagctctttttgcataaggctggaaaaaaaacataagtaatatcacaatatccattctaaatataaagaaccttccttttggactggagtaaagcttacatgcaaattttattctagtcattggatcacaagggtaggaggatgca

SEQ ID NO: 3775 - DNA, 2077 bp, Homo sapiens
  source 1..2077: mol_type = genomic DNA
gcacctctactgtttgctacaagtggccagcagccattttggatttgggcggaaatgaaattaaaactgtgctgttaaaagcctaaaaattcaagtcaagacaaacttaagcattcgaccaacacatctagaaagggggcatcttcgtggactaactagaccactggggcagtgagtgaaactcggtatcgtcgcggcgcccacacttaagatggcaccggcctgagactcagctgtgcggcctctctacctcggttcctgatctgcttggctttgaggaagagtggcagtactgcctcactgcataagggatgggatcagagaacagtgctttaaagagctatacactgagagaaccaccatttaccttaccctctggacttgctgtttatcccgctgtactgcaagatggcaaatttgcttcagtttttgtgtataagagagaaaatgaagacaaggttaataaagctgccaagcatttgaagacacttcgtcacccttgcttgctaagatttttatcttgtactgtggaagcggatggcattcatcttgtcactgagcgagtacagcccctggaagtggctttggaaacattgtcttctgcagaggtctgtgctgggatctatgacatattgctggctcttatcttccttcatgacagaggacacctaacacacaataatgtctgtttatcatctgtgtttgtgagtgaagatggacactggaagctaggaggaatggaaactgtttgtaaagtttctcaggccacaccagagtttctgaggagtattcagtcaataagagacccagcatctatccctcctgaagagatgtctccagaattcacaactctcccagagtgtcatggacatgcccgggatgccttttcatttggaacattggtggaaagtttgctcacaatcttaaatgaacaggtttcagcggatgttctctccagctttcaacagaccttgcactcaactttgctgaatcccattccaaaatgtcggccagcgctctgcaccttactatctcatgacttcttcagaaatgattttctggaagttgtgaatttcttgaaaagtttaacattgaagagtgaagaggagaaaacggaattctttaaatttctgctggacagagtcagctgcttgtcagaggaattgatagcttcaaggttggtgcctcttctgcttaatcagttggtgtttgcagagccagtggctgttaagagttttcttccttatctgcttggccccaaaaaagatcatgcgcagggagaaactccttgcttgctctcaccagccctgttccagtcacgggtgatccccgtgcttctccagttgtttgaagttcatgaagagcatgtgcggatggtgctgctgtctcacatcgaggcctacgtggagcacttcactcaggagcagctgaagaaagtcatcttgccacaggttttgctgggcctgcgtgatactagcgattccattgtggcaattactctgcatagcctagcagtgctggtctctctgcttggaccagaggtggttgtgggaggagaacgaaccaagatcttcaaacgcactgccccaagttttactaaaaatactgacctttctctagaaggcgatccattttctcagcctattaaatttcccataaatggactctcagatgtaaaaaatacttcggaggacagtgaaaacttcccatcaagttctaaaaagtctgaggagtggcctgactggagtgaacctgaggagcctgaaaatcaaactgtcaacatacagatttggcctagagaaccttgtgatgatgtcaagtcccagtgcactaccttggatgtggaagagtcatcttgggatgactgcgagcccagcagcttagatactaaagtaaacccaggaggtggaatcactgctacaaaacctgttacctcaggggagcagaagcctattcctgctttgctttcactcactgaagagtctatgccttggaaatcaagcttaccccaaaagattagccttgtacaaaggggggatgacgcagaccaaatcgagccgccaaaagtgtcatcaca

SEQ ID NO: 3776 - DNA, 4488 bp, Homo sapiens
  source 1..4488: mol_type = genomic DNA
cgagggctcggccgtaggagccccgcgcactccagccctgcagcctccggagtcagtgccgcgcgcccgccgccccgcgccttcctgctcgccgcacctccgggagccggggcgcacccagcccgcagcgccgcctccccgcccgcgccgcctccgaccgcaggccgagggccgccactggccggggggaccgggcagcagcttgcggccgcggagccgggcaacgctggggactgcgccttttgtccccggaggtccctggaagtttgcggcaggacgcgcgcggggaggcggcggaggcagccccgacgtcgcggagaacagggcgcagagccggcatgggcatcgggcgcagcgaggggggccgccgcggggcagccctgggcgtgctgctggcgctgggcgcggcgcttctggccgtgggctcggccagcgagtacgactacgtgagcttccagtcggacatcggcccgtaccagagcgggcgcttctacaccaagccacctcagtgcgtggacatccccgcggacctgcggctgtgccacaacgtgggctacaagaagatggtgctgcccaacctgctggagcacgagaccatggcggaggtgaagcagcaggccagcagctgggtgcccctgctcaacaagaactgccacgccggcacccaggtcttcctctgctcgctcttcgcgcccgtctgcctggaccggcccatctacccgtgtcgctggctctgcgaggccgtgcgcgactcgtgcgagccggtcatgcagttcttcggcttctactggcccgagatgcttaagtgtgacaagttccccgagggggacgtctgcatcgccatgacgccgcccaatgccaccgaagcctccaagccccaaggcacaacggtgtgtcctccctgtgacaacgagttgaaatctgaggccatcattgaacatctctgtgccagcgagtttgcactgaggatgaaaataaaagaagtgaaaaaagaaaatggcgacaagaagattgtccccaagaagaagaagcccctgaagttggggcccatcaagaagaaggacctgaagaagcttgtgctgtacctgaagaatggggctgactgtccctgccaccagctggacaacctcagccaccacttcctcatcatgggccgcaaggtgaagagccagtacttgctgacggccatccacaagtgggacaagaaaaacaaggagttcaaaaacttcatgaagaaaatgaaaaaccatgagtgccccacctttcagtccgtgtttaagtgattctcccgggggcagggtggggagggagcctcgggtggggtgggagcgggggggacagtgccccgggaacccggtgggtcacacacacgcactgcgcctgtcagtagtggacattgtaatccagtcggcttgttcttgcagcattcccgctcccttccctccatagccacgctccaaaccccagggtagccatggccgggtaaagcaagggccatttagattaggaaggtttttaagatccgcaatgtggagcagcagccactgcacaggaggaggtgacaaaccatttccaacagcaacacagccactaaaacacaaaaagggggattgggcggaaagtgagagccagcagcaaaaactacattttgcaacttgttggtgtggatctattggctgatctatgcctttcaactagaaaattctaatgattggcaagtcacgttgttttcaggtccagagtagtttctttctgtctgctttaaatggaaacagactcataccacacttacaattaaggtcaagcccagaaagtgataagtgcagggaggaaaagtgcaagtccattatgtaatagtgacagcaaagggaccaggggagaggcattgccttctctgcccacagtctttccgtgtgattgtctttgaatctgaatcagccagtctcagatgccccaaagtttcggttcctatgagcccggggcatgatctgatccccaagacatgtggaggggcagcctgtgcctgcctttgtgtcagaaaaaggaaaccacagtgagcctgagagagacggcgattttcgggctgagaaggcagtagttttcaaaacacatagttaaaaaagaaacaaatgaaaaaaattttagaacagtccagcaaattgctagtcagggtgaattgtgaaattgggtgaagagcttaggattctaatctcatgttttttccttttcacatttttaaaagaacaatgacaaacacccacttatttttcaaggttttaaaacagtctacattgagcatttgaaaggtgtgctagaacaaggtctcctgatccgtccgaggctgcttcccagaggagcagctctccccaggcatttgccaagggaggcggatttccctggtagtgtagctgtgtggctttccttcctgaagagtccgtggttgccctagaacctaacaccccctagcaaaactcacagagctttccgtttttttctttcctgtaaagaaacatttcctttgaacttgattgcctatggatcaaagaaattcagaacagcctgcctgtccccccgcactttttacatatatttgtttcatttctgcagatggaaagttgacatgggtggggtgtccccatccagcgagagagtttcaaaagcaaaacatctctgcagtttttcccaagtaccctgagatacttcccaaagcccttatgtttaatcagcgatgtatataagccagttcacttagacaactttacccttcttgtccaatgtacaggaagtagttctaaaaaaaatgcatattaatttcttcccccaaagccggattcttaattctctgcaacactttgaggacatttatgattgtccctctgggccaatgcttatacccagtgaggatgctgcagtgaggctgtaaagtggccccctgcggccctagcctgacccggaggaaaggatggtagattctgttaactcttgaagactccagtatgaaaatcagcatgcccgcctagttacctaccggagagttatcctgataaattaacctctcacagttagtgatcctgtccttttaacaccttttttgtggggttctctctgacctttcatcgtaaagtgctggggaccttaagtgatttgcctgtaattttggatgattaaaaaatgtgtatatatattagctaattagaaatattctacttctctgttgtcaaactgaaattcagagcaagttcctgagtgcgtggatctgggtcttagttctggttgattcactcaagagttcagtgctcatacgtatctgctcattttgacaaagtgcctcatgcaaccgggccctctctctgcggcagagtccttagtggaggggtttacctggaacattagtagttaccacagaatacggaagagcaggtgactgtgctgtgcagctctctaaatgggaattctcaggtaggaagcaacagcttcagaaagagctcaaaataaattggaaatgtgaatcgcagctgtgggttttaccaccgtctgtctcagagtcccaggaccttgagtgtcattagttactttattgaaggttttagacccatagcagctttgtctctgtcacatcagcaatttcagaaccaaaagggaggctctctgtaggcacagagctgcactatcacgagcctttgtttttctccacaaagtatctaacaaaaccaatgtgcagactgattggcctggtcattggtctccgagagaggaggtttgcctgtgatttcctaattatcgctagggccaaggtgggatttgtaaagctttacaataatcattctggatagagtcctgggaggtccttggcagaactcagttaaatctttgaagaatatttgtagttatcttagaagatagcatgggaggtgaggattccaaaaacattttatttttaaaatatcctgtgtaacacttggctcttggtacctgtgggttagcatcaagttctccccagggtagaattcaatcagagctccagtttgcatttggatgtgtaaattacagtaatcccatttcccaaacctaaaatctgtttttctcatcagactctgagtaactggttgctgtgtcataacttcatagatgcaggaggctcaggtgatctgtttgaggagagcaccctaggcagcctgcagggaataacatactggccgttctgacctgttgccagcagatacacaggacatggatgaaattcccgtttcctctagtttcttcctgtagtactcctcttttagatcctaagtctcttacaaaagctttgaatactgtgaaaatgttttacattccatttcatttgtgttgtttttttaactgcattttaccagatgttttgatgttatcgcttatgttaatagtaattcccgtacgtgttcattttattttcatgctttttcagccatgtatcaatattcacttgactaaaatcactcaattaatcaa

SEQ ID NO: 3777 - DNA, 1437 bp, Homo sapiens
  source 1..1437: mol_type = genomic DNA
actccagccctgcagcctccggagtcagtgccgcgcgcccgccgccccgcgccttcctgctcgccgcacctccgggagccggggcgcacccagcccgacgtcgcggagaacagggcgcagagccggcatgggcatcgggcgcagcgaggggggccgccgcggggcagccctgggcgtgctgctggcgctgggcgcggcgcttctggccgtgggctcggccagcgagtacgactacgtgagcttccagtcggacatcggcccgtaccagagcgggcgcttctacaccaagccacctcagtgcgtggacatccccgcggacctgcggctgtgccacaacgtgggctacaagaagatggtgctgcccaacctgctggagcacgagaccatggcggaggtgaagcagcaggccagcagctgggtgcccctgctcaacaagaactgccacgccggcacccaggtcttcctctgctcgctcttcgcgcccgtctgcctggaccggcccatctacccgtgtcgctggctctgcgaggccgtgcgcgactcgtgcgagccggtcatgcagttcttcggcttctactggcccgagatgcttaagtgtgacaagttccccgagggggacgtctgcatcgccatgacgccgcccaatgccaccgaagcctccaagccccaaggcacaacggtgtgtcctccctgtgacaacgagttgaaatctgaggccatcattgaacatctctgtgccagcgagtttgcactgaggatgaaaataaaagaagtgaaaaaagaaaatggcgacaagaagattgtccccaagaagaagaagcccctgaagttggggcccatcaagaagaaggacctgaagaagcttgtgctgtacctgaagaatggggctgactgtccctgccaccagctggacaacctcagccaccacttcctcatcatgggccgcaaggtgaagagccagtacttgctgacggccatccacaagtgggacaagaaaaacaaggagttcaaaaacttcatgaagaaaatgaaaaaccatgagtgccccacctttcagtccgtgtttaagtgattctcccgggggcagggtggggagggagcctcgggaacccggtgggtcacacacacgcactgcgcctgtcagtagtggacattgtaatccagtcggcttgttcttgcagcattcccgctcccttccctccatagccacgctccaaaccccagggtagccatggccgggtaaagcaagggccatttagattaggaaggtttttaagatccgcaatgtggagcagcagccactgcacaggaggaggtgacaaaccatttccaacagcaacacagccactaaaacacaaaaagggggattgggcggaaagtgagagccagcagcaaaaactacattttgcaacttgttggtgtggatctattggctga

SEQ ID NO: 3778 - DNA, 2957 bp, Homo sapiens
  source 1..2957: mol_type = genomic DNA
gggggagcccgcgccgcggctgcagctgccaagggagcgttccgagcccacgtcaggggaggtgtcgggataaatagggtcccgcaatggccgtggctggctgcgctccgagctgcggagtccgggactggagctgcccgggcgggttcgcgccccgaaggctgagagctggcgctgctcgtgccctgtgtgccagacggcggagctccgcggccggaccccgcggccccgctttgctgccgactggagtttgggggaagaaactctcctgcgccccagaggatttcttcctcggcgaagggacagcgaaagatgagggtggcaggaagagaagggcgctttctgtctgccggggtcgcagcgcgagagggcagtgccatgttcctctccatcctagtggcgctgtgcctgtggctgcacctggcgctgggcgtgcgcggcgcgccctgcgaggcggtgcgcatccctatgtgccggcacatgccctggaacatcacgcggatgcccaaccacctgcaccacagcacgcaggagaacgccatcctggccatcgagcagtacgaggagctggtggacgtgaactgcagcgccgtgctgcgcttcttcctctgtgccatgtacgcgcccatttgcaccctggagttcctgcacgaccctatcaagccgtgcaagtcggtgtgccaacgcgcgcgcgacgactgcgagcccctcatgaagatgtacaaccacagctggcccgaaagcctggcctgcgacgagctgcctgtctatgaccgtggcgtgtgcatctcgcctgaagccatcgtcacggacctcccggaggatgttaagtggatagacatcacaccagacatgatggtacaggaaaggcctcttgatgttgactgtaaacgcctaagccccgatcggtgcaagtgtaaaaaggtgaagccaactttggcaacgtatctcagcaaaaactacagctatgttattcatgccaaaataaaagctgtgcagaggagtggctgcaatgaggtcacaacggtggtggatgtaaaagagatcttcaagtcctcatcacccatccctcgaactcaagtcccgctcattacaaattcttcttgccagtgtccacacatcctgccccatcaagatgttctcatcatgtgttacgagtggcgctcaaggatgatgcttcttgaaaattgcttagttgaaaaatggagagatcagcttagtaaaagatccatacagtgggaagagaggctgcaggaacagcggagaacagttcaggacaagaagaaaacagccgggcgcaccagtcgtagtaatccccccaaaccaaagggaaagcctcctgctcccaaaccagccagtcccaagaagaacattaaaactaggagtgcccagaagagaacaaacccgaaaagagtgtgagctaactagtttccaaagcggagacttccgacttccttacaggatgaggctgggcattgcctgggacagcctatgtaaggccatgtgccccttgccctaacaactcactgcagtgctcttcatagacacatcttgcagcatttttcttaaggctatgcttcagtttttctttgtaagccatcacaagccatagtggtaggtttgccctttggtacagaaggtgagttaaagctggtggaaaaggcttattgcattgcattcagagtaacctgtgtgcatactctagaagagtagggaaaataatgcttgttacaattcgacctaatatgtgcattgtaaaataaatgccatatttcaaacaaaacacgtaatttttttacagtatgttttattaccttttgatatctgttgttgcaatgttagtgatgttttaaaatgtgatcgaaaatataatgcttctaagaaggaacagtagtggaatgaatgtctaaaagatctttatgtgtttatggtctgcagaaggatttttgtgatgaaaggggattttttgaaaaatctagagaagtagcatatggaaaactataatgtgtcttttttacaatgacttcagctctgtttttagctagaaactctaaaaacaaaaataataataaagaaaaataaataaaaaggagaggcagacaatgtctggattcctgttttttggttacctgatttcatgatcatgatgcttcttgtcaacaccctcttaagcagcaccagaaacagtgagtttgtctgtaccattaggagttaggtactaattagttggctaatgctcaagtattttatacccacaagagaggtatgtcactcatcttacttcccaggacatccaccctgagaataatttgacaagcttaaaaatggccttcatgtgagtgccaaattttgttttcttcatttaaatattttctttgcctaaatacatgtgagaggagttaaatataaatgtacagagaggaaagttgaggttccacctctgaaatgagaattacttgacagttgggatactttaatcagaaaaaaagaacttatcttgcagcattttatcaacaaatttcataattgtggacaattggaggcatttattttaaaaaacaattttattggccttttgctaacacagtaagcatgtattctctataaggcattcaataaatgcacaacgcccaaaggaaataaaatcctatctaatcctactctccactacacagaggtaatcactattagtattttggcatattattctccaggtgtttcttatgcacttataaaatgatttgaacaaataaaactaggaacctgctatacatgtgtttcataacctgcctcctttgcttggccctttattgagataagttttcctgtcaagaaagcagaaaccatctcatttctaacagctgtgttatattccatagtatgcattactcaacaaactgttgtgctattggatacttaggtggtttcttcactgacaatactgaataaacatctca

SEQ ID NO: 3779 - DNA, 1532 bp, Homo sapiens
  source 1..1532: mol_type = genomic DNA
tggctgcgctccgagctgcggagtccgggactggagctgcccgggcgggttcgcgccccgaaggctgagagctggcgctgctcgtgccctgtgtgccagacggcggagctccgcggccggaccccgcggccccgctttgctgccgactggagtttgggggaagaaactctcctgcgccccagaggatttcttcctcggcgaagggacagcgaaagatgagggtggcaggaagagaagggcgctttctgtctgccggggtcgcagcgcgagagggcagtgccatgttcctctccatcctagtggcgctgtgcctgtggctgcacctggcgctgggcgtgcgcggcgcgccctgcgaggcggtgcgcatccctatgtgccggcacatgccctggaacatcacgcggatgcccaaccacctgcaccacagcacgcaggagaacgccatgtacgcgcccatttgcaccctggagttcctgcacgaccctatcaagccgtgcaagtcggtgtgccaacgcgcgcgcgacgactgcgagcccctcatgaagatgtacaaccacagctggcccgaaagcctggcctgcgacgagctgcctgtctatgaccgtggcgtgtgcatctcgcctgaagccatcgtcacggacctcccggaggatgttaagtggatagacatcacaccagacatgatggtacaggaaaggcctcttgatgttgactgtaaacgcctaagccccgatcggtgcaagtgtaaaaaggtgaagccaactttggcaacgtatctcagcaaaaactacagctatgttattcatgccaaaataaaagctgtgcagaggagtggctgcaatgaggtcacaacggtggtggatgtaaaagagatcttcaagtcctcatcacccatccctcgaactcaagtcccgctcattacaaattcttcttgccagtgtccacacatcctgccccatcaagatgttctcatcatgtgttacgagtggcgctcaaggatgatgcttcttgaaaattgcttagttgaaaaatggagagatcagcttagtaaaagatccatacagtgggaagagaggctgcaggaacagcggagaacagttcaggacaagaagaaaacagccgggcgcaccagtcgtagtaatccccccaaaccaaagggaaagcctcctgctcccaaaccagccagtcccaagaagaacattaaaactaggagtgcccagaagagaacaaacccgaaaagagtgtgagctaactagtttccaaagcggagacttccgacttccttacaggatgaggctgggcattgcctgggacagcctatgtaaggccatgtgccccttgccctaacaactcactgcagtgctcttcatagacacatcttgcagcatttttcttaaggctatgcttcagtttttctttgtaagccatcacaagccatagtggtaggtttgccctttggtacagaaggtgagttaaagctggtggaaaaggcttattgcattgcattcagagtaacctgtgtgcatactcta

SEQ ID NO: 3780 - DNA, 1836 bp, Homo sapiens
  source 1..1836: mol_type = genomic DNA
gcggcggcggcggcggcggctgggtagagtcagggccgggggcgcacgccggaacacctgggccgccgggcaccgagcgtcggggggctgcgcggcgcgcacctggagagggcgcagccatgcgggcggcggcggcgggggggggcgtgcggacggccgcgctggcgctgctgctgggggcgctgcactgggcgccggcgcgctgcgaggagtacgactactatggctggcaggccgagccgctgcacggccgctcctactccaagccgccgcagtgccttgacatccctgccgacctgccgctctgccacacggtgggctacaagcgcatgcggctgcccaacctgctggagcacgagagcctggccgaagtgaagcagcaggcgagcagctggctgccgctgctggccaagcgctgccactcggatacgcaggtcttcctgtgctcgctctttgcgcccgtctgtctcgaccggcccatctacccgtgccgctcgctgtgcgaggccgtgcgcgccggctgcgcgccgctcatggaggcctacggcttcccctggcctgagatgctgcactgccacaagttccccctggacaacgacctctgcatcgccgtgcagttcgggcacctgcccgccaccgcgcctccagtgaccaagatctgcgcccagtgtgagatggagcacagtgctgacggcctcatggagcagatgtgctccagtgactttgtggtcaaaatgcgcatcaaggagatcaagatagagaatggggaccggaagctgattggagcccagaaaaagaagaagctgctcaagccgggccccctgaagcgcaaggacaccaagcggctggtgctgcacatgaagaatggcgcgggctgcccctgcccacagctggacagcctggcgggcagcttcctggtcatgggccgcaaagtggatggacagctgctgctcatggccgtctaccgctgggacaagaagaataaggagatgaagtttgcagtcaaattcatgttctcctacccctgctccctctactaccctttcttctacggggcggcagagccccactgaagggcactcctccttgccctgccagctgtgccttgcttgccctctggccccgccccaacttccaggctgacccggccctactggagggtgttttcacgaatgttgttactggcacaaggcctaagggatgggcacggagcccaggctgtcctttttgacccaggggtcctggggtccctgggatgttgggcttcctctctcaggagcagggcttcttcatctgggtgaagacctcagggtctcagaaagtaggcaggggaggagagggtaagggaaaggtggaggggctcagggcaccctgaggcggaggtttcagagtagaaggtggtgtcagctccagctcccctctgtcggtggtggggcctcaccttgaagagggaagtctcaatattaggctaagctatttgggaaagttctccccaccgcccctgtacgcgtcatcctagccccccttaggaaaggagttagggtctcagtgcctccagccacaccccctgccttccccagcttgcccatttccctgccccaaggcccagagctccccccagactggagagcaagcccagcccagcctcggcatagacccccttctggtccgcccgcggctcgattcccgggattcattcctcagcctctgcttctcccttttatcccaataagttattgctactgctgtgaggccataggtactagacaaccaatacatgcagggttgggttttctaatttttttaactttttaattaaatcaaagaaaacaataa

SEQ ID NO: 3781 - DNA, 1565 bp, Homo sapiens
  source 1..1565: mol_type = genomic DNA
ggatgtctgcagcagcatttaaattctgggagggcttggttgtcagcagcagcaggaggaggcagagcacagcatcgtcgggaccagactcgtctcaggccagttgcagccttctcagccaaacgccgaccaaggaaaactcactaccatgagaattgcagtgatttgcttttgcctcctaggcatcacctgtgccataccagttaaacaggctgattctggaagttctgaggaaaagcagctttacaacaaatacccagatgctgtggccacatggctaaaccctgacccatctcagaagcagaatctcctagccccacagacccttccaagtaagtccaacgaaagccatgaccacatggatgatatggatgatgaagatgatgatgaccatgtggacagccaggactccattgactcgaacgactctgatgatgtagatgacactgatgattctcaccagtctgatgagtctcaccattctgatgaatctgatgaactggtcactgattttcccacggacctgccagcaaccgaagttttcactccagttgtccccacagtagacacatatgatggccgaggtgatagtgtggtttatggactgaggtcaaaatctaagaagtttcgcagacctgacatccagtaccctgatgctacagacgaggacatcacctcacacatggaaagcgaggagttgaatggtgcatacaaggccatccccgttgcccaggacctgaacgcgccttctgattgggacagccgtgggaaggacagttatgaaacgagtcagctggatgaccagagtgctgaaacccacagccacaagcagtccagattatataagcggaaagccaatgatgagagcaatgagcattccgatgtgattgatagtcaggaactttccaaagtcagccgtgaattccacagccatgaatttcacagccatgaagatatgctggttgtagaccccaaaagtaaggaagaagataaacacctgaaatttcgtatttctcatgaattagatagtgcatcttctgaggtcaattaaaaggagaaaaaatacaatttctcactttgcatttagtcaaaagaaaaaatgctttatagcaaaatgaaagagaacatgaaatgcttctttctcagtttattggttgaatgtgtatctatttgagtctggaaataactaatgtgtttgataattagtttagtttgtggcttcatggaaactccctgtaaactaaaagcttcagggttatgtctatgttcattctatagaagaaatgcaaactatcactgtattttaatatttgttattctctcatgaatagaaatttatgtagaagcaaacaaaatacttttacccacttaaaaagagaatataacattttatgtcactataatcttttgttttttaagttagtgtatattttgttgtgattatctttttgtggtgtgaataaatcttttatcttgaatgtaataagaatttggtggtgtcaattgcttatttgttttcccacggttgtccagcaattaataaaacataaccttttttactgcct

SEQ ID NO: 3782 - DNA, 1558 bp, Homo sapiens
  source 1..1558: mol_type = genomic DNA
ctccctgtgttggtggaggatgtctgcagcagcatttaaattctgggagggcttggttgtcagcagcagcaggaggaggcagagcacagcatcgtcgggaccagactcgtctcaggccagttgcagccttctcagccaaacgccgaccaaggaaaactcactaccatgagaattgcagtgatttgcttttgcctcctaggcatcacctgtgccataccagttaaacaggctgattctggaagttctgaggaaaagcagctttacaacaaatacccagatgctgtggccacatggctaaaccctgacccatctcagaagcagaatctcctagccccacagaatgctgtgtcctctgaagaaaccaatgactttaaacaagagacccttccaagtaagtccaacgaaagccatgaccacatggatgatatggatgatgaagatgatgatgaccatcagtctgatgagtctcaccattctgatgaatctgatgaactggtcactgattttcccacggacctgccagcaaccgaagttttcactccagttgtccccacagtagacacatatgatggccgaggtgatagtgtggtttatggactgaggtcaaaatctaagaagtttcgcagacctgacatccagtaccctgatgctacagacgaggacatcacctcacacatggaaagcgaggagttgaatggtgcatacaaggccatccccgttgcccaggacctgaacgcgccttctgattgggacagccgtgggaaggacagttatgaaacgagtcagctggatgaccagagtgctgaaacccacagccacaagcagtccagattatataagcggaaagccaatgatgagagcaatgagcattccgatgtgattgatagtcaggaactttccaaagtcagccgtgaattccacagccatgaatttcacagccatgaagatatgctggttgtagaccccaaaagtaaggaagaagataaacacctgaaatttcgtatttctcatgaattagatagtgcatcttctgaggtcaattaaaaggagaaaaaatacaatttctcactttgcatttagtcaaaagaaaaaatgctttatagcaaaatgaaagagaacatgaaatgcttctttctcagtttattggttgaatgtgtatctatttgagtctggaaataactaatgtgtttgataattagtttagtttgtggcttcatggaaactccctgtaaactaaaagcttcagggttatgtctatgttcattctatagaagaaatgcaaactatcactgtattttaatatttgttattctctcatgaatagaaatttatgtagaagcaaacaaaatacttttacccacttaaaaagagaatataacattttatgtcactataatcttttgttttttaagttagtgtatattttgttgtgattatctttttgtggtgtgaataaatcttttatcttgaatgtaataagaatttggtggtgtcaattgcttatttgttttcccacggttgtccagcaattaataaaacataaccttttttactgcct

SEQ ID NO: 3783 - DNA, 1196 bp, Homo sapiens
  source 1..1196: mol_type = genomic DNA
agcagcaggaggaggcagagcacagcatcgtcgggaccagactcgtctcaggccagttgcagccttctcagccaaacgccgaccaaggaaaactcactaccatgagaattgcagtgatttgcttttgcctcctaggcatcacctgtgccataccagttaaacaggctgattctggaagttctgaggaaaagcagaatgctgtgtcctctgaagaaaccaatgactttaaacaagagacccttccaagtaagtccaacgaaagccatgaccacatggatgatatggatgatgaagatgatgatgaccatgtggacagccaggactccattgactcgaacgactctgatgatgtagatgacactgatgattctcaccagtctgatgagtctcaccattctgatgaatctgatgaactggtcactgattttcccacggacctgccagcaaccgaagttttcactccagttgtccccacagtagacacatatgatggccgaggtgatagtgtggtttatggactgaggtcaaaatctaagaagtttcgcagacctgacatccagtaccctgatgctacagacgaggacatcacctcacacatggaaagcgaggagttgaatggtgcatacaaggccatccccgttgcccaggacctgaacgcgccttctgattgggacagccgtgggaaggacagttatgaaacgagtcagctggatgaccagagtgctgaaacccacagccacaagcagtccagattatataagcggaaagccaatgatgagagcaatgagcattccgatgtgattgatagtcaggaactttccaaagtcagccgtgaattccacagccatgaatttcacagccatgaagatatgctggttgtagaccccaaaagtaaggaagaagataaacacctgaaatttcgtatttctcatgaattagatagtgcatcttctgaggtcaattaaaaggagaaaaaatacaatttctcactttgcatttagtcaaaagaaaaaatgctttatagcaaaatgaaagagaacatgaaatgcttctttctcagtttattggttgaatgtgtatctatttgagtctggaaataactaatgtgtttgataattagtttagtttgtggcttcatggaaactccctgtaaactaaaagcttcagggttatgtctatgttcattctatagaaga

SEQ ID NO: 3784 - DNA, 1473 bp, Homo sapiens
  source 1..1473: mol_type = genomic DNA
aattctgggagggcttggttgtcagcagcagcaggaggaggcagagcacagcatcgtcgggaccagactcgtctcaggccagttgcagccttctcagccaaacgccgaccaaggaaaactcactaccatgagaattgcagtgatttgcttttgcctcctaggcatcacctgtgccataccagttaaacaggctgattctggaagttctgaggaaaagcagctttacaacaaatacccagatgctgtggccacatggctaaaccctgacccatctcagaagcagaatctcctagccccacagaatgctgtgtcctctgaagaaaccaatgactttaaacaagagacccttccaagtaagtccaacgaaagccatgaccacatggatgatatggatgatgaagatgatgatgaccatgtggacagccaggactccattgactcgaacgactctgatgatgtagatgacactgatgattctcaccagtctgatgagtctcaccattctgatgaatctgatgaactggtcactgattttcccacggacctgccagcaaccgaagttttcactccagttgtccccacagtagacacatatgatggccgaggtgatagtgtggtttatggactgaggtcaaaatctaagaagtttcgcagacctgacatccagtaccctgatgctacagacgaggacatcacctcacacatggaaagcgaggagttgaatggtgcatacaaggccatccccgttgcccaggacctgaacgcgccttctgattgggacagccgtgggaaggacagttatgaaacgagtcagctggatgaccagagtgctgaaacccacagccacaagcagtccagattatataagcggaaagccaatgatgagagcaatgagcattccgatgtgattgatagtcaggaactttccaaagtcagccgtgaattccacagccatgaatttcacagccatgaagatatgctggttgtagaccccaaaagtaaggaagaagataaacacctgaaatttcgtatttctcatgaattagatagtgcatcttctgaggtcaattaaaaggagaaaaaatacaatttctcactttgcatttagtcaaaagaaaaaatgctttatagcaaaatgaaagagaacatgaaatgcttctttctcagtttattggttgaatgtgtatctatttgagtctggaaataactaatgtgtttgataattagtttagtttgtggcttcatggaaactccctgtaaactaaaagcttcagggttatgtctatgttcattctatagaagaaatgcaaactatcactgtattttaatatttgttattctctcatgaatagaaatttatgtagaagcaaacaaaatacttttacccacttaaaaagagaatataacattttatgtcactataatcttttgttttttaagttagtgtatattttgttgtgattatctttttgt

SEQ ID NO: 3785 - DNA, 1501 bp, Homo sapiens
  source 1..1501: mol_type = genomic DNA
ctccctgtgttggtggaggatgtctgcagcagcatttaaattctgggagggcttggttgtcagcagcagcaggaggaggcagagcacagcatcgtcgggaccagactcgtctcaggccagttgcagccttctcagccaaacgccgaccaaggaaaactcactaccatgagaattgcagtgatttgcttttgcctcctaggcatcacctgtgccataccagttaaacaggctgattctggaagttctgaggaaaagcagacccttccaagtaagtccaacgaaagccatgaccacatggatgatatggatgatgaagatgatgatgaccatgtggacagccaggactccattgactcgaacgactctgatgatgtagatgacactgatgattctcaccagtctgatgagtctcaccattctgatgaatctgatgaactggtcactgattttcccacggacctgccagcaaccgaagttttcactccagttgtccccacagtagacacatatgatggccgaggtgatagtgtggtttatggactgaggtcaaaatctaagaagtttcgcagacctgacatccagtaccctgatgctacagacgaggacatcacctcacacatggaaagcgaggagttgaatggtgcatacaaggccatccccgttgcccaggacctgaacgcgccttctgattgggacagccgtgggaaggacagttatgaaacgagtcagctggatgaccagagtgctgaaacccacagccacaagcagtccagattatataagcggaaagccaatgatgagagcaatgagcattccgatgtgattgatagtcaggaactttccaaagtcagccgtgaattccacagccatgaatttcacagccatgaagatatgctggttgtagaccccaaaagtaaggaagaagataaacacctgaaatttcgtatttctcatgaattagatagtgcatcttctgaggtcaattaaaaggagaaaaaatacaatttctcactttgcatttagtcaaaagaaaaaatgctttatagcaaaatgaaagagaacatgaaatgcttctttctcagtttattggttgaatgtgtatctatttgagtctggaaataactaatgtgtttgataattagtttagtttgtggcttcatggaaactccctgtaaactaaaagcttcagggttatgtctatgttcattctatagaagaaatgcaaactatcactgtattttaatatttgttattctctcatgaatagaaatttatgtagaagcaaacaaaatacttttacccacttaaaaagagaatataacattttatgtcactataatcttttgttttttaagttagtgtatattttgttgtgattatctttttgtggtgtgaataaatcttttatcttgaatgtaataagaatttggtggtgtcaattgcttatttgttttcccacggttgtccagcaattaataaaacataaccttttttactgcct

SEQ ID NO: 3786 - DNA, 3701 bp, Homo sapiens
  source 1..3701: mol_type = genomic DNA
taggcagcagccccggaacagatgaggcaggcagggttgggacgtttggtcaggacagcccaccgcaaaaagaggaggaaagaaatgaaagacagagacagctttggctatgggagaaggaggaggccgggggaaggaggagacaggaggaggagggaccacggggtggaggggagatagacccagcccagagctctgagtggtttcctgttgcctgtctctaaacccctccacattcccgcggtccttcagactgcccggagagcgcgctctgcctgccgcctgcctgcctgccactgagggttcccagcaccatgagggcctggatcttctttctcctttgcctggccgggagggccttggcagcccctcagcaagaagccctgcctgatgagacagaggtggtggaagaaactgtggcagaggtgactgaggtatctgtgggagctaatcctgtccaggtggaagtaggagaatttgatgatggtgcagaggaaaccgaagaggaggtggtggcggaaaatccctgccagaaccaccactgcaaacacggcaaggtgtgcgagctggatgagaacaacacccccatgtgcgtgtgccaggaccccaccagctgcccagcccccattggcgagtttgagaaggtgtgcagcaatgacaacaagaccttcgactcttcctgccacttctttgccacaaagtgcaccctggagggcaccaagaagggccacaagctccacctggactacatcgggccttgcaaatacatccccccttgcctggactctgagctgaccgaattccccctgcgcatgcgggactggctcaagaacgtcctggtcaccctgtatgagagggatgaggacaacaaccttctgactgagaagcagaagctgcgggtgaagaagatccatgagaatgagaagcgcctggaggcaggagaccaccccgtggagctgctggcccgggacttcgagaagaactataacatgtacatcttccctgtacactggcagttcggccagctggaccagcaccccattgacgggtacctctcccacaccgagctggctccactgcgtgctcccctcatccccatggagcattgcaccacccgctttttcgagacctgtgacctggacaatgacaagtacatcgccctggatgagtgggccggctgcttcggcatcaagcagaaggatatcgacaaggatcttgtgatctaaatccactccttccacagtaccggattctctctttaaccctccccttcgtgtttcccccaatgtttaaaatgtttggatggtttgttgttctgcctggagacaaggtgctaacatagatttaagtgaatacattaacggtgctaaaaatgaaaattctaacccaagacatgacattcttagctgtaacttaactattaaggccttttccacacgcattaatagtcccatttttctcttgccatttgtagctttgcccattgtcttattggcacatgggtggacacggatctgctgggctctgccttaaacacacattgcagcttcaacttttctctttagtgttctgtttgaaactaatacttaccgagtcagactttgtgttcatttcatttcagggtcttggctgcctgtgggcttccccaggtggcctggaggtgggcaaagggaagtaacagacacacgatgttgtcaaggatggttttgggactagaggctcagtggtgggagagatccctgcagaacccaccaaccagaacgtggtttgcctgaggctgtaactgagagaaagattctggggctgtgttatgaaaatatagacattctcacataagcccagttcatcaccatttcctcctttacctttcagtgcagtttcttttcacattaggctgttggttcaaacttttgggagcacggactgtcagttctctgggaagtggtcagcgcatcctgcagggcttctcctcctctgtcttttggagaaccagggctcttctcaggggctctagggactgccaggctgtttcagccaggaaggccaaaatcaagagtgagatgtagaaagttgtaaaatagaaaaagtggagttggtgaatcggttgttctttcctcacatttggatgattgtcataaggtttttagcatgttcctccttttcttcaccctccccttttttcttctattaatcaagagaaacttcaaagttaatgggatggtcggatctcacaggctgagaactcgttcacctccaagcatttcatgaaaaagctgcttcttattaatcatacaaactctcaccatgatgtgaagagtttcacaaatccttcaaaataaaaagtaatgacttagaaactgccttcctgggtgatttgcatgtgtcttagtcttagtcaccttattatcctgacacaaaaacacatgagcatacatgtctacacatgactacacaaatgcaaacctttgcaaacacattatgcttttgcacacacacacctgtacacacacaccggcatgtttatacacagggagtgtatggttcctgtaagcactaagttagctgttttcatttaatgacctgtggtttaacccttttgatcactaccaccattatcagcaccagactgagcagctatatccttttattaatcatggtcattcattcattcattcattcacaaaatatttatgatgtatttactctgcaccaggtcccatgccaagcactggggacacagttatggcaaagtagacaaagcatttgttcatttggagcttagagtccaggaggaatacattagataatgacacaatcaaatataaattgcaagatgtcacaggtgtgatgaagggagagtaggagagaccatgagtatgtgtaacaggaggacacagcattattctagtgctgtactgttccgtacggcagccactacccacatgtaactttttaagatttaaatttaaattagttaacattcaaaacgcagctccccaatcacactagcaacatttcaagtgcttgagagccatgcatgattagtggttaccctattgaataggtcagaagtagaatcttttcatcatcacagaaagttctattggacagtgctcttctagatcatcataagactacagagcacttttcaaagctcatgcatgttcatcatgttagtgtcgtattttgagctggggttttgagactccccttagagatagagaaacagacccaagaaatgtgctcaattgcaatgggccacatacctagatctccagatgtcatttcccctctcttattttaagttatgttaagattactaaaacaataaaagctcctaaaaaatcaaactgtattctggtgttctcttctacacagtgggagggcgagcagtaggagagattggcccatttggtgctggccatttgaggaatgcaagcccagcactagtctcataatctctaggaatctgtagagagaggaattgaagtaaatttcagcattggctcattcagtcattcggcgacattcatcaggtacctgcaatgtgttaggggatcttatgagtaggcagcgtgcgtgatccttgctcccctggagctttctaacattctagcaggcagaccacacataaatttgcaatactgtttctgataaaaacgtgctgtaaaggaaataaagcagagaactatcatggaaaa

SEQ ID NO: 3787 - DNA, 497 bp, Homo sapiens
  source 1..497: mol_type = genomic DNA
gtttcctgttgcctgtctctaaacccctccacattcccgcggtccttcagactgcccggagagcgcgctctgcctgccgcctgcctgcctgccactgaggccttggtcttctcatctgtactattgggcagaaatatgtgacttgagcccccagtggggtgctggattatgaaaacaccctgaaaatgataaatgtatgcatcatcacagactaaagaaatacaaaggagggagtttttgtttaatattggtcatttatatgaagggaatttaaattttcgccaggcacgctacacctaggtttgattggcaaaggatcacagctggttcccagcaccatgagggcctggatcttctttctcctttgcctggccgggagggccttggcagcccctcagcaagaagccctgcctgatgagacagaggtggtggaagaaactgtggcagaggtgactgaggtatctgtgggagctaatcctgtccaggtggaagtagga

SEQ ID NO: 3788 - DNA, 511 bp, Homo sapiens
  source 1..511: mol_type = genomic DNA
agctatcagctgccacatcgacatagcctagagcaaagagggggagggaggagaagaagggggttgcctggagaaggaatcaacttttgaaactttctccaagtcccacccaccagaaggctcttctctgcctgactcactctccgaggaatgcgagttgccacgggttcccagcaccatgagggcctggatcttctttctcctttgcctggccgggagggccttggcagcccctcagcaagaagccctgcctgatgagacagaggtggtggaagaaactgtggcagaggtgactgaggtatctgtgggagctaatcctgtccaggtggaagtaggagaatttgatgatggtgcagaggaaaccgaagaggaggtggtggcggaaaatccctgccagaaccaccactgcaaacacggcaaggtgtgcgagctggatgagaacaacacccccatgtgcgtgtgccaggaccccaccagctgcccagcccccattggcgagtttgagaaggtg

SEQ ID NO: 3789 - DNA, 441 bp, Homo sapiens
  source 1..441: mol_type = genomic DNA
actagcccaccagactcagagacggaaccagagacgggccagagcatccccctcctccaccatgaaactcgctgtcaccctcaccctggtcacactggctctctgctgcagctccgcttctgcagagatctgcccgagctttcagcgtgtcatcgaaaccctcctcatggacacaccctccagttatgaggctgccatggaacttttcagccctgatcaagacatgagggaggcaggggctcagctgaagaagctggtggacaccctcccccaaaagcccagagaaagcatcattaagctcatggaaaaaatagcccaaagctcactgtgtaattagcatttagaagctgaagatccccaactgctccagcctctgccgctgccatgctttgagtccacgcccaccagccttgctctcttcaataaaccacaagcatctca

SEQ ID NO: 3790 - DNA, 1638 bp, Homo sapiens
  source 1..1638: mol_type = genomic DNA
cggcggtgctgcgaggtcggcgcgcagctccgccgcgggtcgctcgggcgctgtccaggcggagccggccccgcccgggctgcagccatgatcaagcgtttcctggaggacaccacggatgatggagaactgagcaagttcgtgaaggatttctcaggaaatgcgagctgccacccaccagaggctaagacctgggcatccaggccccaagtcccggagccaaggccccaggccccggacctctatgatgatgacctggagttcagacccccctcgcggccccagtcctctgacaaccagcagtacttctgtgccccagcccctctcagcccatctgccaggccccgcagcccatggggcaagcttgatccctatgattcctctgaggatgacaaggagtatgtgggctttgcaaccctccccaaccaagtccaccgaaagtccgtgaagaaaggctttgactttaccctcatggtggcaggagagtctggcctgggcaaatccacacttgtcaatagcctcttcctcactgatctgtaccgggaccggaaacttcttggtgctgaagagaggatcatgcaaactgtggagatcactaagcatgcagtggacatagaagagaagggtgtgaggctgcggctcaccattgtggacacaccaggttttggggatgcagtcaacaacacagagtgctggaagcctgtggcagaatacattgatcagcagtttgagcagtatttccgagacgagagtggcctgaaccgaaagaacatccaagacaacagggtgcactgctgcctgtacttcatctcacccttcggccatgggctccggccattggatgttgaattcatgaaggccctgcatcagcgggtcaacatcgtgcctatcctggctaaggcagacacactgacacctcccgaagtggaccacaagaaacgcaaaatccgggaggagattgagcattttggaatcaagatctatcaattcccagactgtgactctgatgaggatgaggacttcaaattgcaggaccaagccctaaaggaaagcatcccatttgcagtaattggcagcaacactgtagtagaggccagagggcggcgagttcggggtcgactctacccctggggcatcgtggaagtggaaaacccagggcactgcgactttgtgaagctgaggacaatgctggtacgtacccacatgcaggacctgaaggatgtgacacgggagacacattatgagaactaccgggcacagtgcatccagagcatgacccgcctggtggtgaaggaacggaatcgcaacaaactgactcgggaaagtggtaccgacttccccatccctgctgtcccaccagggacagatccagaaactgagaagcttatccgagagaaagatgaggagctgcggcggatgcaggagatgctacacaaaatacaaaaacagatgaaggagaactattaactggctttcagccctggatatttaaatctcctcctcttcttcctgtccatgccggcccctcccagcaccagctctgctcaggccccttcagctactgccacttcgccttacatccctgctgactgcccagagactcagaggaaataaagtttaataaatctgtaggtggct

SEQ ID NO: 3791 - DNA, 1736 bp, Homo sapiens
  source 1..1736: mol_type = genomic DNA
gaaaggagcaagccaggaagccagacaacaacagcatcaaaacaaggctgtttctgtgtgtgaggaactttgcctgggagataaaattagacctagagctttctgacagggagtctgaagcgtgggacatggaccgttcactgggatggcaagggaattctgtccctgaggacaggactgaagctgggatcaagcgtttcctggaggacaccacggatgatggagaactgagcaagttcgtgaaggatttctcaggaaatgcgagctgccacccaccagaggctaagacctgggcatccaggccccaagtcccggagccaaggccccaggccccggacctctatgatgatgacctggagttcagacccccctcgcggccccagtcctctgacaaccagcagtacttctgtgccccagcccctctcagcccatctgccaggccccgcagcccatggggcaagcttgatccctatgattcctctgaggatgacaaggagtatgtgggctttgcaaccctccccaaccaagtccaccgaaagtccgtgaagaaaggctttgactttaccctcatggtggcaggagagtctggcctgggcaaatccacacttgtcaatagcctcttcctcactgatctgtaccgggaccggaaacttcttggtgctgaagagaggatcatgcaaactgtggagatcactaagcatgcagtggacatagaagagaagggtgtgaggctgcggctcaccattgtggacacaccaggttttggggatgcagtcaacaacacagagtgctggaagcctgtggcagaatacattgatcagcagtttgagcagtatttccgagacgagagtggcctgaaccgaaagaacatccaagacaacagggtgcactgctgcctgtacttcatctcacccttcggccatgggctccggccattggatgttgaattcatgaaggccctgcatcagcgggtcaacatcgtgcctatcctggctaaggcagacacactgacacctcccgaagtggaccacaagaaacgcaaaatccgggaggagattgagcattttggaatcaagatctatcaattcccagactgtgactctgatgaggatgaggacttcaaattgcaggaccaagccctaaaggaaagcatcccatttgcagtaattggcagcaacactgtagtagaggccagagggcggcgagttcggggtcgactctacccctggggcatcgtggaagtggaaaacccagggcactgcgactttgtgaagctgaggacaatgctggtacgtacccacatgcaggacctgaaggatgtgacacgggagacacattatgagaactaccgggcacagtgcatccagagcatgacccgcctggtggtgaaggaacggaatcgcaacaaactgactcgggaaagtggtaccgacttccccatccctgctgtcccaccagggacagatccagaaactgagaagcttatccgagagaaagatgaggagctgcggcggatgcaggagatgctacacaaaatacaaaaacagatgaaggagaactattaactggctttcagccctggatatttaaatctcctcctcttcttcctgtccatgccggcccctcccagcaccagctctgctcaggccccttcagctactgccacttcgccttacatccctgctgactgcccagagactcagaggaaataaagtttaataaatctgtaggtggct

SEQ ID NO: 3792 - DNA, 1551 bp, Homo sapiens
  source 1..1551: mol_type = genomic DNA
atgatcaagcgtttcctggaggacaccacggatgatggagaactgagcaagttcgtgaaggatttctcaggaaatgcgagctgccacccaccagaggctaagacctgggcatccaggccccaagtcccggagccaaggccccaggccccggacctctatgatgatgacctggagttcagacccccctcgcggccccagtcctctgacaaccagcagtacttctgtgccccagcccctctcagcccatctgccaggccccgcagcccatggggcaagcttgatccctatgattcctctgaggatgacaaggagtatgtgggctttgcaaccctccccaaccaagtccaccgaaagtccgtgaagaaaggctttgactttaccctcatggtggcaggagagtctggcctgggcaaatccacacttgtcaatagcctcttcctcactgatctgtaccgggaccggaaacttcttggtgctgaagagaggatcatgcaaactgtggagatcactaagcatgcagtggacatagaagagaagggtgtgaggctgcggctcaccattgtggacacaccaggttttggggatgcagtcaacaacacagagtgctggaagcctgtggcagaatacattgatcagcagtttgagcagtatttccgagacgagagtggcctgaaccgaaagaacatccaagacaacagggtgcactgctgcctgtacttcatctcacccttcggccatgggctccggccattggatgttgaattcatgaaggccctgcatcagcgggtcaacatcgtgcctatcctggctaaggcagacacactgacacctcccgaagtggaccacaagaaacgcaaaatccgggaggagattgagcattttggaatcaagatctatcaattcccagactgtgactctgatgaggatgaggacttcaaattgcaggaccaagccctaaaggaaagcatcccatttgcagtaattggcagcaacactgtagtagaggccagagggcggcgagttcggggtcgactctacccctggggcatcgtggaagtggaaaacccagggcactgcgactttgtgaagctgaggacaatgctggtacgtacccacatgcaggacctgaaggatgtgacacgggagacacattatgagaactaccgggcacagtgcatccagagcatgacccgcctggtggtgaaggaacggaatcgcaacaaactgactcgggaaagtggtaccgacttccccatccctgctgtcccaccagggacagatccagaaactgagaagcttatccgagagaaagatgaggagctgcggcggatgcaggagatgctacacaaaatacaaaaacagatgaaggagaactattaactggctttcagccctggatatttaaatctcctcctcttcttcctgtccatgccggcccctcccagcaccagctctgctcaggccccttcagctactgccacttcgccttacatccctgctgactgcccagagactcagaggaaataaagtttaataaatctgtaggtggct

SEQ ID NO: 3793 - DNA, 1584 bp, Homo sapiens
  source 1..1584: mol_type = genomic DNA
atgcctggcttctactctgttatgacagatgaggagatcaagcgtttcctggaggacaccacggatgatggagaactgagcaagttcgtgaaggatttctcaggaaatgcgagctgccacccaccagaggctaagacctgggcatccaggccccaagtcccggagccaaggccccaggccccggacctctatgatgatgacctggagttcagacccccctcgcggccccagtcctctgacaaccagcagtacttctgtgccccagcccctctcagcccatctgccaggccccgcagcccatggggcaagcttgatccctatgattcctctgaggatgacaaggagtatgtgggctttgcaaccctccccaaccaagtccaccgaaagtccgtgaagaaaggctttgactttaccctcatggtggcaggagagtctggcctgggcaaatccacacttgtcaatagcctcttcctcactgatctgtaccgggaccggaaacttcttggtgctgaagagaggatcatgcaaactgtggagatcactaagcatgcagtggacatagaagagaagggtgtgaggctgcggctcaccattgtggacacaccaggttttggggatgcagtcaacaacacagagtgctggaagcctgtggcagaatacattgatcagcagtttgagcagtatttccgagacgagagtggcctgaaccgaaagaacatccaagacaacagggtgcactgctgcctgtacttcatctcacccttcggccatgggctccggccattggatgttgaattcatgaaggccctgcatcagcgggtcaacatcgtgcctatcctggctaaggcagacacactgacacctcccgaagtggaccacaagaaacgcaaaatccgggaggagattgagcattttggaatcaagatctatcaattcccagactgtgactctgatgaggatgaggacttcaaattgcaggaccaagccctaaaggaaagcatcccatttgcagtaattggcagcaacactgtagtagaggccagagggcggcgagttcggggtcgactctacccctggggcatcgtggaagtggaaaacccagggcactgcgactttgtgaagctgaggacaatgctggtacgtacccacatgcaggacctgaaggatgtgacacgggagacacattatgagaactaccgggcacagtgcatccagagcatgacccgcctggtggtgaaggaacggaatcgcaacaaactgactcgggaaagtggtaccgacttccccatccctgctgtcccaccagggacagatccagaaactgagaagcttatccgagagaaagatgaggagctgcggcggatgcaggagatgctacacaaaatacaaaaacagatgaaggagaactattaactggctttcagccctggatatttaaatctcctcctcttcttcctgtccatgccggcccctcccagcaccagctctgctcaggccccttcagctactgccacttcgccttacatccctgctgactgcccagagactcagaggaaataaagtttaataaatctgtaggtggct

SEQ ID NO: 3794 - DNA, 1906 bp, Homo sapiens
  source 1..1906: mol_type = genomic DNA
cggcggtgctgcgaggtcggcgcgcagctccgccgcgggtcgctcgggcgctgtccaggcggagccggccccgcccgggctgcagccatgatcaagcgtttcctggaggacaccacggatgatggagaactgagcaagttcgtgaaggatttctcaggaaatgcgagctgccacccaccagaggctaagacctgggcatccaggccccaagtcccggagccaaggccccaggccccggacctctatgatgatgacctggagttcagacccccctcgcggccccagtcctctgacaaccagcagtacttctgtgccccagcccctctcagcccatctgccaggccccgcagcccatggggcaagcttgatccctatgattcctctgaggatgacaaggagtatgtgggctttgcaaccctccccaaccaagtccaccgaaagtccgtgaagaaaggctttgactttaccctcatggtggcaggagagtctggcctgggcaaatccacacttgtcaatagcctcttcctcactgatctgtaccgggaccggaaacttcttggtgctgaagagaggatcatgcaaactgtggagatcactaagcatgcagtggacatagaagagaagggtgtgaggctgcggctcaccattgtggacacaccaggttttggggatgcagtcaacaacacagagtgctggaagcctgtggcagaatacattgatcagcagtttgagcagtatttccgagacgagagtggcctgaaccgaaagaacatccaagacaacagggtgcactgctgcctgtacttcatctcacccttcggccatgggtatggtccaagcctgaggctcctggcaccaccgggtgctgtcaagggaacaggccaagagcaccaggggcagggctgccactagcaggtggtcacaggttcctgttccccaggctccggccattggatgttgaattcatgaaggccctgcatcagcgggtcaacatcgtgcctatcctggctaaggcagacacactgacacctcccgaagtggaccacaagaaacgcaaaatccgggaggagattgagcattttggaatcaagatctatcaattcccagactgtgactctgatgaggatgaggacttcaaattgcaggaccaagccctaaaggaaagcatcccatttgcagtaattggcagcaacactgtagtagaggccagagggcggcgagttcggggtcgactctacccctggggcatcgtggaagtggaaaacccagggcactgcgactttgtgaagctgaggacaatgctggtacgtacccacatgcaggacctgaaggatgtgacacgggagacacattatgagaactaccgggcacagtgcatccagagcatgacccgcctggtggtgaaggaacggaatcgcaagtatgaccagaagccaggacaaagctggcagggggagatcccaagcctagccttgggtgagaccaagccctacttttgttcttctataggccctgggctcaatctaagcgggtgctggggtcctcctcgccttatcaacccttttctccctttagcaaactgactcgggaaagtggtaccgacttccccatccctgctgtcccaccagggacagatccagaaactgagaagcttatccgagagaaagatgaggagctgcggcggatgcaggagatgctacacaaaatacaaaaacagatgaaggagaactattaactggctttcagccctggatatttaaatctcctcctcttcttcctgtccatgccggcccctcccagcaccagctctgctcaggccccttcagctactgccacttcgccttacatccctgctgactgcccagagactcagaggaaataaagtttaataaatctgtaggtggct

SEQ ID NO: 3795 - DNA, 1650 bp, Homo sapiens
  source 1..1650: mol_type = genomic DNA
tacagctctccagccctgttcagcagcagagctgctccccagaagccaagaaaagaaggctcccaagcagctgggctgctggtcttctctgactctctggagatcaagcgtttcctggaggacaccacggatgatggagaactgagcaagttcgtgaaggatttctcaggaaatgcgagctgccacccaccagaggctaagacctgggcatccaggccccaagtcccggagccaaggccccaggccccggacctctatgatgatgacctggagttcagacccccctcgcggccccagtcctctgacaaccagcagtacttctgtgccccagcccctctcagcccatctgccaggccccgcagcccatggggcaagcttgatccctatgattcctctgaggatgacaaggagtatgtgggctttgcaaccctccccaaccaagtccaccgaaagtccgtgaagaaaggctttgactttaccctcatggtggcaggagagtctggcctgggcaaatccacacttgtcaatagcctcttcctcactgatctgtaccgggaccggaaacttcttggtgctgaagagaggatcatgcaaactgtggagatcactaagcatgcagtggacatagaagagaagggtgtgaggctgcggctcaccattgtggacacaccaggttttggggatgcagtcaacaacacagagtgctggaagcctgtggcagaatacattgatcagcagtttgagcagtatttccgagacgagagtggcctgaaccgaaagaacatccaagacaacagggtgcactgctgcctgtacttcatctcacccttcggccatgggctccggccattggatgttgaattcatgaaggccctgcatcagcgggtcaacatcgtgcctatcctggctaaggcagacacactgacacctcccgaagtggaccacaagaaacgcaaaatccgggaggagattgagcattttggaatcaagatctatcaattcccagactgtgactctgatgaggatgaggacttcaaattgcaggaccaagccctaaaggaaagcatcccatttgcagtaattggcagcaacactgtagtagaggccagagggcggcgagttcggggtcgactctacccctggggcatcgtggaagtggaaaacccagggcactgcgactttgtgaagctgaggacaatgctggtacgtacccacatgcaggacctgaaggatgtgacacgggagacacattatgagaactaccgggcacagtgcatccagagcatgacccgcctggtggtgaaggaacggaatcgcaacaaactgactcgggaaagtggtaccgacttccccatccctgctgtcccaccagggacagatccagaaactgagaagcttatccgagagaaagatgaggagctgcggcggatgcaggagatgctacacaaaatacaaaaacagatgaaggagaactattaactggctttcagccctggatatttaaatctcctcctcttcttcctgtccatgccggcccctcccagcaccagctctgctcaggccccttcagctactgccacttcgccttacatccctgctgactgcccagagactcagaggaaataaagtttaataaatctgtaggtggct

SEQ ID NO: 3796 - DNA, 1709 bp, Homo sapiens
  source 1..1709: mol_type = genomic DNA
gacaatgagagttgggggaaacagttcctcttctgagctgaggatggggtagaacaggcttctacagaggagtcagtccattctctgccttccactccctgtgggtcatggttcaggccaggccctctcgtgcactgccggctctgggcagaggggatcaagcgtttcctggaggacaccacggatgatggagaactgagcaagttcgtgaaggatttctcaggaaatgcgagctgccacccaccagaggctaagacctgggcatccaggccccaagtcccggagccaaggccccaggccccggacctctatgatgatgacctggagttcagacccccctcgcggccccagtcctctgacaaccagcagtacttctgtgccccagcccctctcagcccatctgccaggccccgcagcccatggggcaagcttgatccctatgattcctctgaggatgacaaggagtatgtgggctttgcaaccctccccaaccaagtccaccgaaagtccgtgaagaaaggctttgactttaccctcatggtggcaggagagtctggcctgggcaaatccacacttgtcaatagcctcttcctcactgatctgtaccgggaccggaaacttcttggtgctgaagagaggatcatgcaaactgtggagatcactaagcatgcagtggacatagaagagaagggtgtgaggctgcggctcaccattgtggacacaccaggttttggggatgcagtcaacaacacagagtgctggaagcctgtggcagaatacattgatcagcagtttgagcagtatttccgagacgagagtggcctgaaccgaaagaacatccaagacaacagggtgcactgctgcctgtacttcatctcacccttcggccatgggctccggccattggatgttgaattcatgaaggccctgcatcagcgggtcaacatcgtgcctatcctggctaaggcagacacactgacacctcccgaagtggaccacaagaaacgcaaaatccgggaggagattgagcattttggaatcaagatctatcaattcccagactgtgactctgatgaggatgaggacttcaaattgcaggaccaagccctaaaggaaagcatcccatttgcagtaattggcagcaacactgtagtagaggccagagggcggcgagttcggggtcgactctacccctggggcatcgtggaagtggaaaacccagggcactgcgactttgtgaagctgaggacaatgctggtacgtacccacatgcaggacctgaaggatgtgacacgggagacacattatgagaactaccgggcacagtgcatccagagcatgacccgcctggtggtgaaggaacggaatcgcaacaaactgactcgggaaagtggtaccgacttccccatccctgctgtcccaccagggacagatccagaaactgagaagcttatccgagagaaagatgaggagctgcggcggatgcaggagatgctacacaaaatacaaaaacagatgaaggagaactattaactggctttcagccctggatatttaaatctcctcctcttcttcctgtccatgccggcccctcccagcaccagctctgctcaggccccttcagctactgccacttcgccttacatccctgctgactgcccagagactcagaggaaataaagtttaataaatctgtaggtggcttctgg

SEQ ID NO: 3797 - DNA, 2516 bp, Homo sapiens
  source 1..2516: mol_type = genomic DNA
agcctcgtctgagggggcgggggacggaggagggagcgggagtcgagcgagagcctgtggaggagtccgcctgctgtagcgtgcgtaagcaaggcagctacgccgggcggctacgctgcggaatcggcgtaggcgcctttggagaatcggcgggctgcgctccgctggggctggtcgcggagggggggaggggatgtcggtcagtgcgagatccgctgctgctgaggagaggagcgtcaacagcagcaccatgggtcaacagaagaaccttgaaggctatgtgggatttgccaatctcccaaatcaagtatacagaaaatcggtgaagagaggttttgaattcacgcttatggtagtgggtgaatctggattgggaaagtcgacattaatcaactcattattcctcacagatttgtattctccagagtatccaggtccttctcatagaattaaaaagactgtacaggtggaacaatccaaagttttaatcaaagaaggtggtgttcagttgctgctcacaatagttgataccccaggatttggagatgcagtggataatagtaattgctggcagcctgttatcgactacattgatagtaaatttgaggactacctaaatgcagaatcacgagtgaacagacgtcagatgcctgataacagggtgcagtgttgtttatacttcattgctccttcaggacatggacttaaaccattggatattgagtttatgaagcgtttgcatgaaaaagtgaatatcatcccacttattgccaaagcagacacactcacaccagaggaatgccaacagtttaaaaaacagataatgaaagaaatccaagaacataaaattaaaatatacgaatttccagaaacagatgatgaagaagaaaataaacttgttaaaaagataaaggaccgtttacctcttgctgtggtaggtagtaatactatcattgaagttaatggcaaaagggtcagaggaaggcagtatccttggggtgttgctgaagttgaaaatggtgaacattgtgattttacaatcctaagaaatatgttgataagaacacacatgcaggacttgaaagatgttactaataatgtccactatgagaactacagaagcagaaaacttgcagctgtgacttataatggagttgataacaacaagaataaagggcagctgactaagagccctctggcacaaatggaagaagaaagaagggagcatgtagctaaaatgaagaagatggagatggagatggagcaggtgtttgagatgaaggtcaaagaaaaagttcaaaaactgaaggactctgaagctgagctccagcggcgccatgagcaaatgaaaaagaatttggaagcacagcacaaagaattggaggaaaaacgtcgtcagttcgaggatgagaaagcaaactgggaagctcaacaacgtattttagaacaacagaactcttcaagaaccttggaaaagaacaagaagaaagggaagatcttttaaactctctattgaccaccagttaacgtattagttgccaatatgccagcttggacatcagtgtttgttggatccgtttgaccaatttgcaccagttttatccataatgatggatttaacagcatgacaaaaattatttttttttttgttcttgatggagattaagatgccttgaattgtctagggtgttctgtacttagaaagtaagagctctaagtacctttcctacattttctttttttattaaacagatatcttcagtttaatgcaagagaacattttactgttgtacaatcatgttctggtggtttgattgtttacaggatattccaaaataaaaggactctggaagattttcattgaggataaattgccataatatgatgcaaactgtgcttctctatgataattacaatacaaaggttccattcagtgcagcatatacaataatgtaatttagtctaacacagttgaccctattttttgacacttccattgtttaaaaatacacatggaaaaaaaaaaaaccctatatgcttactgtgcacctagagcttttttataacaacgtctttttgtttgtttgttttggattctttaaatatatattattctcatttagtgccctctttagccagaatctcattactgcttcatttttgtaataacatttaatttagatattttccatatattggcactgctaaaatagaatatagcatctttcatatggtaggaaccaacaaggaaactttcctttaactccctttttacactttatggtaagtagcagggggggaaatgcatttatagatcatttctaggcaaaattgtgaagctaatgaccaacctgtttctacctatatgcagtctctttattttactagaaatgggaatcatggcctcttgaagagaaaaaagtcaccattctgcatttagctgtattcatatattgcatttctgtattttttgtttgtattgtaaaaaattcacataataaacgatgttgtgatgt

SEQ ID NO: 3798 - DNA, 2522 bp, Homo sapiens
  source 1..2522: mol_type = genomic DNA
agcctcgtctgagggggcgggggacggaggagggagcgggagtcgagcgagagcctgtggaggagtccgcctgctgtagcgtgcgtaagcaaggcagctacgccgggcggctacgctgcggaatcggcgtaggcgcctttggagaatcggcgggctgcgctccgctggggctggtcgcggagggggggaggggatgtcggtcagtgcgagatccgctgctgctgaggagaggagcgtcaacagcagcaccatggaggttgcccaacagaagaaccttgaaggctatgtgggatttgccaatctcccaaatcaagtatacagaaaatcggtgaagagaggttttgaattcacgcttatggtagtgggtgaatctggattgggaaagtcgacattaatcaactcattattcctcacagatttgtattctccagagtatccaggtccttctcatagaattaaaaagactgtacaggtggaacaatccaaagttttaatcaaagaaggtggtgttcagttgctgctcacaatagttgataccccaggatttggagatgcagtggataatagtaattgctggcagcctgttatcgactacattgatagtaaatttgaggactacctaaatgcagaatcacgagtgaacagacgtcagatgcctgataacagggtgcagtgttgtttatacttcattgctccttcaggacatggacttaaaccattggatattgagtttatgaagcgtttgcatgaaaaagtgaatatcatcccacttattgccaaagcagacacactcacaccagaggaatgccaacagtttaaaaaacagataatgaaagaaatccaagaacataaaattaaaatatacgaatttccagaaacagatgatgaagaagaaaataaacttgttaaaaagataaaggaccgtttacctcttgctgtggtaggtagtaatactatcattgaagttaatggcaaaagggtcagaggaaggcagtatccttggggtgttgctgaagttgaaaatggtgaacattgtgattttacaatcctaagaaatatgttgataagaacacacatgcaggacttgaaagatgttactaataatgtccactatgagaactacagaagcagaaaacttgcagctgtgacttataatggagttgataacaacaagaataaagggcagctgactaagagccctctggcacaaatggaagaagaaagaagggagcatgtagctaaaatgaagaagatggagatggagatggagcaggtgtttgagatgaaggtcaaagaaaaagttcaaaaactgaaggactctgaagctgagctccagcggcgccatgagcaaatgaaaaagaatttggaagcacagcacaaagaattggaggaaaaacgtcgtcagttcgaggatgagaaagcaaactgggaagctcaacaacgtattttagaacaacagaactcttcaagaaccttggaaaagaacaagaagaaagggaagatcttttaaactctctattgaccaccagttaacgtattagttgccaatatgccagcttggacatcagtgtttgttggatccgtttgaccaatttgcaccagttttatccataatgatggatttaacagcatgacaaaaattatttttttttttgttcttgatggagattaagatgccttgaattgtctagggtgttctgtacttagaaagtaagagctctaagtacctttcctacattttctttttttattaaacagatatcttcagtttaatgcaagagaacattttactgttgtacaatcatgttctggtggtttgattgtttacaggatattccaaaataaaaggactctggaagattttcattgaggataaattgccataatatgatgcaaactgtgcttctctatgataattacaatacaaaggttccattcagtgcagcatatacaataatgtaatttagtctaacacagttgaccctattttttgacacttccattgtttaaaaatacacatggaaaaaaaaaaaaccctatatgcttactgtgcacctagagcttttttataacaacgtctttttgtttgtttgttttggattctttaaatatatattattctcatttagtgccctctttagccagaatctcattactgcttcatttttgtaataacatttaatttagatattttccatatattggcactgctaaaatagaatatagcatctttcatatggtaggaaccaacaaggaaactttcctttaactccctttttacactttatggtaagtagcagggggggaaatgcatttatagatcatttctaggcaaaattgtgaagctaatgaccaacctgtttctacctatatgcagtctctttattttactagaaatgggaatcatggcctcttgaagagaaaaaagtcaccattctgcatttagctgtattcatatattgcatttctgtattttttgtttgtattgtaaaaaattcacataataaacgatgttgtgatgt

SEQ ID NO: 3799 - DNA, 2323 bp, Homo sapiens
  source 1..2323: mol_type = genomic DNA
atgtcggtcagtgcgagatccgctgctgctgaggagaggagcgtcaacagcagcaccatggtacaacagaagaaccttgaaggctatgtgggatttgccaatctcccaaatcaagtatacagaaaatcggtgaagagaggttttgaattcacgcttatggtagtgggtgaatctggattgggaaagtcgacattaatcaactcattattcctcacagatttgtattctccagagtatccaggtccttctcatagaattaaaaagactgtacaggtggaacaatccaaagttttaatcaaagaaggtggtgttcagttgctgctcacaatagttgataccccaggatttggagatgcagtggataatagtaattgctggcagcctgttatcgactacattgatagtaaatttgaggactacctaaatgcagaatcacgagtgaacagacgtcagatgcctgataacagggtgcagtgttgtttatacttcattgctccttcaggacatggacttaaaccattggatattgagtttatgaagcgtttgcatgaaaaagtgaatatcatcccacttattgccaaagcagacacactcacaccagaggaatgccaacagtttaaaaaacagataatgaaagaaatccaagaacataaaattaaaatatacgaatttccagaaacagatgatgaagaagaaaataaacttgttaaaaagataaaggaccgtttacctcttgctgtggtaggtagtaatactatcattgaagttaatggcaaaagggtcagaggaaggcagtatccttggggtgttgctgaagttgaaaatggtgaacattgtgattttacaatcctaagaaatatgttgataagaacacacatgcaggacttgaaagatgttactaataatgtccactatgagaactacagaagcagaaaacttgcagctgtgacttataatggagttgataacaacaagaataaagggcagctgactaagagccctctggcacaaatggaagaagaaagaagggagcatgtagctaaaatgaagaagatggagatggagatggagcaggtgtttgagatgaaggtcaaagaaaaagttcaaaaactgaaggactctgaagctgagctccagcggcgccatgagcaaatgaaaaagaatttggaagcacagcacaaagaattggaggaaaaacgtcgtcagttcgaggatgagaaagcaaactgggaagctcaacaacgtattttagaacaacagaactcttcaagaaccttggaaaagaacaagaagaaagggaagatcttttaaactctctattgaccaccagttaacgtattagttgccaatatgccagcttggacatcagtgtttgttggatccgtttgaccaatttgcaccagttttatccataatgatggatttaacagcatgacaaaaattatttttttttttgttcttgatggagattaagatgccttgaattgtctagggtgttctgtacttagaaagtaagagctctaagtacctttcctacattttctttttttattaaacagatatcttcagtttaatgcaagagaacattttactgttgtacaatcatgttctggtggtttgattgtttacaggatattccaaaataaaaggactctggaagattttcattgaggataaattgccataatatgatgcaaactgtgcttctctatgataattacaatacaaaggttccattcagtgcagcatatacaataatgtaatttagtctaacacagttgaccctattttttgacacttccattgtttaaaaatacacatggaaaaaaaaaaaaccctatatgcttactgtgcacctagagcttttttataacaacgtctttttgtttgtttgttttggattctttaaatatatattattctcatttagtgccctctttagccagaatctcattactgcttcatttttgtaataacatttaatttagatattttccatatattggcactgctaaaatagaatatagcatctttcatatggtaggaaccaacaaggaaactttcctttaactccctttttacactttatggtaagtagcagggggggaaatgcatttatagatcatttctaggcaaaattgtgaagctaatgaccaacctgtttctacctatatgcagtctctttattttactagaaatgggaatcatggcctcttgaagagaaaaaagtcaccattctgcatttagctgtattcatatattgcatttctgtattttttgtttgtattgtaaaaaattcacataataaacgatgttgtgatgt

SEQ ID NO: 3800 - DNA, 1362 bp, Homo sapiens
  source 1..1362: mol_type = genomic DNA
ggaatgccaacagtttaaaaaacagataatgaaagaaatccaagaacataaaattaaaatatacgaatttccagaaacagatgatgaagaagatggagatggagatggagcaggtgtttgagatgaaggtcaaagaaaaagttcaaaaactgaaggactctgaagctgagctccagcggcgccatgagcaaatgaaaaagaatttggaagcacagcacaaagaattggaggaaaaacgtcgtcagttcgaggatgagaaagcaaactgggaagctcaacaacgtattttagaacaacagaactcttcaagaaccttggaaaagaacaagaagaaagggaagatcttttaaactctctattgaccaccagttaacgtattagttgccaatatgccagcttggacatcagtgtttgttggatccgtttgaccaatttgcaccagttttatccataatgatggatttaacagcatgacaaaaattatttttttttttgttcttgatggagattaagatgccttgaattgtctagggtgttctgtacttagaaagtaagagctctaagtacctttcctacattttctttttttattaaacagatatcttcagtttaatgcaagagaacattttactgttgtacaatcatgttctggtggtttgattgtttacaggatattccaaaataaaaggactctggaagattttcattgaggataaattgccataatatgatgcaaactgtgcttctctatgataattacaatacaaaggttccattcagtgcagcatatacaataatgtaatttagtctaacacagttgaccctattttttgacacttccattgtttaaaaatacacatggaaaaaaaaaaaaccctatatgcttactgtgcacctagagcttttttataacaacgtctttttgtttgtttgttttggattctttaaatatatattattctcatttagtgccctctttagccagaatctcattactgcttcatttttgtaataacatttaatttagatattttccatatattggcactgctaaaatagaatatagcatctttcatatggtaggaaccaacaaggaaactttcctttaactccctttttacactttatggtaagtagcagggggggaaatgcatttatagatcatttctaggcaaaattgtgaagctaatgaccaacctgtttctacctatatgcagtctctttattttactagaaatgggaatcatggcctcttgaagagaaaaaagtcaccattctgcatttagctgtattcatatattgcatttctgtattttttgtttgtattgtaaaaaattcacataataaacgatgttgtgatgt

SEQ ID NO: 3801 - DNA, 2601 bp, Homo sapiens
  source 1..2601: mol_type = genomic DNA
aagtcatgctcgaaatggagcgaggcggcggagctggggaggcggtaatctcgcgagatggaagccagcctccgctaggcccggaagcctcgtctgagggggcgggggacggaggagggagcgggagtcgagcgagagcctgtggaggagtccgcctgctgtagcgtgcgtaagcaaggcagctacgccgggcggctacgctgcggaatcggcgtaggcgcctttggagaatcggcgggctgcgctccgctggggctggtcgcggagggggggaggggatgtcggtcagtgcgagatccgctgctgctgaggagaggagcgtcaacagcagcaccatggcaacagaagaaccttgaaggctatgtgggatttgccaatctcccaaatcaagtatacagaaaatcggtgaagagaggttttgaattcacgcttatggtagtgggtgaatctggattgggaaagtcgacattaatcaactcattattcctcacagatttgtattctccagagtatccaggtccttctcatagaattaaaaagactgtacaggtggaacaatccaaagttttaatcaaagaaggtggtgttcagttgctgctcacaatagttgataccccaggatttggagatgcagtggataatagtaattgctggcagcctgttatcgactacattgatagtaaatttgaggactacctaaatgcagaatcacgagtgaacagacgtcagatgcctgataacagggtgcagtgttgtttatacttcattgctccttcaggacatggacttaaaccattggatattgagtttatgaagcgtttgcatgaaaaagtgaatatcatcccacttattgccaaagcagacacactcacaccagaggaatgccaacagtttaaaaaacagataatgaaagaaatccaagaacataaaattaaaatatacgaatttccagaaacagatgatgaagaagaaaataaacttgttaaaaagataaaggaccgtttacctcttgctgtggtaggtagtaatactatcattgaagttaatggcaaaagggtcagaggaaggcagtatccttggggtgttgctgaagttgaaaatggtgaacattgtgattttacaatcctaagaaatatgttgataagaacacacatgcaggacttgaaagatgttactaataatgtccactatgagaactacagaagcagaaaacttgcagctgtgacttataatggagttgataacaacaagaataaagggcagctgactaagagccctctggcacaaatggaagaagaaagaagggagcatgtagctaaaatgaagaagatggagatggagatggagcaggtgtttgagatgaaggtcaaagaaaaagttcaaaaactgaaggactctgaagctgagctccagcggcgccatgagcaaatgaaaaagaatttggaagcacagcacaaagaattggaggaaaaacgtcgtcagttcgaggatgagaaagcaaactgggaagctcaacaacgtattttagaacaacagaactcttcaagaaccttggaaaagaacaagaagaaagggaagatcttttaaactctctattgaccaccagttaacgtattagttgccaatatgccagcttggacatcagtgtttgttggatccgtttgaccaatttgcaccagttttatccataatgatggatttaacagcatgacaaaaattatttttttttttgttcttgatggagattaagatgccttgaattgtctagggtgttctgtacttagaaagtaagagctctaagtacctttcctacattttctttttttattaaacagatatcttcagtttaatgcaagagaacattttactgttgtacaatcatgttctggtggtttgattgtttacaggatattccaaaataaaaggactctggaagattttcattgaggataaattgccataatatgatgcaaactgtgcttctctatgataattacaatacaaaggttccattcagtgcagcatatacaataatgtaatttagtctaacacagttgaccctattttttgacacttccattgtttaaaaatacacatggaaaaaaaaaaaaccctatatgcttactgtgcacctagagcttttttataacaacgtctttttgtttgtttgttttggattctttaaatatatattattctcatttagtgccctctttagccagaatctcattactgcttcatttttgtaataacatttaatttagatattttccatatattggcactgctaaaatagaatatagcatctttcatatggtaggaaccaacaaggaaactttcctttaactccctttttacactttatggtaagtagcagggggggaaatgcatttatagatcatttctaggcaaaattgtgaagctaatgaccaacctgtttctacctatatgcagtctctttattttactagaaatgggaatcatggcctcttgaagagaaaaaagtcaccattctgcatttagctgtattcatatattgcatttctgtattttttgtttgtattgtaaaaaattcacataataaacgatgttgtgatgtaa

SEQ ID NO: 3802 - DNA, 898 bp, Homo sapiens
  source 1..898: mol_type = genomic DNA
agcctcgtctgagggggcgggggacggaggagggagcgggagtcgagcgagagcctgtggaggagtccgcctgctgtagcgtgcgtaagcaaggcagctacgccgggcggctacgctgcggaatcggcgtaggcgcctttggagaatcggcgggctgcgctccgctggggctggtcgcggagggggggaggggatgtcggtcagtgcgagatccgctgctgctgaggagaggagcgtcaacagcagcaccatggggcaacagaagaaccttgaaggctatgtgggatttgccaatctcccaaatcaagtatacagaaaatcggtgaagagaggttttgaattcacgcttatggtagtgggtgaatctggattgggaaagtcgacattaatcaactcattattcctcacagatttgtattctccagagtatccaggtccttctcatagaattaaaaagactgtacaggtggaacaatccaaagttttaatcaaagaaggtggtgttcagttgctgctcacaatagttgataccccaggatttggagatgcagtggataatagtaattgctggcagcctgttatcgactacattgatagtaaatttgaggactacctaaatgcagaatcacgagtgaacagacgtcagatgcctgataacagggtgcagtgttgtttatacttcattgctccttcaggacatggacttaaaccattggatattgagtttatgaagcgtttgcatgaaaaagtgaatatcatcccacttattgccaaagcagacacactcacaccagaggaatgccaacagtttaaaaaacagataatgaaagaaatccaagaacataaaattaaaatatacgaatttccagaaacagcaaaaaaaaaaaaaaaaaaaaaa

SEQ ID NO: 3803 - DNA, 1464 bp, Homo sapiens
  source 1..1464: mol_type = genomic DNA
agtgcgagatccgctgctgctgaggagaggagcgtcaacagcagcaccatggttcctctgtggatttcttctgttggaatctggaacactggaatgatggaaatgtgttctttacaaagtagctcaacagaagaaccttgaaggctatgtgggatttgccaatctcccaaatcaagtatacagaaaatcggtgaagagaggttttgaattcacgcttatggtagtgggtgaatctggattgggaaagtcgacattaatcaactcattattcctcacagatttgtattctccagagtatccaggtccttctcatagaattaaaaagactgtacaggtggaacaatccaaagttttaatcaaagaaggtggtgttcagttgctgctcacaatagttgataccccaggatttggagatgcagtggataatagtaattgctggcagcctgttatcgactacattgatagtaaatttgaggactacctaaatgcagaatcacgagtgaacagacgtcagatgcctgataacagggtgcagtgttgtttatacttcattgctccttcaggacatggacttaaaccattggatattgagtttatgaagcgtttgcatgaaaaagtgaatatcatcccacttattgccaaagcagacacactcacaccagaggaatgccaacagtttaaaaaacagataatgaaagaaatccaagaacataaaattaaaatatacgaatttccagaaacagatgatgaagaagaaaataaacttgttaaaaagataaaggaccgtttacctcttgctgtggtaggtagtaatactatcattgaagttaatggcaaaagggtcagaggaaggcagtatccttggggtgttgctgaagttgaaaatggtgaacattgtgattttacaatcctaagaaatatgttgataagaacacacatgcaggacttgaaagatgttactaataatgtccactatgagaactacagaagcagaaaacttgcagctgtgacttataatggagttgataacaacaagaataaagggcagctgactaagagccctctggcacaaatggaagaagaaagaagggagcatgtagctaaaatgaagaagatggagatggagatggagcaggtgtttgagatgaaggtcaaagaaaaagttcaaaaactgaaggactctgaagctgagctccagcggcgccatgagcaaatgaaaaagaatttggaagcacagcacaaagaattggaggaaaaacgtcgtcagttcgaggatgagaaagcaaactgggaagctcaacaacgtattttagaacaacagaactcttcaagaaccttggaaaagaacaagaagaaagggaagatcttttaaactctctattgaccaccagttaacgtattagttgccaatatgccagcttggacatcagtgtttgttggatccgtttgaccaatttgcaccag

SEQ ID NO: 3804 - DNA, 6976 bp, Homo sapiens
  source 1..6976: mol_type = genomic DNA
gttactcacgaaactattgttgagcaacagaagaaccttgaaggctatgtgggatttgccaatctcccaaatcaagtatacagaaaatcggtgaagagaggttttgaattcacgcttatggtagtgggtgaatctggattgggaaagtcgacattaatcaactcattattcctcacagatttgtattctccagagtatccaggtccttctcatagaattaaaaagactgtacaggtggaacaatccaaagttttaatcaaagaaggtggtgttcagttgctgctcacaatagttgataccccaggatttggagatgcagtggataatagtaattgctggcagcctgttatcgactacattgatagtaaatttgaggactacctaaatgcagaatcacgagtgaacagacgtcagatgcctgataacagggtgcagtgttgtttatacttcattgctccttcaggacatggacttaaaccattggatattgagtttatgaagcgtttgcatgaaaaagtgaatatcatcccacttattgccaaagcagacacactcacaccagaggaatgccaacagtttaaaaaacagataatgaaagaaatccaagaacataaaattaaaatatacgaatttccagaaacagatgatgaagaagaaaataaacttgttaaaaagataaaggaccgtttacctcttgctgtggtaggtagtaatactatcattgaagttaatggcaaaagggtcagaggaaggcagtatccttggggtgttgctgaagttgaaaatggtgaacattgtgattttacaatcctaagaaatatgttgataagaacacacatgcaggacttgaaagatgttactaataatgtccactatgagaactacagaagcagaaaacttgcagctgtgacttataatggagttgataacaacaagaataaagggcagctgactaagagccctctggcacaaatggaagaagaaagaagggagcatgtagctaaaatgaagaagatggagatggagatggagcaggtgtttgagatgaaggtcaaagaaaaagttcaaaaactgaaggactctgaagctgaggtaatcagtctaatatcccatctcttagcagacattgtgttcctttttaagtagtatcttcagtaaaatttatagataatataacctttttatacatattttttcaaaattaataccctagtgtaacaaaacggataaatttctagaagcaagcaccgtgtttataataaaataatacatacttcaatatgcaagtgcttggacgtagtatattaggtaggacagtgtaatagaatacttataatgaattattagttataatgaacaagtttgagttgtgaaaaataaaattacaaaccattccatacaggtggcataagaacactaaagatgagagtttgggggtggatttatgcacacaaactgtgttaggataataataattgaccatatttatttgtgtatgagtgaaaaagagggaaataacctttattgaactaaagacatgcctggataaattccacacaattaaagaagagaaaattagggaatgtgatatttttgttaacaggttaggccttctttatttataatgtagtgtcaaggtagttcctggtgttacaacattgggcagggtaatgacaaaacatcccagaagacatacctactatcttgaaacccttctagatgttgagttatacatttagtttctattaatcaaaaagaccttggagacatttccttcaataggtggcaagaaagaaaagttggagaaaaagataaactgaacattaaaaatccatagagcagttagtttgatagatgtctgagaatagtagaaaaaaaactatgggtaatcccaaaataacagtggtttcagtatgaagttttcttcacataaatttgttataattaaaaattataaaatagcctgggcatggtggctcatgcctgtaacgccagcactttgggaggctgaggcacacagatcacttgagttcagaagttcgagactagcctggccaacatggtgaaacctcatctctattaaaaatacaaaaattagctggatgtggtggtgagtgcctgtaatcccagctacttgggaggctgaggctggagaatcgcttgaacctgggaggcggaggttgcactgaactgagatcacgtcactgcactcccgcctgggcgacagatcaagactttgcctcaaaaaacaaacagacaaacaaaaagccctataaaataataaattattttaaaatatgtgagatgaggtccaggtgtggtggctcacatctgtaatcccagcagtttgggaggccaaagaagaaggattgcttgagtccaggagtttgagaccagcctgggcaacatggcaagacccaatccctataaaaaatttttaaaaatagttgggcatgatggcctgcacctatggtcccaactactcaggaggctgagacaggaagattacttgagcctgggagatagaggctgtagtgagccatgattgtgccactgcatcccagcctgggtgacagagctagaccttgtctcaaaattatatacatatatatatatggatgacagtaatataaaatagttttaaaacaatctttaatgataaaatttagtaagatccctgttttatgtggcttcactaatatttgtatctaagtgtatgaagaagagattcagatctctcgttatattcttacagttgatctcattgcttttgtaattaccgcataaaatatggaaaccttttttgactaaaggcataacaaaagtatgctaatccattgagtaaatagaatgcacggaatgagaaagtattaaataatttcgaggaaatgtttttattccacatcatttctcttacattattgggcttttcttgtaatttcttattaaaatctttcactgttgttatatttgttgtgagtttaatttagcaggggtatggaataattcctcctggtttcagacgctgagcactacaggattagcatccctggcactgccactaaatgctaatagcagtgccctcctatcatagggcaaaccaaaatgtgcatacacacacacccctaatcaaaagtcactgtcttagctattgctgttgtattataaatgaataattaaagttcttaacatgacattttggagattaatttatcagcatgttgtaaatatatgcattgagtctctacctcttcagtaattcacatataatctggaaaatctatatccaaaagggggaaaaaaacaggaataatcaagagtctactacattatctccacacttagattccattgagaatctaaaagtagtttaacttatatttgaggcagatgtattttaggacatgttgctaaaagtaaatattacgaacaagtaattgtgaacctgtagccaaggaaccctttgggaattttaatgattactgtgaatggtgaagacagttttgaagaactattctttgaaggatggaatgttaacatttcaaggacctgtgaagagctctgggccaaggttcccaccagatactctaagccattagagaattaggcatgctcattctagattctttgtcttttatgaaaccacatctagagtgtatttaccaacatccctgtgataatgagtttgcaaatcatcatgtatatgatacatgatatatattgtgtaaatatacgtgtgaatacataaataggtaaagaaacccttttagccttgtttaatacagtctctccttaaatccattatgctggaaatacttgtttggggcacagctagcagcacagtacatcagccacagcaccaagcaactttcatttattgtgttgtctagtgcacaccacagccctacaaggtagatattattgcccatctctcctttatagataagaaggataaattaacttagtatgccagcatttgaacccagttaatttttaagttaagctagataggtccacagtcctgtttttcacaatttcagaatggaaaaaactctgaaaactgcaaaacctaacatgaactaagttttaatcctacatattgtgaatatttatatattttactgaaacaaataaaaagtaatgtgtttgattatacttgttgccccagatagcccaggaggtattttataaatatagtgtatactcctttctaagcggtgttgtcgttttaataactgaaaaatgttgaacttcaaaaggcatctgaccccatgggtttcttaagagtgagattgtgacctgtacctttatctacatgcagttaacacaaaagataattacttatatgtaacaagttaaagaatgatgaacactgtaagcctactacctggcttaaaaaaatagaatgttatcaactcatttgaagatgctgtgtgcctgtcccctattgtatccctctctctcattcccagaggtaactactattccgaattgtgtatatgtgactcttttcatttaaaaaaaataactagagacattttcttatgttcctactttctgacatttcttagtaacttgtttgctgtcatcaggaagatatcacctcagatttgattcatgtttgcttaagtgtgtcttaggtgattttgttttgtaggaattgcatgaaataattgaaataggaataaatctgaagtcacttcgggcttgcaaaaaaaaattgtatgcaaaattatagtaacatatataatatgtatataatatataatacatataatagttatatattaacattatgttaatgttaactcaccagtgtagtaaaatctgtaacagaacataattcctggataactgaaggttttgaatagtccttgggtatttggcatagaaggatttaatctgatttttaaaatttgttgacttttttttttttcagaaatggattgacttgcacctaaatgaaattacttatctaatgatctcttggacttaaagcactttgtttctgcagttacttcgcatgagtgtttactgcctctcagtcagcattctttacagtattaatacacagagaaggaaggaccagctgcattagaatcactgtaacttgttgaaaatccacatttccagacttaacacccagatattctaattcagtacgtctgagtgaggtccaggattctatatttttaacaaacatcccaggtgatttgcatgaagaccaatgtctgagaaccactgcttacaggaatcagagtactttgctggcatctttgagctcttagggtcctaaactacctgctttcttttcacttgtcttagctttctaaacttggaattaggaggcttattcaagtcctggttcttccactttctggctagcaatcttgggcaagtcacttaaattctgcaactgtttcctcatctgtacaatgagaacagtgatgtgttcactgcccagcctccaacatatttgtgattaaagaaaaacgagataagatagtaattttccattataaagtactccacactgttaagtttgttgctttttttttttttcctgtttcccaagattattgtcttgggtcactggccttttgggtggcaggtcctaaaggaggaggagtccttgaccagagtacttccaggtagtactctgaatttacaacagggctattcaaatagtgctcatactccttatcattagggtgtctggatgaaacatacctctgcttctgatttcttaaatagttttgttttatatattgtgctatgatttagctccagcggcgccatgagcaaatgaaaaagaatttggaagcacagcacaaagaattggaggaaaaacgtcgtcagttcgaggatgagaaagcaaactgggaagctcaacaacgtattttagaacaacagaactcttcaagaaccttggaaaagaacaagaagaaagggaagatcttttaaactctctattgaccaccagttaacgtattagttgccaatatgccagcttggacatcagtgtttgttggatccgtttgaccaatttgcaccagttttatccataatgatggatttaacagcatgacaaaaattatttttttttttgttcttgatggagattaagatgccttgaattgtctagggtgttctgtacttagaaagtaagagctctaagtacctttcctacattttctttttttattaaacagatatcttcagtttaatgcaagagaacattttactgttgtacaatcatgttctggtggtttgattgtttacaggatattccaaaataaaaggactctggaagattttcattgaggataaattgccataatatgatgcaaactgtgcttctctatgataattacaatacaaaggttccattcagtgcagcatatacaataatgtaatttagtctaacacagttgaccctattttttgacacttccattgtttaaaaatacacatggaaaaaaaaaaaaccctatatgcttactgtgcacctagagcttttttataacaacgtctttttgtttgtttgttttggattctttaaatatatattattctcatttagtgccctctttagccagaatctcattactgcttcatttttgtaataacatttaatttagatattttccatatattggcactgctaaaatagaatatagcatctttcatatggtaggaaccaacaaggaaactttcctttaactccctttttacactttatggtaagtagcagggggggaaatgcatttatagatcatttctaggcaaaattgtgaagctaatgaccaacctgtttctacctatatgcagtctctttattttactagaaatgggaatcatggcctcttgaagagaaaaaagtcaccattctgcatttagctgtattcatatattgcatttctgtattttttgtttgtattgtaaaaaattcacataataaacgatgttgtgatgt

SEQ ID NO: 3805 - DNA, 1404 bp, Homo sapiens
  source 1..1404: mol_type = genomic DNA
agtgcgagatccgctgctgctgaggagaggagcgtcaacagcagcaccatgggtgaatctggattgggaaagtcgacattaatcaactcattattcctcacagatttgtattctccagagtatccaggtccttctcatagaattaaaaagactgtacaggtggaacaatccaaagttttaatcaaagaaggtggtgttcagttgctgctcacaatagttgataccccaggatttggagatgcagtggataatagtaattgctggcagcctgttatcgactacattgatagtaaatttgaggactacctaaatgcagaatcacgagtgaacagacgtcagatgcctgataacagggtgcagtgttgtttatacttcattgctccttcaggacatggacttaaaccattggatattgagtttatgaagcgtttgcatgaaaaagtgaatatcatcccacttattgccaaagcagacacactcacaccagaggaatgccaacagtttaaaaaacagataatgaaagaaatccaagaacataaaattaaaatatacgaatttccagaaacagatgatgaagaagaaaataaacttgttaaaaagataaaggaccgtttacctcttgctgtggtaggtagtaatactatcattgaagttaatggcaaaagggtcagaggaaggcagtatccttggggtgttgctgaagttgaaaatggtgaacattgtgattttacaatcctaagaaatatgttgataagaacacacatgcaggacttgaaagatgttactaataatgtccactatgagaactacagaagcagaaaacttgcagctgtgacttataatggagttgataacaacaagaataaagggcagctgactaagagccctctggcacaaatggaagaagaaagaagggagcatgtagctaaaatgaagaagatggagatggagatggagcaggtgtttgagatgaaggtcaaagaaaaagttcaaaaactgaaggactctgaagctgagctccagcggcgccatgagcaaatgaaaaagaatttggaagcacagcacaaagaattggaggaaaaacgtcgtcagttcgaggatgagaaagcaaactgggaagctcaacaacgtattttagaacaacagaactcttcaagaaccttggaaaagaacaagaagaaagggaagatcttttaaactctctattgaccaccagttaacgtattagttgccaatatgccagcttggacatcagtgtttgttggatccgtttgaccaatttgcaccagttttatccataatgatggatttaacagcatgacaaaaattatttttttttttgttcttgatggagattaagatgccttgaattgtctagggtgttctgtacttagaaagtaagag

SEQ ID NO: 3806 - DNA, 3276 bp, Homo sapiens
  source 1..3276: mol_type = genomic DNA
gcgtgtcgggcgcggaagggggaggcggcccggggcgcccgcgagtgaggcgcggggcggcgaagggagcgcgggtggcggcacttgctgccgcggccttggatgggctgggcccccctcgccgctccgcctcctccacacgcgcggcggccgcggcgagggggacgcgccgcccggggcccggcaccttcgggaaccccccggcccggagcctgcggcctgcgccgcctcggccgccgggagccccgtggagcccccgccgccgcgccgccccgcggaccggacgctgagggcactcggggcggggcgcgcgctcgggcagacgtttgcggggaggggggcgcctgccgggccccggcgaccaccttgggggtcgcgggccggctcggggggcgcccagtgcgggccctcgcgggcgccgggcagcgaccagccctgagcggagctgttggccgcggcgggaggcctcccggacgcccccagccccccgaacgctcgcccgggccggcgggagtcggcgccccccgggaggtccgctcggtcgtccgcggcggagcgtttgctcctgggacaggcggtgggaccggggcgtcgccggagacgcccccagcgaagttgggctctccaggtgtgggggtcccggggggtagcgacgtcgcggacccggcctgtgggatgggcggcccggagaagactgcgctcggccgtgttcatacttgtccgtgggcctgaggtccccggaggatgacctagcactgaaaagccccggccggcctccccagggtccccgaggacgaagttgaccctgaccgggccgtctcccagttctgaggcccgggtcccactggaactcgcgtctgagccgccgtcccggacccccggtgcccgccggtccgcagaccctgcaccgggcttggactcgcagccgggactgacgtgtagaacaatcgtttctgttggaagaagggtttttcccttccttttggggtttttgttgccttttttttttcttttttctttgtaaaattttggagaagggaagtcggaacacaaggaaggaccgctcacccgcggactcagggctggcggcgggactccaggaccctgggtccagcatggaggtggtggacccgcagcagctgggcatgttcacggagggcgagctgatgtcggtgggtatggacacgttcatccaccgcatcgactccaccgaggtcatctaccagccgcgccgcaagcgggccaagctcatcggcaagtacctgatgggggacctgctgggggaaggctcttacggcaaggtgaaggaggtgctggactcggagacgctgtgcaggagggccgtcaagatcctcaagaagaagaagttgcgaaggatccccaacggggaggccaacgtgaagaaggaaattcaactactgaggaggttacggcacaaaaatgtcatccagctggtggatgtgttatacaacgaagagaagcagaaaatgtatatggtgatggagtactgcgtgtgtggcatgcaggaaatgctggacagcgtgccggagaagcgtttcccagtgtgccaggcccacgggtacttctgtcagctgattgacggcctggagtacctgcatagccagggcattgtgcacaaggacatcaagccggggaacctgctgctcaccaccggtggcaccctcaaaatctccgacctgggcgtggccgaggcactgcacccgttcgcggcggacgacacctgccggaccagccagggctccccggctttccagccgcccgagattgccaacggcctggacaccttctccggcttcaaggtggacatctggtcggctggggtcaccctctacaacatcaccacgggtctgtaccccttcgaaggggacaacatctacaagttgtttgagaacatcgggaaggggagctacgccatcccgggcgactgtggccccccgctctctgacctgctgaaagggatgcttgagtacgaaccggccaagaggttctccatccggcagatccggcagcacagctggttccggaagaaacatcctccggctgaagcaccagtgcccatcccaccgagcccagacaccaaggaccggtggcgcagcatgactgtggtgccgtacttggaggacctgcacggcgcggacgaggacgaggacctcttcgacatcgaggatgacatcatctacactcaggacttcacggtgcccggacaggtcccagaagaggaggccagtcacaatggacagcgccggggcctccccaaggccgtgtgtatgaacggcacagaggcggcgcagctgagcaccaaatccagggcggagggccgggcccccaaccctgcccgcaaggcctgctccgccagcagcaagatccgccggctgtcggcctgcaagcagcagtgaggctggccgcctgcagcccgtgtccaggagccccgccaggtgcccgcgccaggccctcagtcttcctgccggttccgcccgccctcccggagaggtggccgccatgcttctgtgccgaccacgccccaggacctccggagcgccctgcagggccgggcagggggacagcagggaccgggcgcagccctcccccctcggccgcccggcagtgcacgcggcttgttgacttcgcagccccgggcggagccttcccgggcgggcgtgggaggagggaggcggcctccatgcactttatgtggagactactggccccgcccgtggcctcgtgctccgcagggcgcccagcgccgtccggcggccccgccgcagaccagctggcgggtgtggagaccaggctcctgaccccgccatgcatgcagcgccacctggaagccgcgcggccgctttggttttttgtttggttggttccattttctttttttctttttttttttaagaaaaaataaaaggtggatttgagctgtggctgtgaggggtgtttgggagctgctgggtggcaggggggctgtggggtcgggctcacgtcgcggccgcctttgcgctctcgggtcaccctgctttggcggcccggccggagggcaggaccctcacctctcccccaaggccactgcgctcttgggaccccagagaaaacccggagcaagcaggagtgtgcggtcaatatttatatcatccagaaaagaaaaacacgagaaacgccatcgcgggatggtgcagacgcggcggggactcggagggtgccgtgcgggcgaggccgcccaaatttggcaataaataaagcttgggaagcttggacctg

SEQ ID NO: 3807 - DNA, 2777 bp, Homo sapiens
  source 1..2777: mol_type = genomic DNA
cgggcgcggaagggggaggcggcccggggcgcccgcgagtgaggcgcggggcggcgaagggagcgcgggtggcggcacttgctgccgcggccttggatgggctgggcccccctcgccgctccgcctcctccacacgcgcggcggccgcggcgagggggacgcgccgcccggggcccggcaccttcgggaaccccccggcccggagcctgcggcctgcgccgcctcggccgccgggagccccgtggagcccccgccgccgcgccgccccgcggaccggacgctgagcggagctgttggccgcggcgggaggcctcccggacgcccccagccccccgaacgctcgcccgggccggcgggagtcggcgccccccgggaggtccgctcggtcgtccgcggcggagcgtttgctcctgggacaggcggtgggaccggggcgtcgccggagacgcccccagcgaagttgggctctccaggtgtgggggtcccggggggtagcgacgtcgcggacccggcctgtgggatgggcggcccggagaagactgcgctcggccgtgttcatacttgtccgtgggcctgaggtccccggaggatgacctagcactgaaaagccccggccggcctccccagggtccccgaggacgaagttgaccctgaccgggccgtctcccagttctgaggcccgggtcccactggaactcgcgtctgagccgccgtcccggacccccggtgcccgccggtccgcagaccctgcaccgggcttggactcgcagccgggactgacgtgtagaacaatcgtttctgttggaagaagggtttttcccttccttttggggtttttgttgccttttttttttcttttttctttgtaaaattttggagaagggaagtcggaacacaaggaaggaccgctcacccgcggactcagggctggcggcgggactccaggaccctgggtccagcatggaggtggtggacccgcagcagctgggcatgttcacggagggcgagctgatgtcggtgggtatggacacgttcatccaccgcatcgactccaccgaggtcatctaccagccgcgccgcaagcgggccaagctcatcggcaagtacctgatgggggacctgctgggggaaggctcttacggcaaggtgaaggaggtgctggactcggagacgctgtgcaggagggccgtcaagatcctcaagaagaagaagttgcgaaggatccccaacggggaggccaacgtgaagaaggaaattcaactactgaggaggttacggcacaaaaatgtcatccagctggtggatgtgttatacaacgaagagaagcagaaaatgtatatggtgatggagtactgcgtgtgtggcatgcaggaaatgctggacagcgtgccggagaagcgtttcccagtgtgccaggcccacgggtacttctgtcagctgattgacggcctggagtacctgcatagccagggcattgtgcacaaggacatcaagccggggaacctgctgctcaccaccggtggcaccctcaaaatctccgacctgggcgtggccgaggcactgcacccgttcgcggcggacgacacctgccggaccagccagggctccccggctttccagccgcccgagattgccaacggcctggacaccttctccggcttcaaggtggacatctggtcggctggggtcaccctctacaacatcaccacgggtctgtaccccttcgaaggggacaacatctacaagttgtttgagaacatcgggaaggggagctacgccatcccgggcgactgtggccccccgctctctgacctgctgaaagggatgcttgagtacgaaccggccaagaggttctccatccggcagatccggcagcacagctggttccggaagaaacatcctccggctgaagcaccagtgcccatcccaccgagcccagacaccaaggaccggtggcgcagcatgactgtggtgccgtacttggaggacctgcacggcgcggacgaggacgaggacctcttcgacatcgaggatgacatcatctacactcaggacttcacggtgcccggacaggtcccagaagaggaggccagtcacaatggacagcgccggggcctccccaaggccgtgtgtatgaacggcacagaggcggcgcagctgagcaccaaatccagggcggaggccgggcccccaaccctgcccgcaaggcctgctgccagcagcaagatccgccggctgtcggcctgcaagcagcagtgaggctggccgcctgcagcccgtgtccaggagccccgccaggtgcccgcgccaggccctcagtcttcctgccggttccgcccgccctcccggagaggtggccgccatgcttctgtgccgaccacgccccaggacctccggagcgccctgcagggccgggcagggggacagcagggaccgggcgcagccctcccccctcggccgcccggcagtgcacgcggcttgttgacttcgcagccccgggcggagccttcccgggcgggcgtgggaggagggaggcggcctccatgcactttatgtggagactactggccccgcccgtggcctcgtgctccgcagggcgcccagcgccgtccggcggccccgccgcagaccagctggcgggtgtggagaccaggctcctgaccccgccatgcatgcagcgccacctggaagccgcgcggccgctttggttttttgtttggttggttccattttctttttttctttttttttttaagaaaaaataaaaggtggatttg

SEQ ID NO: 3808 - DNA, 1913 bp, Homo sapiens
  source 1..1913: mol_type = genomic DNA
gaactgtaacaactctcagaggagcattgcccgtcagacagcaactcagagaataaccagagaacaaccagattgaaacaatggaggatctttgtgtggcaaacacactctttgccctcaatttattcaagcatctggcaaaagcaagccccacccagaacctcttcctctccccatggagcatctcgtccaccatggccatggtctacatgggctccaggggcagcaccgaagaccagatggccaaggtgcttcagtttaatgaagtgggagccaatgcagttacccccatgactccagagaactttaccagctgtgggttcatgcagcagatccagaagggtagttatcctgatgcgattttgcaggcacaagctgcagataaaatccattcatccttccgctctctcagctctgcaatcaatgcatccacagggaattatttactggaaagtgtcaataagctgtttggtgagaagtctgcgagcttccgggaagaatatattcgactctgtcagaaatattactcctcagaaccccaggcagtagacttcctagaatgtgcagaagaagctagaaaaaagattaattcctgggtcaagactcaaaccaaaggcaaaatcccaaacttgttacctgaaggttctgtagatggggataccaggatggtcctggtgaatgctgtctacttcaaaggaaagtggaaaactccatttgagaagaaactaaatgggctttatcctttccgtgtaaactcggctcagcgcacacctgtacagatgatgtacttgcgtgaaaagctaaacattggatacatagaagacctaaaggctcagattctagaactcccatatgctggagatgttagcatgttcttgttgcttccagatgaaattgccgatgtgtccactggcttggagctgctggaaagtgaaataacctatgacaaactcaacaagtggaccagcaaagacaaaatggctgaagatgaagttgaggtatacataccccagttcaaattagaagagcattatgaactcagatccattctgagaagcatgggcatggaggacgccttcaacaagggacgggccaatttctcagggatgtcggagaggaatgacctgtttctttctgaagtgttccaccaagccatggtggatgtgaatgaggagggcactgaagcagccgctggcacaggaggtgttatgacagggagaactggacatggaggcccacagtttgtggcagatcatccttttctttttcttattatgcataagataaccaactgcattttatttttcggcagattttcctcaccctaaaactaagcgtgctgcttctgcaaaagatttttgtagatgagctgtgtgcctcagaattgctatttcaaattgccaaaaatttagagatgttttctacatatttctgctcttctgaacaacttctgctacccactaaataaaaacacagaaataattagacaattgtctattataacatgacaaccctattaatcatttggtcttctaaaatgggatcatgcccatttagattttccttactatcagtttatttttataacattaacttttactttgttatttattattttatataatggtgagtttttaaattattgctcactgcctatttaatgtagctaataaagttatagaagcagatgatctgttaatttcctatctaataaatgcctttaattgttctcataatgaagaataagtaggtatccctccatgcccttctgtaataaatatctggaaaaaacattaaacaataggcaaatatatgttatgtgcatttctagaaatacataacacatatatatgtctgtatcttatattcaattgcaagtatataataaataaacctgcttccaaacaacaata

SEQ ID NO: 3809 - DNA, 717 bp, Homo sapiens
  source 1..717: mol_type = genomic DNA
gttgtgcccgctttcctactcagtgcaattgttccaggtttgcaggtcccaggttccaagactttgcggtcttcttttgttcacttggaaccgatatcttttggaggtgcatttcttgcactacaacttgcttaagctcttacacttcatagtgaagctatgcaccaccgagtgaagcgatgtggaacattggaaagagtgggcttccttagacagacctgggcttgaatccctgctccactacctaccagctgtgtgaccttatacaagttacttaatgtttctgagcatcaggatataatctataaaatagggagaatcacctctacctcatacagattctgcaaagattaaacgaggagaggagattgaaacaatggaggatctttgtgtggcaaacacactctttgccctcaatttattcaagcatctggcaaaagcaagccccacccagaacctcttcctctccccatggagcatctcgtccaccatggccatggtctacatgggctccaggggcagcaccgaagaccagatggccaaggtgcttcagtttaatgaagtgggagccaatgcagttacccccatgactccagagaactttaccagctgtgggttcatgcagcagatccagaagggtagttatcctgatgcgattttgcaggcacaagctgcagataaaatccattcatccttccgctctctcagctctgcaat

SEQ ID NO: 3810 - DNA, 762 bp, Homo sapiens
  source 1..762: mol_type = genomic DNA
gagaacaaccagcatttcttgcactacaacttgcttaagctcttacacttcatagtgaagctatgcaccaccgagtgaagcgatgtggaacattggaaagagtgggcttccttagacagacctgggcttgaatccctgctccactacctaccagctgtgtgaccttatacaagttacttaatgtttctgagcatcaggatataatctataaaatagggagaatcacctctacctcatacagattctgcaaagattaaacgaggagaggagattgaaacaatggaggatctttgtgtggcaaacacactctttgccctcaatttattcaagcatctggcaaaagcaagccccacccagaacctcttcctctccccatggagcatctcgtccaccatggccatggtctacatgggctccaggggcagcaccgaagaccagatggccaaggtgcttcagtttaatgaagtgggagccaatgcagttacccccatgactccagagaactttaccagctgtgggttcatgcagcagatccagaagggtagttatcctgatgcgattttgcaggcacaagctgcagataaaatccattcatccttccgctctctcagctctgcaatcaatgcatccacagggaattatttactggaaagtgtcaataagctgtttggtgagaagtctgcgagcttccgggaagaatatattcgactctgtcagaaatattactcctcagaaccccaggcagtagacttcctagaatgt

SEQ ID NO: 3811 - DNA, 751 bp, Homo sapiens
  source 1..751: mol_type = genomic DNA
ttgcctgcagagcctgaggtcagggaaggtctcagatggttcataccttggtgtatacatgagtttcataggcctgggattaaggattatccctgcaatcttgcctggcattgactttctacctggtggggtggcagaagaagggggtcttctagtcctcccagtaatgaacaccccagtataggaagtcttttttagtaaggctgtggtatgtgtggtgcatatagggaaggggttctgggataggggctgggtgaaactccaaaccttcaaacaatgagtcaaagtcactttagaagcaggaaagcagaaagaagattgaccgtcttaccagatgcaacaagattgaaacaatggaggatctttgtgtggcaaacacactctttgccctcaatttattcaagcatctggcaaaagcaagccccacccagaacctcttcctctccccatggagcatctcgtccaccatggccatggtctacatgggctccaggggcagcaccgaagaccagatggccaaggtgcttcagtttaatgaagtgggagccaatgcagttacccccatgactccagagaactttaccagctgtgggttcatgcagcagatccagaagggtagttatcctgatgcgattttgcaggcacaagctgcagataaaatccattcatccttccgctctctcagctctgcaatcaatgcatccacagggaattatttactggaaagtgtcaataagctgtttggtgagaa

SEQ ID NO: 3812 - DNA, 2155 bp, Homo sapiens
  source 1..2155: mol_type = genomic DNA
gtaacaactctcagaggagcattgcccgtcagacagcaactcagagaataaccagagaacaaccagcatttcttgcactacaacttgcttaagctcttacacttcatagtgaagctatgcaccaccgagtgaagcgatgtggaacattggaaagagtgggcttccttagacagacctgggcttgaatccctgctccactacctaccagctgtgtgaccttatacaagttacttaatgtttctgagcatcaggatataatctataaaatagggagaatcacctctacctcatacagattctgcaaagattaaacgaggagaggagattgaaacaatggaggatctttgtgtggcaaacacactctttgccctcaatttattcaagcatctggcaaaagcaagccccacccagaacctcttcctctccccatggagcatctcgtccaccatggccatggtctacatgggctccaggggcagcaccgaagaccagatggccaaggtgcttcagtttaatgaagtgggagccaatgcagttacccccatgactccagagaactttaccagctgtgggttcatgcagcagatccagaagggtagttatcctgatgcgattttgcaggcacaagctgcagataaaatccattcatccttccgctctctcagctctgcaatcaatgcatccacagggaattatttactggaaagtgtcaataagctgtttggtgagaagtctgcgagcttccgggaagaatatattcgactctgtcagaaatattactcctcagaaccccaggcagtagacttcctagaatgtgcagaagaagctagaaaaaagattaattcctgggtcaagactcaaaccaaaggcaaaatcccaaacttgttacctgaaggttctgtagatggggataccaggatggtcctggtgaatgctgtctacttcaaaggaaagtggaaaactccatttgagaagaaactaaatgggctttatcctttccgtgtaaactcggctcagcgcacacctgtacagatgatgtacttgcgtgaaaagctaaacattggatacatagaagacctaaaggctcagattctagaactcccatatgctggagatgttagcatgttcttgttgcttccagatgaaattgccgatgtgtccactggcttggagctgctggaaagtgaaataacctatgacaaactcaacaagtggaccagcaaagacaaaatggctgaagatgaagttgaggtatacataccccagttcaaattagaagagcattatgaactcagatccattctgagaagcatgggcatggaggacgccttcaacaagggacgggccaatttctcagggatgtcggagaggaatgacctgtttctttctgaagtgttccaccaagccatggtggatgtgaatgaggagggcactgaagcagccgctggcacaggaggtgttatgacagggagaactggacatggaggcccacagtttgtggcagatcatccttttctttttcttattatgcataagataaccaactgcattttatttttcggcagattttcctcaccctaaaactaagcgtgctgcttctgcaaaagatttttgtagatgagctgtgtgcctcagaattgctatttcaaattgccaaaaatttagagatgttttctacatatttctgctcttctgaacaacttctgctacccactaaataaaaacacagaaataattagacaattgtctattataacatgacaaccctattaatcatttggtcttctaaaatgggatcatgcccatttagattttccttactatcagtttatttttataacattaacttttactttgttatttattattttatataatggtgagtttttaaattattgctcactgcctatttaatgtagctaataaagttatagaagcagatgatctgttaatttcctatctaataaatgcctttaattgttctcataatgaagaataagtaggtatccctccatgcccttctgtaataaatatctggaaaaaacattaaacaataggcaaatatatgttatgtgcatttctagaaatacataacacatatatatgtctgtatcttatattcaattgcaagtatataataaataaacctgcttcc

SEQ ID NO: 3813 - DNA, 3190 bp, Homo sapiens
  source 1..3190: mol_type = genomic DNA
ggcccacagaggagcacagctgtgtttggctgcagggccaagagcgctgtcaagaagacccacacgcccccctccagcagctgaattcctgcagctcagcagccgccgccagagcaggacgaaccgccaatcgcaaggcacctctgagaacttcaggatgcagatgtctccagccctcacctgcctagtcctgggcctggcccttgtctttggtgaagggtctgctgtgcaccatcccccatcctacgtggcccacctggcctcagacttcggggtgagggtgtttcagcaggtggcgcaggcctccaaggaccgcaacgtggttttctcaccctatggggtggcctcggtgttggccatgctccagctgacaacaggaggagaaacccagcagcagattcaagcagctatgggattcaagattgatgacaagggcatggcccccgccctccggcatctgtacaaggagctcatggggccatggaacaaggatgagatcagcaccacagacgcgatcttcgtccagcgggatctgaagctggtccagggcttcatgccccacttcttcaggctgttccggagcacggtcaagcaagtggacttttcagaggtggagagagccagattcatcatcaatgactgggtgaagacacacacaaaaggtatgatcagcaacttgcttgggaaaggagccgtggaccagctgacacggctggtgctggtgaatgccctctacttcaacggccagtggaagactcccttccccgactccagcacccaccgccgcctcttccacaaatcagacggcagcactgtctctgtgcccatgatggctcagaccaacaagttcaactatactgagttcaccacgcccgatggccattactacgacatcctggaactgccctaccacggggacaccctcagcatgttcattgctgccccttatgaaaaagaggtgcctctctctgccctcaccaacattctgagtgcccagctcatcagccactggaaaggcaacatgaccaggctgccccgcctcctggttctgcccaagttctccctggagactgaagtcgacctcaggaagcccctagagaacctgggaatgaccgacatgttcagacagtttcaggctgacttcacgagtctttcagaccaagagcctctccacgtcgcgcaggcgctgcagaaagtgaagatcgaggtgaacgagagtggcacggtggcctcctcatccacagctgtcatagtctcagcccgcatggcccccgaggagatcatcatggacagacccttcctctttgtggtccggcacaaccccacaggaacagtccttttcatgggccaagtgatggaaccctgaccctggggaaagacgccttcatctgggacaaaactggagatgcatcgggaaagaagaaactccgaagaaaagaattttagtgttaatgactctttctgaaggaagagaagacatttgccttttgttaaaagatggtaaaccagatctgtctccaagaccttggcctctccttggaggacctttaggtcaaactccctagtctccacctgagaccctgggagagaagtttgaagcacaactcccttaaggtctccaaaccagacggtgacgcctgcgggaccatctggggcacctgcttccacccgtctctctgcccactcgggtctgcagacctggttcccactgaggccctttgcaggatggaactacggggcttacaggagcttttgtgtgcctggtagaaactatttctgttccagtcacattgccatcactcttgtactgcctgccaccgcggaggaggctggtgacaggccaaaggccagtggaagaaacaccctttcatctcagagtccactgtggcactggccacccctccccagtacaggggtgctgcaggtggcagagtgaatgtcccccatcatgtggcccaactctcctggcctggccatctccctccccagaaacagtgtgcatgggttattttggagtgtaggtgacttgtttactcattgaagcagatttctgcttccttttatttttataggaatagaggaagaaatgtcagatgcgtgcccagctcttcaccccccaatctcttggtggggaggggtgtacctaaatatttatcatatccttgcccttgagtgcttgttagagagaaagagaactactaaggaaaataatattatttaaactcgctcctagtgtttctttgtggtctgtgtcaccgtatctcaggaagtccagccacttgactggcacacacccctccggacatccagcgtgacggagcccacactgccaccttgtggccgcctgagaccctcgcgccccccgcgcccctctttttccccttgatggaaattgaccatacaatttcatcctccttcaggggatcaaaaggacggagtggggggacagagactcagatgaggacagagtggtttccaatgtgttcaatagatttaggagcagaaatgcaaggggctgcatgacctaccaggacagaactttccccaattacagggtgactcacagccgcattggtgactcacttcaatgtgtcatttccggctgctgtgtgtgagcagtggacacgtgaggggggggtgggtgagagagacaggcagctcggattcaactaccttagataatatttctgaaaacctaccagccagagggtagggcacaaagatggatgtaatgcactttgggaggccaaggcgggaggattgcttgagcccaggagttcaagaccagcctgggcaacataccaagacccccgtctctttaaaaatatatatattttaaatatacttaaatatatatttctaatatctttaaatatatatatatattttaaagaccaatttatgggagaattgcacacagatgtgaaatgaatgtaatctaatagaagcctaatcagcccaccatgttctccactgaaaaatcctctttctttggggtttttctttctttcttttttgattttgcactggacggtgacgtcagccatgtacaggatccacaggggtggtgtcaaatgctattgaaattgtgttgaattgtatgctttttcacttttgataaataaacatgtaaaaatgtttcaaaaaaataataaaataaataaatacgaagaatatgtcaggacagtca

SEQ ID NO: 3814 - DNA, 3135 bp, Homo sapiens
  source 1..3135: mol_type = genomic DNA
aggagcacagctgtgtttggctgcagggccaagagcgctgtcaagaagacccacacgcccccctccagcagctgaattcctgcagctcagcagccgccgccagagcaggacgaaccgccaatcgcaaggcacctctgagaacttcaggatgcagatgtctccagccctcacctgcctagtcctgggcctggcccttgtctttggtgaagggtctgctgtgcaccatcccccatcctacgtggcgcaggcctccaaggaccgcaacgtggttttctcaccctatggggtggcctcggtgttggccatgctccagctgacaacaggaggagaaacccagcagcagattcaagcagctatgggattcaagattgatgacaagggcatggcccccgccctccggcatctgtacaaggagctcatggggccatggaacaaggatgagatcagcaccacagacgcgatcttcgtccagcgggatctgaagctggtccagggcttcatgccccacttcttcaggctgttccggagcacggtcaagcaagtggacttttcagaggtggagagagccagattcatcatcaatgactgggtgaagacacacacaaaaggtatgatcagcaacttgcttgggaaaggagccgtggaccagctgacacggctggtgctggtgaatgccctctacttcaacggccagtggaagactcccttccccgactccagcacccaccgccgcctcttccacaaatcagacggcagcactgtctctgtgcccatgatggctcagaccaacaagttcaactatactgagttcaccacgcccgatggccattactacgacatcctggaactgccctaccacggggacaccctcagcatgttcattgctgccccttatgaaaaagaggtgcctctctctgccctcaccaacattctgagtgcccagctcatcagccactggaaaggcaacatgaccaggctgccccgcctcctggttctgcccaagttctccctggagactgaagtcgacctcaggaagcccctagagaacctgggaatgaccgacatgttcagacagtttcaggctgacttcacgagtctttcagaccaagagcctctccacgtcgcgcaggcgctgcagaaagtgaagatcgaggtgaacgagagtggcacggtggcctcctcatccacagctgtcatagtctcagcccgcatggcccccgaggagatcatcatggacagacccttcctctttgtggtccggcacaaccccacaggaacagtccttttcatgggccaagtgatggaaccctgaccctggggaaagacgccttcatctgggacaaaactggagatgcatcgggaaagaagaaactccgaagaaaagaattttagtgttaatgactctttctgaaggaagagaagacatttgccttttgttaaaagatggtaaaccagatctgtctccaagaccttggcctctccttggaggacctttaggtcaaactccctagtctccacctgagaccctgggagagaagtttgaagcacaactcccttaaggtctccaaaccagacggtgacgcctgcgggaccatctggggcacctgcttccacccgtctctctgcccactcgggtctgcagacctggttcccactgaggccctttgcaggatggaactacggggcttacaggagcttttgtgtgcctggtagaaactatttctgttccagtcacattgccatcactcttgtactgcctgccaccgcggaggaggctggtgacaggccaaaggccagtggaagaaacaccctttcatctcagagtccactgtggcactggccacccctccccagtacaggggtgctgcaggtggcagagtgaatgtcccccatcatgtggcccaactctcctggcctggccatctccctccccagaaacagtgtgcatgggttattttggagtgtaggtgacttgtttactcattgaagcagatttctgcttccttttatttttataggaatagaggaagaaatgtcagatgcgtgcccagctcttcaccccccaatctcttggtggggaggggtgtacctaaatatttatcatatccttgcccttgagtgcttgttagagagaaagagaactactaaggaaaataatattatttaaactcgctcctagtgtttctttgtggtctgtgtcaccgtatctcaggaagtccagccacttgactggcacacacccctccggacatccagcgtgacggagcccacactgccaccttgtggccgcctgagaccctcgcgccccccgcgcccctctttttccccttgatggaaattgaccatacaatttcatcctccttcaggggatcaaaaggacggagtggggggacagagactcagatgaggacagagtggtttccaatgtgttcaatagatttaggagcagaaatgcaaggggctgcatgacctaccaggacagaactttccccaattacagggtgactcacagccgcattggtgactcacttcaatgtgtcatttccggctgctgtgtgtgagcagtggacacgtgaggggggggtgggtgagagagacaggcagctcggattcaactaccttagataatatttctgaaaacctaccagccagagggtagggcacaaagatggatgtaatgcactttgggaggccaaggcgggaggattgcttgagcccaggagttcaagaccagcctgggcaacataccaagacccccgtctctttaaaaatatatatattttaaatatacttaaatatatatttctaatatctttaaatatatatatatattttaaagaccaatttatgggagaattgcacacagatgtgaaatgaatgtaatctaatagaagcctaatcagcccaccatgttctccactgaaaaatcctctttctttggggtttttctttctttcttttttgattttgcactggacggtgacgtcagccatgtacaggatccacaggggtggtgtcaaatgctattgaaattgtgttgaattgtatgctttttcacttttgataaataaacatgtaaaaatgtttcaaaaaaataataaaataaataaatacgaagaatatgtcaggacagtc

SEQ ID NO: 3815 - DNA, 1326 bp, Homo sapiens
  source 1..1326: mol_type = genomic DNA
cacagctgtgtttggctgcagggccaagagcgctgtcaagaagacccacacgcccccctccagcagctgaattcctgcagctcagcagccgccgcctcttccacaaatcagacggcagcactgtctctgtgcccatgatggctcagaccaacaagttcaactatactgagttcaccacgcccgatggccattactacgacatcctggaactgccctaccacggggacaccctcagcatgttcattgctgccccttatgaaaaagaggtgcctctctctgccctcaccaacattctgagtgcccagctcatcagccactggaaaggcaacatgaccaggctgccccgcctcctggttctgcccaagttctccctggagactgaagtcgacctcaggaagcccctagagaacctgggaatgaccgacatgttcagacagtttcaggctgacttcacgagtctttcagaccaagagcctctccacgtcgcgcaggcgctgcagaaagtgaagatcgaggtgaacgagagtggcacggtggcctcctcatccacagctgtcatagtctcagcccgcatggcccccgaggagatcatcatggacagacccttcctctttgtggtccggcacaaccccacaggaacagtccttttcatgggccaagtgatggaaccctgaccctggggaaagacgccttcatctgggacaaaactggagatgcatcgggaaagaagaaactccgaagaaaagaattttagtgttaatgactctttctgaaggaagagaagacatttgccttttgttaaaagatggtaaaccagatctgtctccaagaccttggcctctccttggaggacctttaggtcaaactccctagtctccacctgagaccctgggagagaagtttgaagcacaactcccttaaggtctccaaaccagacggtgacgcctgcgggaccatctggggcacctgcttccacccgtctctctgcccactcgggtctgcagacctggttcccactgaggccctttgcaggatggaactacggggcttacaggagcttttgtgtgcctggtagaaactatttctgttccagtcacattgccatcactcttgtactgcctgccaccgcggaggaggctggtgacaggccaaaggccagtggaagaaacaccctttcatctcagagtccactgtggcactggccacccctccccagtacaggggtgctgcaggtggcagagtgaatgtcccccatcatgtggcccaactctcctggcctggccatctccctccccagaaacagtgtgcatgggttattttggagtg

SEQ ID NO: 3816 - DNA, 2114 bp, Homo sapiens
  source 1..2114: mol_type = genomic DNA
gtagttaggagtctggagtcgtgagccggagtcagaactgcgtctcgcgacccaggcgcgggtttccagaggacagccaacaagcgatgctgccgccgccgtttcctgattggttgtgggtggctacctcttcgttctgattggccgctagtgagcaagatgctgagcaagggtctgaagcggaaacgggaggaggaggaggagaaggaacctctggcagtcgactcctggtggctagatcctggccacacagcggtggcacaggcacccccggccgtggcctctagctccctctttgacctctcagtgctcaagctccaccacagcctgcagcagagtgagccggacctgcggcacctggtgctggtcgtgaacactctgcggcgcatccaggcgtccatggcacccgcggctgccctgccacctgtgcctagcccacctgcagcccccagtgtggctgacaacttactggcaagctcggacgctgccctttcagcctccatggccagcctcctggaggacctcagccacattgagggcctgagtcaggctccccaacccttggcagacgaggggccaccaggccgtagcatcgggggagcagcgcccagcctgggtgccttggacctgctgggcccagccactggctgtctactggacgatgggcttgagggcctgtttgaggatattgacacctctatgtatgacaatgaactttgggcaccagcctctgagggcctcaaaccaggccctgaggatgggccgggcaaggaggaagctccggagctggacgaggccgaattggactacctcatggatgtgctggtgggcacacaggcactggagcgaccgccggggccagggcgctgagccctcgtgctggaatggttgtctggtatctgaactgagcctgctggctggaccaactgtcctcgaaaagacacagctggcttccctagtacagagaacagggcttgggccactttggagagacagaatctagtcctgggcaacttcacatccgtcctcctgtctcagggctggcagggggagcctggaattaccccctagtgatggaatgacagggtctggtggggactgaattccctggccctggggtcatagcttgggctgttccttctctgatacgggaagagaccccaatcagatttttcaaattaaagccagtcctgggaaatctcaaatccgtgtgctgctttgtctctgggcaaatgtgaaggcgagataaaaacatcaaacattttattgggcgtaggctgtgtacgaggcacagtttctaagcacgtcactgtgttaactcatttaatcctataacagccctacaagatcggtagtattatcatccctattttacaggtgagaaaaccaaggttccaagattatcacttgaggtgggttttaaattatgaacttttttttttttttttttgagatagggtctcgctctgtcacccaggttgaagtacagtggtctgatcatggctcactacagcctcaaactcctgggctcaagcgatcctcctaccaggccactttttttttttctttcttttttttttaagacagattcttactctgtcgcccaggctggagtgcagtggcgtgacttcggctcactgcaacctccacctcccaggttcaaacgattctcctgcctcggcctcccaattagctgggaccgactaattttttatattttttgtagagacagggtttcaccgtgttagccaggatggtcttcatcttctgacctcgtgatctgcctgcctcagcctcccaaagtgctgggattacaggcgtgagccactgtgcctggcctttttttttttttcttaaattttatttcttttctttgctagcaggaagtcaaggcaactttttaaaaatgaaagcaagtcctcgcctggagtctacctgtatttattgaggagcgaaggggagattgctttcagaatggtcccgaaataaaaacacaaaacctggaccctggacagatcctctccaaggagccctgagagtcggctctccaggaaaatgggggaggaaagggggacaacagcccatttttaaaaataaaattcactcctggtctt

SEQ ID NO: 3817 - DNA, 4200 bp, Homo sapiens
  source 1..4200: mol_type = genomic DNA
ggtcgggggatccctccgccgccagcgcgtggtcccggccccctccacccgccgtctcggccgcggccagcagcccctgccccccgggggacgctgacggccgcccggcgcgccgccctagcagacggacagggggcgctgcgcgcggcctggggcaacccgggccacaggggcaggaaagtgagggcccaggtcggcccgggcgtgcaggggccccgggttcgcagcggcggccgcggcagcgatagcggcactagcagcagcgggagtgccgggttgagccgggaagccgatggcggcggctgcggcggctccgattcctcgctgactgcccgtccgccctcctgcatcgagcgccatgttaccgacccaagctggggccgcggcggctctgggccggggctcggccctggggggcagcctgaaccggaccccgacggggcggccgggcggcggcggcgggacacgcggggctaacgggggccgggtccccgggaatggcgcggggctcgggcccggccgcctggagcgggaggctgcggcagcggcggcaaccaccccggcgcccaccgcgggggccctctacagcggcagcgagggcgactcggagtcgggcgaggaggaggagctgggcgccgagcggcgcggcctgaagcggagcctgagcgagatggagatcggtatggtggtcggtgggcccgaggcgtcggcagcggccaccgggggctacgggccggtgagcggcgcggtgagcggggccaagccgggtaagaagacccggggccgcgtgaagatcaagatggagttcatcgacaacaagctgcggcgctacacgaccttcagcaagaggaagacgggcatcatgaagaaggcctatgagctgtccacgctgacagggacacaggtgctgttgctggtggccagtgagacaggccatgtgtatacctttgccacccgaaaactgcagcccatgatcaccagtgagaccggcaaggcactgattcagacctgcctcaactcgccagactctccaccccgttcagaccccacaacagaccagagaatgagtgccactggctttgaagagacagatctcacctaccaggtgtcggagtctgacagcagtggggagaccaaggacacactgaagccggcgttcacagtcaccaacctgccgggtacaacctccaccatccaaacagcacctagcacctctaccaccatgcaagtcagcagcggcccctcctttcccatcaccaactacctggcaccagtgtctgctagtgtcagccccagtgctgtcagcagtgccaatgggactgtgctgaagagtacaggcagcggccctgtctcctctgggggccttatgcagctgcctaccagcttcaccctcatgcctggtggggcagtggcccagcaggtcccagtgcaggccattcaagtgcaccaggccccacagcaagcgtctccctcccgtgacagcagcacagacctcacgcagacctcctccagcgggacagtgacgctgcccgccaccatcatgacgtcatccgtgcccacaactgtgggtggccacatgatgtaccctagcccgcatgcggtgatgtatgcccccacctcgggcctgggtgatggcagcctcaccgtgctgaatgccttctcccaggcaccatccaccatgcaggtgtcacacagccaggtccaggagccaggtggcgtcccccaggtgttcctgacagcatcatctgggacagtgcagatccctgtttcagcagttcagctccaccagatggctgtgatagggcagcaggccgggagcagcagcaacctcaccgagctacaggtggtgaacctggacaccgcccacagcaccaagagtgaatgatccgcccgccgccctggacagatggcccaagggatggcaccacttatttattgttgccttttcacgttttctttacacacacgttgacgggccgcaggagggaggcggggaggaggaacgggcagccacaggactgagccctctcactccagccaaagaaatgggcctgcctgcctccacccgtcctccctcagcctccccttcttcccgccccacctcccatttctgttgctggaggggctgtcctccttcctgggaccccctcgccagcttggctcgatgtttgccatgagtattagcttacccaatgggaccgtgccccacctccccacacacaggccttctgtggggctgggcaccgtgtcctcctctgaggaagcagttggggccctcttgccagcctccttgctgaccccaggtcagccctgtgtctgtcacaggctgggtcaaaagagccctggctctgcccctcagggggccagctggggagatgggggcttcttcctcacactgctgtcctctcccccttcagctcctgagtagctgggcctgtgcactgggcaggttcctggggccgcctgccctgccttgccgctccccttggacctccaggggctcctgggttggagggaaccaccagcgttcccttctcccccttgtcttcccccctctcctcccagctgctttacttaaagttgattttgaactttttatttgaggagacgaagtgaaaacaaatctataaatatatatttttaaaatatttaacttttttttatggcgtttttctcgtccccctccctgcccaaactccccttccctggggagccctcaggctccccagaactggctgggcccctggggacagagccaccccatgagctcggggtccaccagtgtgtgggggagattctgggtttgcccagtcctgggttgtttccaggagaaagccgggggaggggccctcaggccattccccaacggggtggggagggtgacccacagctctgggcctctttttgccctttagggctgttgctagggagagggaagagggagaccaaatgtcggggttggggtgggagggcgtcaggcagaggcaactgacttcatttgtgccacacgcatgggcattgcagccttgcgctgtcccaggcatgcagctgcctggggcccaagttgcagtgagcagggtggggtctgggagggggtgagaggcaggaatgggggtcagaagaagtgggagcagcttcttgggctgagtgcagccaaaggggagccagaaatgggcagttctcccagggagtgagcagctactgtaacttttttaaattaagacaaaaagccttgaagaaaatgactttatttttctaagtgtaacctcagtatttatgtaatttgtacaggggccatgccccacccccctcctccccctttggggtagaccttgagggtgggccagcataggggggagggtcttttaccctgtgtcagagcctaccttcaccacctatatccagaaggggagctttttcagaaacagggcagcagtggggtgaaattttcttaacccctaagactgccttcagtaggaacaagctggcttctgtgattaggtgaagggatgggggaagattttatgcacagcctagttatcaaggggatgatttgccgacatgtttgagaaccccctaacctctaaccctcattgctgtcttgccccagtttggggtgccaagatggaagtcacctttctgggctttctcctggagatagctggggcttatgggtggctttcaaggctggggcatggcaaatcaggggccagagagcaggggagcttgggactcaggtctgtaactgcccagccccttttctctgctcttgtttcactccaccatcactcactcactccccactcccccacccatggggaggagacctttgatgaattcttcctctccttcccacaaaagacagacccagtgagtgaatcaggcaaagtgcttataatgtgtgttgtgtgagcgtggccttgggaggacatgcgtgtgtcagggatgagttgaggtgatatttttatgtgcagcgacccttggtgtttcccttcctcggtggctctggggtatgtgtgtgtgggtgtgtgcgcctgagtgagtgtgtgtgcttgaatgtgagtgtgtatgtcagtggtttctacttcccctgggatgctgacccaggaatagtggacatggtcacagtcctatgtacagagctttcttttgtattaaaaaaaaatactctttcaataaatgtatcatttttgtgcacag

SEQ ID NO: 3818 - DNA, 1312 bp, Homo sapiens
  source 1..1312: mol_type = genomic DNA
aaaggcgcagaggtgggagtgaccggcgccagagaggaagagggcccttgctgagtgaaggggcctatgagctgtccacgctgacagggacacaggtgctgttgctggtggccagtgagacaggccatgtgtatacctttgccacccgaaaactgcagcccatgatcaccagtgagaccggcaaggcactgattcagacctgcctcaactcgccagactctccaccccgttcagaccccacaacagaccagagaatgagtgccactggctttgaagagacagatctcacctaccaggtgtcggagtctgacagcagtggggagaccaaggacacactgaagccggcgttcacagtcaccaacctgccgggtacaacctccaccatccaaacagcacctagcacctctaccaccatgcaagtcagcagcggcccctcctttcccatcaccaactacctggcaccagtgtctgctagtgtcagccccagtgctgtcagcagtgccaatgggactgtgctgaagagtacaggcagcggccctgtctcctctgggggccttatgcagctgcctaccagcttcaccctcatgcctggtggggcagtggcccagcaggtcccagtgcaggccattcaagtgcaccaggccccacagcaagcgtctccctcccgtgacagcagcacagacctcacgcagacctcctccagcgggacagtgacgctgcccgccaccatcatgacgtcatccgtgcccacaactgtgggtggccacatgatgtaccctagcccgcatgcggtgatgtatgcccccacctcgggcctgggtgatggcagcctcaccgtgctgaatgccttctcccaggcaccatccaccatgcaggtgtcacacagccaggtccaggagccaggtggcgtcccccaggtgttcctgacagcatcatctgggacagtgcagatccctgtttcagcagttcagctccaccagatggctgtgatagggcagcaggccgggagcagcagcaacctcaccgagctacaggtggtgaacctggacaccgcccacagcaccaagagtgaatgatccgcccgccgccctggacagatggcccaagggatggcaccacttatttattgttgccttttcacgttttctttacacacacgttgacgggccgcaggagggaggcggggaggaggaacgggcagccacaggactgagccctctcactccagccaaagaaatgggcctgcctgcctccacccgtcctccctcagcctccccttcttcccgccccacctcccatttctgttgctgga

SEQ ID NO: 3819 - DNA, 2915 bp, Homo sapiens
  source 1..2915: mol_type = genomic DNA
cgccgtaggaggaggtggaggaggaggcggctcgggagagcgagcagcgagctggctggatcgccgagcgcgagtgagggagccgagccgcccgccgccgccgcctccgcctcccctccgcgaacaggagcccgggccggggcccggcacgccgccccagcccgtccctcggcgtcaggccgcgagggtagcgcgcgcgagcgagcgagggggagggagagcgagcgagcgccgggaggaggcggccggaccgagcgggcgcccgcgcgtgtggcgtgaggggaagccgcttgcccgcccccttcgccttcccttctctccccctccccgctccccccccgaccgcggagcagcaccatgtcggcgccggcggccaaagtcagtaaaaaggagctcaactccaaccacgacggggccgacgagacctcagaaaaagaacagcaagaagcgattgaacacattgatgaagtacaaaatgaaatagacagacttaatgaacaagccagtgaggagattttgaaagtagaacagaaatataacaaactccgccaaccattttttcagaagaggtcagaattgatcgccaaaatcccaaatttttgggtaacaacatttgtcaaccatccacaagtgtctgcactgcttggggaggaagatgaagaggcactgcattatttgaccagagttgaagtgacagaatttgaagatattaaatcaggttacagaatagatttttattttgatgaaaatccttactttgaaaataaagttctctccaaagaatttcatctgaatgagagtggtgatccatcttcgaagtccaccgaaatcaaatggaaatctggaaaggatttgacgaaacgttcgagtcaaacgcagaataaagccagcaggaagaggcagcatgaggaaccagagagcttctttacctggtttactgaccattctgatgcaggtgctgatgagttaggagaggtcatcaaagatgatatttggccaaacccattacagtactacttggttcccgatatggatgatgaagaaggagaaggagaagaagatgatgatgatgatgaagaggaggaaggattagaagatattgacgaagaaggggatgaggatgaaggtgaagaagatgaagatgatgatgaaggggaggaaggagaggaggatgaaggagaagatgactaaatagaacactgatggattccaaccttcctttttttaaattttctccagtccctgggagcaagttgcagtcttttttttttttttttttttttttccctcttgtgctcagtcgccctgttcttgaggtctcttttctctactccatggttctcaatttatttggggggaaataccttgagcagaatacaatgggaaaagagtctctacccctttctgttcgaagttcatttttatcccttcctgtctgaacaaaaactgtatggaatcaacaccaccgagctctgtgggaaaaaagaaaaacctgctcccttcgctctgctggaagctggagggtgctaggcccctgtgtagtagtgcatagaattctagcttttttcctcctttctctgtatattgggctcagagagtacactgtgtctctatgtgaatatggacagttagcatttaccaacatgtatctgtctactttctcttgtttaaaaaaagaaaaaaaaacttaaaaaaatggggttatagaaggtcagcaaagggtgggtttgagatgtttgggtgggttaagtgggcattttgacaacatggcttctcctttggcatgtttaattgtgatatttgacagacatccttgcagtttaagatgacacttttaaaataaattctctcctaatgatgacttgagccctgccactcaatgggagaatcagcagaacctgtaggatcttatttggaattgacattctctattgtaattttgttcctgtttatttttaaattttctttttgtttcactggaaaggaaagatgatgctcagttttaaacgttaaaagtgtacaagttgctttgttacaataaaactaaatgtgtacacaaaggatttgatgcttttctctcagcataggtatgcttactatgaccttccaagtttgacttgtataacatcactgtcaaactttgtcaccctaacttcgtattttttgatacgcactttgcaggatgacctcagggctatgtggattgagtaatgggatttgaatcaatgtattaatatctccatagctgggaaacgtgggttcaatttgccattggtttctgaaagtattcacatcatttgggataccagatagctcaatactctctgagtacattgtgcccttgatttttatctccaagtggcagtttttaaaattggccttttacctggatataaattaattgtgcctgccaccaccatccaacagacctggtgctctaatgccaagttatacacgggacagttgctggcatgtcttcattggctatataaaatgtggccaagaagataggctctcagtaagaagtctgatggtgagcagtaactgtccctgctttctggtataaagctctcaaatgtgaccatgtgaatctgggtgggataatggactcagctctgtctgctcaatgccattgtgcagagaagcaccctaatgcataagctttttaatgctgtaaaatatagtcgctgaaattaaatgccactttttcagaggtgaattaatggacagtctggtgaacttcaaaagctttttgatgtataaaacttgataaatggaactattccatcaataggcaaaagtgtaacaacctatctagatggatagtatgtaatttctgcacaggtctctgtttagtaaatacatcactgtataccgatcaggaatcttgctccaataaaggaacataaagattt

SEQ ID NO: 3820 - DNA, 1029 bp, Homo sapiens
  source 1..1029: mol_type = genomic DNA
gatgcctcgctcccatcagccgccgccgccgccacatgaaaaagaacagcaagaagcgattgaacacattgatgaagtacaaaatgaaatagacagacttaatgaacaagccagtgaggagattttgaaagtagaacagaaatataacaaactccgccaaccattttttcagaagaggtcagaattgatcgccaaaatcccaaatttttgggtaacaacatttgtcaaccatccacaagtgtctgcactgcttggggaggaagatgaagaggcactgcattatttgaccagagttgaagtgacagaatttgaagatattaaatcaggttacagaatagatttttattttgatgaaaatccttactttgaaaataaagttctctccaaagaatttcatctgaatgagagtggtgatccatcttcgaagtccaccgaaatcaaatggaaatctggaaaggatttgacgaaacgttcgagtcaaacgcagaataaagccagcaggaagaggcagcatgaggaaccagagagcttctttacctggtttactgaccattctgatgcaggtgctgatgagttaggagaggtcatcaaagatgatatttggccaaacccattacagtactacttggttcccgatatggatgatgaagaaggagaaggagaagaagatgatgatgatgatgaagaggaggaaggattagaagatattgacgaagaaggggatgaggatgaaggtgaagaagatgaagatgatgatgaaggggaggaaggagaggaggatgaaggagaagatgactaaatagaacactgatggattccaaccttcctttttttaaattttctccagtccctgggagcaagttgcagtcttttttttttttttttttttttttccctcttgtgctcagtcgccctgttcttgaggtctcttttctctactccatggttctcaatttatttggggggaaataccttgagcagaatacaatgggaaaagagtctctacccctttctgttcgaagttcattt

SEQ ID NO: 3821 - DNA, 1279 bp, Homo sapiens
  source 1..1279: mol_type = genomic DNA
atgatgcctcgctcccatcagccgccgccgccgccacatgaaaaagaacagcaagaagcgattgaacacattgatgaagtacaaaatgaaatagacagacttaatgaacaagccagtgaggagattttgaaagtagaacagaaatataacaaactccgccaaccattttttcagaagaggtcagaattgatcgccaaaatcccaaatttttgggtaacaacatttgtcaaccatccacaagtgtctgcactgcttggggaggaagatgaagaggcactgcattatttgaccagagttgaagtgacagaatttgaagatattaaatcaggttacagaatagatttttattttgatgaaaatccttactttgaaaataaagttctctccaaagaatttcatctgaatgagagtggtgatccatcttcgaagtccaccgaaatcaaatggaaatctggaaaggatttgacgaaacgttcgagtcaaacgcagaataaagccagcaggaagaggcagcatgaggaaccagagagcttctttacctggtttactgaccattctgatgcaggtgctgatgagttaggagaggtcatcaaagatgatatttggccaaacccattacagtactacttggttcccgatatggatgatgaagaaggagaaggagaagaagatgatgatgatgatgaagaggaggaaggattagaagatattgacgaagaaggggatgaggatgaaggtgaagaagatgaagatgatgatgaaggggaggaaggagaggaggatgaaggagaagatgactaaatagaacactgatggattccaaccttcctttttttaaattttctccagtccctgggagcaagttgcagtcttttttttttttttttttttttttccctcttgtgctcagtcgccctgttcttgaggtctcttttctctactccatggttctcaatttatttggggggaaataccttgagcagaatacaatgggaaaagagtctctacccctttctgttcgaagttcatttttatcccttcctgtctgaacaaaaactgtatggaatcaacaccaccgagctctgtgggaaaaaagaaaaacctgctcccttcgctctgctggaagctggagggtgctaggcccctgtgtagtagtgcatagaattctagcttttttcctcctttctctgtatattgggctcagagagtacactgtgtctctatgtgaatatggacagttagcatttaccaacatgtatctgtctactttctcttgttt

SEQ ID NO: 3822 - DNA, 2850 bp, Homo sapiens
  source 1..2850: mol_type = genomic DNA
gtgcccctgcagagcgaggcagagagcaactaaaagaaatttctcctgattggagggtgggtgggatgaggctgggggagggggccggggtgtgtgtcccactgtcatgtaaatatcccttccaggcagggcggctccagtgcagatttaagccgctggcacctggggcagtctcagtgttcagcctgcttccggacgggcgaggagactcgtggtctggttctgggacttccctaacagcatggcccctaaacgccagtctccactcccgcctcaaaagaagaaaccaagaccacctcctgctctgggaccggaggagacatcggcctctgcaggcttgccgaagaagggagaaaaagaacagcaagaagcgattgaacacattgatgaagtacaaaatgaaatagacagacttaatgaacaagccagtgaggagattttgaaagtagaacagaaatataacaaactccgccaaccattttttcagaagaggtcagaattgatcgccaaaatcccaaatttttgggtaacaacatttgtcaaccatccacaagtgtctgcactgcttggggaggaagatgaagaggcactgcattatttgaccagagttgaagtgacagaatttgaagatattaaatcaggttacagaatagatttttattttgatgaaaatccttactttgaaaataaagttctctccaaagaatttcatctgaatgagagtggtgatccatcttcgaagtccaccgaaatcaaatggaaatctggaaaggatttgacgaaacgttcgagtcaaacgcagaataaagccagcaggaagaggcagcatgaggaaccagagagcttctttacctggtttactgaccattctgatgcaggtgctgatgagttaggagaggtcatcaaagatgatatttggccaaacccattacagtactacttggttcccgatatggatgatgaagaaggagaaggagaagaagatgatgatgatgatgaagaggaggaaggattagaagatattgacgaagaaggggatgaggatgaaggtgaagaagatgaagatgatgatgaaggggaggaaggagaggaggatgaaggagaagatgactaaatagaacactgatggattccaaccttcctttttttaaattttctccagtccctgggagcaagttgcagtcttttttttttttttttttttttttccctcttgtgctcagtcgccctgttcttgaggtctcttttctctactccatggttctcaatttatttggggggaaataccttgagcagaatacaatgggaaaagagtctctacccctttctgttcgaagttcatttttatcccttcctgtctgaacaaaaactgtatggaatcaacaccaccgagctctgtgggaaaaaagaaaaacctgctcccttcgctctgctggaagctggagggtgctaggcccctgtgtagtagtgcatagaattctagcttttttcctcctttctctgtatattgggctcagagagtacactgtgtctctatgtgaatatggacagttagcatttaccaacatgtatctgtctactttctcttgtttaaaaaaagaaaaaaaaacttaaaaaaatggggttatagaaggtcagcaaagggtgggtttgagatgtttgggtgggttaagtgggcattttgacaacatggcttctcctttggcatgtttaattgtgatatttgacagacatccttgcagtttaagatgacacttttaaaataaattctctcctaatgatgacttgagccctgccactcaatgggagaatcagcagaacctgtaggatcttatttggaattgacattctctattgtaattttgttcctgtttatttttaaattttctttttgtttcactggaaaggaaagatgatgctcagttttaaacgttaaaagtgtacaagttgctttgttacaataaaactaaatgtgtacacaaaggatttgatgcttttctctcagcataggtatgcttactatgaccttccaagtttgacttgtataacatcactgtcaaactttgtcaccctaacttcgtattttttgatacgcactttgcaggatgacctcagggctatgtggattgagtaatgggatttgaatcaatgtattaatatctccatagctgggaaacgtgggttcaatttgccattggtttctgaaagtattcacatcatttgggataccagatagctcaatactctctgagtacattgtgcccttgatttttatctccaagtggcagtttttaaaattggccttttacctggatataaattaattgtgcctgccaccaccatccaacagacctggtgctctaatgccaagttatacacgggacagttgctggcatgtcttcattggctatataaaatgtggccaagaagataggctctcagtaagaagtctgatggtgagcagtaactgtccctgctttctggtataaagctctcaaatgtgaccatgtgaatctgggtgggataatggactcagctctgtctgctcaatgccattgtgcagagaagcaccctaatgcataagctttttaatgctgtaaaatatagtcgctgaaattaaatgccactttttcagaggtgaattaatggacagtctggtgaacttcaaaagctttttgatgtataaaacttgataaatggaactattccatcaataggcaaaagtgtaacaacctatctagatggatagtatgtaatttctgcacaggtctctgtttagtaaatacatcactgtataccgatcaggaatcttgctccaataaaggaacataaagattttttttggactgg

SEQ ID NO: 3823 - DNA, 962 bp, Homo sapiens
  source 1..962: mol_type = genomic DNA
aagaagcactgaggaggagtcctacctcagggctcagtgtggacctgttggcacttttactgggtctcagtcccttttcctccacatgggatgcagagacctcctgcccagcttgaaacctaccttgctggaaaaagaacagcaagaagcgattgaacacattgatgaagtacaaaatgaaatagacagacttaatgaacaagccagtgaggagattttgaaagtagaacagaaatataacaaactccgccaaccattttttcagaagaggtcagaattgatcgccaaaatcccaaatttttgggtaacaacatttgtcaaccatccacaagtgtctgcactgcttggggaggaagatgaagaggcactgcattatttgaccagagttgaagtgacagaatttgaagatattaaatcaggttacagaatagatttttattttgatgaaaatccttactttgaaaataaagttctctccaaagaatttcatctgaatgagagtggtgatccatcttcgaagtccaccgaaatcaaatggaaatctggaaaggatttgacgaaacgttcgagtcaaacgcagaataaagccagcaggaagaggcagcatgaggaaccagagagcttctttacctggtttactgaccattctgatgcaggtgctgatgagttaggagaggtcatcaaagatgatatttggccaaacccattacagtactacttggttcccgatatggatgatgaagaaggagaaggagaagaagatgatgatgatgatgaagaggaggaaggattagaagatattgacgaagaaggggatgaggatgaaggtgaagaagatgaagatgatgatgaaggggaggaaggagaggaggatgaaggagaagatgactaaatagaacactgatggattccaaccttcctttttttaaattttctccagtccctgggagcaagttgcagtc

SEQ ID NO: 3824 - DNA, 235 bp, Homo sapiens
  source 1..235: mol_type = genomic DNA
actgaggaatgttccaagcttaggcagggcggctccagtgcagatttaagccgctggcacctggggcagtctcagtgttcagcctgcttccggacgggcgaggagactcgtggtctggttctgggacttccctaacagcatggcccctaaacgccagtctccactcccgcctcaaaagaagaaaccaagaccacctcctgctctgggaccggaggagacatcggcctctgcaggc

SEQ ID NO: 3825 - DNA, 2415 bp, Homo sapiens
  source 1..2415: mol_type = genomic DNA
gcaggcaggctcctgcagtaactcttgagctggctcagggagcgcacttccttctcagccagcgcgtcgccccctgcatccgtggcctccactggagctgggcaggaccctacccagtgaatctggagaaaacaaacttgggagacagacgaaagcttagggcacattggaggacagcgcagctgtggctcccatttttggagatgcagtcgaatttgagctcacagggaggtgtggttgcctcctggggatggaaaggcttcctttctccacctctgtaactggtgcttctgagaagtaaatggtatttggatcctgacctcagacgcgaatttgggtcttctgtgcttaggagcagaaagagcccaggaggggcctgttcctttacttcttgggggaaacgcaatgcgtggcctgacttctcatgacgggaaaggctactccaccttctctgtactcctggaggggagtcttgttcacatgtttaccagcggccaggacaaggaagagaaaagaaatgagccgtcagactgctacagcattacctaccggtacctcgaagtgtccaccatcccagagggtgcctgccctgactggcacaactgcatccaacaatgacttggcgagtctttttgagtgtccagtctgctttgactatgtgttaccgcccattcttcaatgtcagagtggccatcttgtttgtagcaactgtcgcccaaagctcacatgttgtccaacttgccggggccctttgggatccattcgcaacttggctatggagaaagtggctaattcagtacttttcccctgtaaatatgcgtcttctggatgtgaaataactctgccacacacagaaaaagcagaccatgaagagctctgtgagtttaggccttattcctgtccgtgccctggtgcttcctgtaaatggcaaggctctctggatgctgtaatgccccatctgatgcatcagcataagtccattacaaccctacagggagaggatatagtttttcttgctacagacattaatcttcctggtgctgttgactgggtgatgatgcagtcctgttttggctttcacttcatgttagtcttagagaaacaggaaaaatacgatggtcaccagcagttcttcgcaatcgtacagctgataggaacacgcaagcaagctgaaaattttgcttaccgacttgagctaaatggtcataggcgacgattgacttgggaagcgactcctcgatctattcatgaaggaattgcaacagccattatgaatagcgactgtctagtctttgacaccagcattgcacagctttttgcagaaaatggcaatttaggcatcaatgtaactatttccatgtgttgaaatggcaatcaaacattttctggccagtgtttaaaacttcagtttcacagaaaataaggcacccatctgtctgccaacctaaaactctttcggtaggtggaagctagacacatgaaggtaaataaaaagaaaggctgttaaatacaggaaacagttgcatgtagtaacactaatatatttaaaaataagtcaacagtaaaccactgaaaaaatatatgtatatacacccaagatgggcatcttttgtattaagaaaggaagcattgtaaaataattctgagttttgtgtttgttgtagattgattgtattgttgaaaaagtttgtttttgcgtgggagtgtgtgcctgcgtgggtgtgtgcgtgtttgggtttttttcctttaactgacaagccatcttgagtggtcatgggccactgcttttccctttgtgagtcaatacatagtgctgctgtgtgctttttttgtgtgtatttgctaatttttattaattttagtttttcattaaataaatttgacttttctgtaattcaggtttttcctttttttgtaccattttaaagttagtatcttttgatatgcatatttgtttatggtaaaaaatttataacgtgttcaatattttcttttcccccattaatcagttcattagaaatattttaaaatcagctattttgtgaagccatgagttccagaaagtaaaggtgacatcggaaaaataatcaaaagctatttaaagcatctataaggtgctctctttctgtcttctacagatgagtcacacctttgagcttaatctttgaaaggttagagaataaattgatttttataaatactgcaaatcaggcttttgtttcctttttcagatatcttggacaaatcacatattttaaaatttgttcttgtatttattggttttgcagaagaaggcatcgtcatgcacagtatttgtaattaaaagcaaatcatttgtttaaaaaggcagtttgcaaaaaatgtttttggtcttttataattctcattaaaagaatatctggcaaattaaaaaaa

SEQ ID NO: 3826 - DNA, 3352 bp, Homo sapiens
  source 1..3352: mol_type = genomic DNA
tttcacccccaagacaaatagtggcctgccattttccagcccaggtagcttcctgggaaaagttgcttgttttatctttgactcagcctggctagttacattgtcgattatttcttccagatgatatttacctgttaaataatgtttattactctgctgatgaatgttttcagcaacgctggagaaccctaggctgcaaggggttcttcacctgttgactccatcccccacccccagtatggcatatatctctgccgtgctatcatctttattctttcctttttcattgtctcttcctgactgtcctcctttgttcattatgtctgacacatattgtggattgaaagtagaacagaaagatatactttctctaccagactaaaaagttttgagatggccctccatttctcccatgcctcacttcaccttagttgtgtttttatttatttttatattttcgccaccttcactagcgagtacatcccctcactcttgaggtgggcactgatcagtaggaaataagattaatacctggctggtgataatttggggggaagacttaattagatagagatggataatgggatggcagcagacctttccccttgtgacccttcccctcatttccaaaatacacctctagagtagataattgcttaccattaagaagagttaatggaaggtgatactctgattctttggcattggaactacattcaatccgcggtatcctcggattagttctaggacccccttctccataccaaaacctgaggatgctcaagtccctgatagaaaatggtgtcatatttgtatgtgcatattctcttgtataatttaagtgatctctggattacttaatacaatgtaaacaatatgtaaatagttgttatagactgtattttaaaaattttgtattctttataaatttttctgaatattttcaatccatggctggtgaagtcctcggatgcagaccgtgtggatacagagtgccgattttatacaggagttcacctgtaactccctgtacctatcaacagctgactccaaattagaaagaaatagagtaagggagcctcagggagagtcctagcaaaacggattcgattaaacttcagttccttgtatagtttctttagttgtttatggtccattttctattttagcatttattattctatgtagtctatccaaagacgattaagggagttccacatgttttccggaacattttgaaaagagagcttatccagtgtacagatcctaataaagtgcacattcagtgtaattttatttttttaatatcttttttaatcctatttttcttcctcttttgctcagtaaattttgtatgaaactttaaaaggacttatggcatgtaaacattatttataaagtaagtcatggttataattatttttctcctgcctccttatgtatttatttcagaaatgagccgtcagactgctacagcattacctaccggtacctcgaagtgtccaccatcccagagggtgcctgccctgactggcacaactgcatccaacaatgacttggcgagtctttttgagtgtccagtctgctttgactatgtgttaccgcccattcttcaatgtcagagtggccatcttgtttgtagcaactgtcgcccaaagctcacatgttgtccaacttgccggggccctttgggatccattcgcaacttggctatggagaaagtggctaattcagtacttttcccctgtaaatatgcgtcttctggatgtgaaataactctgccacacacagaaaaagcagaccatgaagagctctgtgagtttaggccttattcctgtccgtgccctggtgcttcctgtaaatggcaaggctctctggatgctgtaatgccccatctgatgcatcagcataagtccattacaaccctacagggagaggatatagtttttcttgctacagacattaatcttcctggtgctgttgactgggtgatgatgcagtcctgttttggctttcacttcatgttagtcttagagaaacaggaaaaatacgatggtcaccagcagttcttcgcaatcgtacagctgataggaacacgcaagcaagctgaaaattttgcttaccgacttgagctaaatggtcataggcgacgattgacttgggaagcgactcctcgatctattcatgaaggaattgcaacagccattatgaatagcgactgtctagtctttgacaccagcattgcacagctttttgcagaaaatggcaatttaggcatcaatgtaactatttccatgtgttgaaatggcaatcaaacattttctggccagtgtttaaaacttcagtttcacagaaaataaggcacccatctgtctgccaacctaaaactctttcggtaggtggaagctagacacatgaaggtaaataaaaagaaaggctgttaaatacaggaaacagttgcatgtagtaacactaatatatttaaaaataagtcaacagtaaaccactgaaaaaatatatgtatatacacccaagatgggcatcttttgtattaagaaaggaagcattgtaaaataattctgagttttgtgtttgttgtagattgattgtattgttgaaaaagtttgtttttgcgtgggagtgtgtgcctgcgtgggtgtgtgcgtgtttgggtttttttcctttaactgacaagccatcttgagtggtcatgggccactgcttttccctttgtgagtcaatacatagtgctgctgtgtgctttttttgtgtgtatttgctaatttttattaattttagtttttcattaaataaatttgacttttctgtaattcaggtttttcctttttttgtaccattttaaagttagtatcttttgatatgcatatttgtttatggtaaaaaatttataacgtgttcaatattttcttttcccccattaatcagttcattagaaatattttaaaatcagctattttgtgaagccatgagttccagaaagtaaaggtgacatcggaaaaataatcaaaagctatttaaagcatctataaggtgctctctttctgtcttctacagatgagtcacacctttgagcttaatctttgaaaggttagagaataaattgatttttataaatactgcaaatcaggcttttgtttcctttttcagatatcttggacaaatcacatattttaaaatttgttcttgtatttattggttttgcagaagaaggcatcgtcatgcacagtatttgtaattaaaagcaaatcatttgtttaaaaaggcagtttgcaaaaaatgtttttggtcttttataattctcattaaaagaatatctggcaaattaaaaaaa

SEQ ID NO: 3827 - DNA, 2147 bp, Homo sapiens
  source 1..2147: mol_type = genomic DNA
cagtgtgtggtatttagcgggggcgcgcggcgggctcgaggacgcgcgaaacggcggcggcggcggcggccaggggggagccggggcggccgttgcggggcgcgctctcgagaggcggcggcggcccagggtgtcccgtcggtctcggcgccgggaagaggcggtggcgctgcccgcggtggcgggggttggcgacggagcgcgttggtgccaggaccggggtccgaggcgcgctctccgcccacagaaatgagccgtcagactgctacagcattacctaccggtacctcgaagtgtccaccatcccagagggtgcctgccctgactggcacaactgcatccaacaatgacttggcgagtctttttgagtgtccagtctgctttgactatgtgttaccgcccattcttcaatgtcagagtggccatcttgtttgtagcaactgtcgcccaaagctcacatgttgtccaacttgccggggccctttgggatccattcgcaacttggctatggagaaagtggctaattcagtacttttcccctgtaaatatgcgtcttctggatgtgaaataactctgccacacacagaaaaagcagaccatgaagagctctgtgagtttaggccttattcctgtccgtgccctggtgcttcctgtaaatggcaaggctctctggatgctgtaatgccccatctgatgcatcagcataagtccattacaaccctacagggagaggatatagtttttcttgctacagacattaatcttcctggtgctgttgactgggtgatgatgcagtcctgttttggctttcacttcatgttagtcttagagaaacaggaaaaatacgatggtcaccagcagttcttcgcaatcgtacagctgataggaacacgcaagcaagctgaaaattttgcttaccgacttgagctaaatggtcataggcgacgattgacttgggaagcgactcctcgatctattcatgaaggaattgcaacagccattatgaatagcgactgtctagtctttgacaccagcattgcacagctttttgcagaaaatggcaatttaggcatcaatgtaactatttccatgtgttgaaatggcaatcaaacattttctggccagtgtttaaaacttcagtttcacagaaaataaggcacccatctgtctgccaacctaaaactctttcggtaggtggaagctagacacatgaaggtaaataaaaagaaaggctgttaaatacaggaaacagttgcatgtagtaacactaatatatttaaaaataagtcaacagtaaaccactgaaaaaatatatgtatatacacccaagatgggcatcttttgtattaagaaaggaagcattgtaaaataattctgagttttgtgtttgttgtagattgattgtattgttgaaaaagtttgtttttgcgtgggagtgtgtgcctgcgtgggtgtgtgcgtgtttgggtttttttcctttaactgacaagccatcttgagtggtcatgggccactgcttttccctttgtgagtcaatacatagtgctgctgtgtgctttttttgtgtgtatttgctaatttttattaattttagtttttcattaaataaatttgacttttctgtaattcaggtttttcctttttttgtaccattttaaagttagtatcttttgatatgcatatttgtttatggtaaaaaatttataacgtgttcaatattttcttttcccccattaatcagttcattagaaatattttaaaatcagctattttgtgaagccatgagttccagaaagtaaaggtgacatcggaaaaataatcaaaagctatttaaagcatctataaggtgctctctttctgtcttctacagatgagtcacacctttgagcttaatctttgaaaggttagagaataaattgatttttataaatactgcaaatcaggcttttgtttcctttttcagatatcttggacaaatcacatattttaaaatttgttcttgtatttattggttttgcagaagaaggcatcgtcatgcacagtatttgtaattaaaagcaaatcatttgtttaaaaaggcagtttgcaaaaaatgtttttggtcttttataattctcattaaaagaatatctggcaaattaaaaaaa

SEQ ID NO: 3828 - DNA, 1038 bp, Homo sapiens
  source 1..1038: mol_type = genomic DNA
gtgactgggctcctgggtagagttcaaggttggagtgaagcggcttccttgcggttgtgtgggtgtcccaacctgggtcgagataccccgcggttcaaaggctcccccgcagtgctttttaaattgacatatgcagtgataacctgctttagcctcaggctcactcacccgcccagaccctggagtgcccacgaccctccggctgtccacctcagcaatggcccaggacaagagcctatcgctgtcatgacctttgacctcaccaagatcacaaaaacctcctcctcctttgaggttcgaacctgggacccagagggagtgattttttatggggataccaaccctaaggatgactggtttatgctgggacttcgagacggcaggcctgagatccaactgcacaatcactgggcccagcttacggtgggtgctggaccacggctggatgatgggagatggcaccaggtggaagtcaagatggagggggactctgtgctgctggaggtggatggggaggaggtgctgcgcctgagacaggtctctgggcccctgaccagcaaacgccatcccatcatgaggattgcgcttggggggctgctcttccccgcttccaaccttcggttgccgctggttcctgccctggatggctgcctgcgccgggattcctggctggacaaacaggccgagatctcagcatctgcccccactagcctcagaagctgtgatgtagaatcaaatcccgggatatttctccctccagggactcaggcagaattcaatctccgagacattccccagcctcatgcagagccctgggccttctctttggacctgggactcaagcaggcagcaggctcaggccacctccttgctcttgggacaccagagaacccatcttggctcagtctccacctccaagatcaagagaagactcttccacctctttttgcctgaatggcctttgggcacaaggtcagaggctggatgtggaccaggccctgaacagaagccatgagatctggactcacagctgccccc

SEQ ID NO: 3829 - DNA, 1263 bp, Homo sapiens
  source 1..1263: mol_type = genomic DNA
cgccgagtggacagtggctgattatggagagcagaggcccactggctacctcgcgcctgctgctgttgctgctgttgctactactgcgtcacacccgccagggatgggccctgagacctgttctccccacccagagtgcccacgaccctccggctgtccacctcagcaatggcccaggacaagagcctatcgctgtcatgacctttgacctcaccaagatcacaaaaacctcctcctcctttgaggttcgaacctgggacccagagggagtgattttttatggggataccaaccctaaggatgactggtttatgctgggacttcgagacggcaggcctgagatccaactgcacaatcactgggcccagcttacggtgggtgctggaccacggctggatgatgggagatggcaccaggtggaagtcaagatggagggggactctgtgctgctggaggtggatggggaggaggtgctgcgcctgagacaggtctctgggcccctgaccagcaaacgccatcccatcatgaggattgcgcttggggggctgctcttccccgcttccaaccttcggttgccgctggttcctgccctggatggctgcctgcgccgggattcctggctggacaaacaggccgagatctcagcatctgcccccactagcctcagaagctgtgatgtagaatcaaatcccgggatatttctccctccagggactcaggcagaattcaatctccgagacattccccagcctcatgcagagccctgggccttctctttggacctgggactcaagcaggcagcaggctcaggccacctccttgctcttgggacaccagagaacccatcttggctcagtctccacctccaagatcaaaaggtggtgttgtcttctgggtcggggccagggctggatctgcccctggtcttgggactccctcttcagctgaagctgagtatgtccagggtggtcttgagccaagggtcgaagatgaaggcccttgccctgcctcccttaggcctggctcccctccttaacctctgggccaagcctcaagggcgtctcttcctgggggctttaccaggagaagactcttccacctctttttgcctgaatggcctttgggcacaaggtcagaggctggatgtggaccaggccctgaacagaagccatgagatctggactcacagctgcccccagagcccaggcaatggcactgacgcttcccattaaagctccacctaagaaccccctttgaaagtta

SEQ ID NO: 3830 - DNA, 1069 bp, Homo sapiens
  source 1..1069: mol_type = genomic DNA
aagagttgtctgagccgccgagtggacagtggctgattatggagagcagaggcccactggctacctcgcgcctgctgctgttgctgctgttgctactactgcgtcacacccgccagggatgggccctgagacctgttctccccacccagagtgcccacgaccctccggctgtccacctcagcaatggcccaggacaagagcctatcgctgtcatgacctttgacctcaccaagatcacaaaaacctcctcctcctttgaggttcgaacctgggacccagagggagtgattttttatggggataccaaccctaaggatgactggtttatgctgggacttcgagacggcaggcctgagatccaactgcacaatcactgggcccagcttacggtgggtgctggaccacggctggatgatgggagatggcaccaggtggaagtcaagatggagggggactctgtgctgctggaggtggatggggaggaggtgctgcgcctgagacaggtctctgggcccctgaccagcaaacgccatcccatcatgaggattgcgcttggggggctgctcttccccgcttccaaccttcggttgccgctggttcctgccctggatggctgcctgcgccgggattcctggctggacaaacaggccgagatctcagcatctgcccccactagcctcagaagctgtgatgtagaatcaaatcccgggatatttctccctccagggactcaggcagaattcaatctccgagacattccccagcctcatgcagagccctgggccttctctttggacctgggactcaagcaggcagcaggctcaggccacctccttgctcttgggacaccagagaacccatcttggctcagtctccacctccaagatcaagagaagactcttccacctctttttgcctgaatggcctttgggcacaaggtcagaggctggatgtggaccaggccctgaacagaagccatgagatctggactcacagctgcccccagagcccaggcaatggcactgacgcttcccattaaagctccacctaagaaccccctttgaaagtt

SEQ ID NO: 3831 - DNA, 907 bp, Homo sapiens
  source 1..907: mol_type = genomic DNA
aagagttgtctgagccgccgagtggacagtggctgattatggagagcagaggcccactggctacctcgcgcctgctgctgttgctgctgttgctactactgcgtcacacccgccagggatgggccctgagacctgttctccccacccagagtgcccacgaccctccggctgtccacctcagcaatggcccaggacaagagcctatcgctgtcatgacctttgacctcaccaagatcacaaaaacctcctcctcctttgaggttcgaacctgggacccagagggagtgattttttatggggataccaaccctaaggatgactggtttatgctgggacttcgagacggcaggcctgagatccaactgcacaatcactgggcccagcttacggtgggtgctggaccacggctggatgatgggagatggcaccagctggttcctgccctggatggctgcctgcgccgggattcctggctggacaaacaggccgagatctcagcatctgcccccactagcctcagaagctgtgatgtagaatcaaatcccgggatatttctccctccagggactcaggcagaattcaatctccgagacattccccagcctcatgcagagccctgggccttctctttggacctgggactcaagcaggcagcaggctcaggccacctccttgctcttgggacaccagagaacccatcttggctcagtctccacctccaagatcaagagaagactcttccacctctttttgcctgaatggcctttgggcacaaggtcagaggctggatgtggaccaggccctgaacagaagccatgagatctggactcacagctgcccccagagcccaggcaatggcactgacgcttcccattaaagctccacctaagaaccccctttgaaagtt

SEQ ID NO: 3832 - DNA, 932 bp, Homo sapiens
  source 1..932: mol_type = genomic DNA
aagagttgtctgagccgccgagtggacagtggctgattatggagagcagaggcccactggctacctcgcgcctgctgctgttgctgctgttgctactactgcgtcacacccgccagggatgggccctgagacctgttctccccacccagagtgcccacgaccctccggctgtccacctcagcaatggcccaggacaagagcctatcgctgtcatgacctttgacctcaccaagatcacaaaaacctcctcctcctttgaggttcgaacctgggacccagagggagtgattttttatggggataccaaccctaaggatgactggtttatgctgggacttcgagacggcaggcctgagatccaactgcacaatcactgggcccagcttacggtgggtgctggaccacggctggatgatgggagatggcaccaggtggaagtcaagatggagggggactctgtgctgctggaggtggatggggaggaggtgctgcgcctgagacaggtctctgggcccctgaccagcaaacgccatcccatcatgaggattgcgcttggggggctgctcttccccgcttccaaccttcggttgccgctggttcctgccctggatggctgcctgcgccgggattcctggctggacaaacaggccgagatctcagcatctgcccccactagcctcagaagctgtgatgtagaatcaaatcccgggatatttctccctccagggactcaggcagaattcaatctccgaggagaagactcttccacctctttttgcctgaatggcctttgggcacaaggtcagaggctggatgtggaccaggccctgaacagaagccatgagatctggactcacagctgcccccagagcccaggcaatggcactgacgcttcccattaaagctccacctaagaaccccctttgaaagtt

SEQ ID NO: 3833 - DNA, 610 bp, Homo sapiens
  source 1..610: mol_type = genomic DNA
aagagttgtctgagccgccgagtggacagtggctgattatggagagcagaggcccactggctacctcgcgcctgctgctgttgctgctgttgctactactgcgtcacacccgccagggatgggccctgagacctgttctccccacccagagtgcccacgaccctccggctgtccacctcagcaatggcccaggacaagagcctatcgctgtcatgacctttgacctcaccaagatcacaaaaacctcctcctcctttgaggttcgaacctgggacccagagggagtgattttttatggggataccaaccctaaggatgactggtttatgctgggacttcgagacggcaggcctgagatccaactgcacaatcactgggcccagcttacggtgggtgctggaccacggctggatgatgggagatggcaccaggagaagactcttccacctctttttgcctgaatggcctttgggcacaaggtcagaggctggatgtggaccaggccctgaacagaagccatgagatctggactcacagctgcccccagagcccaggcaatggcactgacgcttcccattaaagctccacctaagaaccccctttgaaagtt

SEQ ID NO: 3834 - DNA, 1196 bp, Homo sapiens
  source 1..1196: mol_type = genomic DNA
ccgagtggacagtggctgattatggagagcagaggcccactggctacctcgcgcctgctgctgttgctgctgttgctactactgcgtcacacccgccagggatgggccctgagacctgttctccccacccagagtgcccacgaccctccggctgtccacctcagcaatggcccaggacaagagcctatcgctgtcatgacctttgacctcaccaagatcacaaaaacctcctcctcctttgaggttcgaacctgggacccagagggagtgattttttatggggataccaaccctaaggatgactggtttatgctgggacttcgagacggcaggcctgagatccaactgcacaatcactgggcccagcttacggtgggtgctggaccacggctggatgatgggagatggcaccaggtggaagtcaagatggagggggactctgtgctgctggaggtggatggggaggaggtgctgcgcctgagacaggtctctgggcccctgaccagcaaacgccatcccatcatgaggattgcgcttggggggctgctcttccccgcttccaaccttcggttgccggccgagatctcagcatctgcccccactagcctcagaagctgtgatgtagaatcaaatcccgggatatttctccctccagggactcaggcagaattcaatctccgagacattccccagcctcatgcagagccctgggccttctctttggacctgggactcaagcaggcagcaggctcaggccacctccttgctcttgggacaccagagaacccatcttggctcagtctccacctccaagatcaaaaggtggtgttgtcttctgggtcggggccagggctggatctgcccctggtcttgggactccctcttcagctgaagctgagtatgtccagggtggtcttgagccaagggtcgaagatgaaggcccttgccctgcctcccttaggcctggctcccctccttaacctctgggccaagcctcaagggcgtctcttcctgggggctttaccaggagaagactcttccacctctttttgcctgaatggcctttgggcacaaggtcagaggctggatgtggaccaggccctgaacagaagccatgagatctggactcacagctgcccccagagcccaggcaatggcactgacgcttcccattaaagctccacctaagaaccccc

SEQ ID NO: 3835 - DNA, 1599 bp, Homo sapiens
  source 1..1599: mol_type = genomic DNA
gggtaaggcgacatttcctgcccccggggccagggtgagaggagagatgatgagttgctgagtgtgcacacctttccggaacacatacacacaccctgctctgggatcccttgtgaggctgccctcatggagttccccctggcccagatatgtccccaagcaccttccagatcacagacatgacccgcaggagctgccagaacctgggctacactgcggcatctccccaggccccggaggctgcctccaacacagggaatgctgagagggcagaggaggtgcctggagaaggaagcctgttcctgcaggccgagacccgggcttggttccagaagacccaggcccactggctcctgcagcacggggcagcccctgcctggttccatggcttcatcacccggagggaggcagagaggctgctggagcccaagcctcaggggtgctacttggtgcggttcagcgagagcgcggtgaccttcgtgctgacttacaggagccggacttgctgccgccacttcctgctggcccagctcagggacgggcgccacgtggtgctgggcgaggacagcgcccacgcgcggctgcaggacctgctgctgcactacaccgcgcacccgctcagcccctacggggagacgctcaccgagcccctcgcccgacagactcctgagcctgcaggactttccctgaggaccgaagaatcaaactttggaagcaaaagccaggacccaaacccccagtacagcccaatcatcaaacaggggcaagccccagtcccgatgcagaaagagggggccggggagaaggagccctcccagctgctcaggcccaagcctcccatccccgccaaacctcagctgcccccagaagtctacacaatccctgttccacgacaccgcccggccccacgccccaagccctccaatcctatctacaatgagcctgatgaacccatagctttctatgccatgggccggggcagccctggggaagcccccagcaacatctatgtggaagtggaagatgagggcctacccgccacccttgggcaccctgtcctacggaagagctggtccaggcctgtcccaggaggccagaatacaggtggctcccagctgcattctgagaactctgtgattgggcaaggccctcccctgccccaccagcccccacccgcctggagacacaccctcccccacaatctttctagacaggtgcttcaggacagaggacaggcatggcttccccttgggcctcctcagtaggcggtctggcctgacccccaacaaagaagcctggaggtcagagaagcaaatgcggagcctgctccctcctaagaagatcccaagaatccaatggctcagtccttggtgatctaagacagcaaagaagtgtgcaaggagggccctgttagctcccactgtcctggtttctcctcctggagtctaatttccttggccctctgagccttttgagtctgggccctggtccaatgctgctgttgtctgaggaatggtttggtgagaacagatgttagaacttgtttgttgattcttgtctggctaataaatcatcaccaactgccttctcctacaggga

SEQ ID NO: 3836 - DNA, 1658 bp, Homo sapiens
  source 1..1658: mol_type = genomic DNA
cgtgagtcctcgccagaactaaggctgtgggtaaggcgacatttcctgcccccggggccagggtgagaggagagatgatgagttgctgagtgtgcacacctttccggaacacatacacacaccctgctctgggatcccttgtgaggctgccctcatggagttccccctggcccagatatgtccccaagggagtcacgaagcccccatcccaaccttcagcaccttccagatcacagacatgacccgcaggagctgccagaacctgggctacactgcggcatctccccaggccccggaggctgcctccaacacagggaatgctgagagggcagaggaggtgcctggagaaggaagcctgttcctgcaggccgagacccgggcttggttccagaagacccaggcccactggctcctgcagcacggggcagcccctgcctggttccatggcttcatcacccggagggaggcagagaggctgctggagcccaagcctcaggggtgctacttggtgcggttcagcgagagcgcggtgaccttcgtgctgacttacaggagccggacttgctgccgccacttcctgctggcccagctcagggacgggcgccacgtggtgctgggcgaggacagcgcccacgcgcggctgcaggacctgctgctgcactacaccgcgcacccgctcagcccctacggggagacgctcaccgagcccctcgcccgacagactcctgagcctgcaggactttccctgaggaccgaagaatcaaactttggaagcaaaagccaggacccaaacccccagtacagcccaatcatcaaacaggggcaagccccagtcccgatgcagaaagagggggccggggagaaggagccctcccagctgctcaggcccaagcctcccatccccgccaaacctcagctgcccccagaagtctacacaatccctgttccacgacaccgcccggccccacgccccaagccctccaatcctatctacaatgagcctgatgaacccatagctttctatgccatgggccggggcagccctggggaagcccccagcaacatctatgtggaagtggaagatgagggcctacccgccacccttgggcaccctgtcctacggaagagctggtccaggcctgtcccaggaggccagaatacaggtggctcccagctgcattctgagaactctgtgattgggcaaggccctcccctgccccaccagcccccacccgcctggagacacaccctcccccacaatctttctagacaggtgcttcaggacagaggacaggcatggcttccccttgggcctcctcagtaggcggtctggcctgacccccaacaaagaagcctggaggtcagagaagcaaatgcggagcctgctccctcctaagaagatcccaagaatccaatggctcagtccttggtgatctaagacagcaaagaagtgtgcaaggagggccctgttagctcccactgtcctggtttctcctcctggagtctaatttccttggccctctgagccttttgagtctgggccctggtccaatgctgctgttgtctgaggaatggtttggtgagaacagatgttagaacttgtttgttgattcttgtctggctaataaatcatcaccaactgccttctcctacaggga

SEQ ID NO: 3837 - DNA, 1673 bp, Homo sapiens
  source 1..1673: mol_type = genomic DNA
agaactaaggctgtgggtaaggcgacatttcctgcccccggggccagggtgagaggagagatgatgagttgctgagtgtgcacacctttccggaacacatacacacaccctgctctgggatcccttgtgaggctgccctcatggagttccccctggcccagatatgtccccaagggagtcacgaagcccccatcccaaccttcagcaccttccagatcacagacatgacccgcaggagctgccagaacctgggctacactgcggcatctccccaggccccggaggctgcctccaacacagggaatgctgagagggcagaggaggtgcctggagaaggaagcctgttcctgcaggccgagacccgggcttggttccagaagacccaggcccactggctcctgcagcacggggcagcccctgcctggttccatggcttcatcacccggagggttcggccccctctctccgtcacccacagggaggcagagaggctgctggagcccaagcctcaggggtgctacttggtgcggttcagcgagagcgcggtgaccttcgtgctgacttacaggagccggacttgctgccgccacttcctgctggcccagctcagggacgggcgccacgtggtgctgggcgaggacagcgcccacgcgcggctgcaggacctgctgctgcactacaccgcgcacccgctcagcccctacggggagacgctcaccgagcccctcgcccgacagactcctgagcctgcaggactttccctgaggaccgaagaatcaaactttggaagcaaaagccaggacccaaacccccagtacagcccaatcatcaaacaggggcaagccccagtcccgatgcagaaagagggggccggggagaaggagccctcccagctgctcaggcccaagcctcccatccccgccaaacctcagctgcccccagaagtctacacaatccctgttccacgacaccgcccggccccacgccccaagccctccaatcctatctacaatgagcctgatgaacccatagctttctatgccatgggccggggcagccctggggaagcccccagcaacatctatgtggaagtggaagatgagggcctacccgccacccttgggcaccctgtcctacggaagagctggtccaggcctgtcccaggaggccagaatacaggtggctcccagctgcattctgagaactctgtgattgggcaaggccctcccctgccccaccagcccccacccgcctggagacacaccctcccccacaatctttctagacaggtgcttcaggacagaggacaggcatggcttccccttgggcctcctcagtaggcggtctggcctgacccccaacaaagaagcctggaggtcagagaagcaaatgcggagcctgctccctcctaagaagatcccaagaatccaatggctcagtccttggtgatctaagacagcaaagaagtgtgcaaggagggccctgttagctcccactgtcctggtttctcctcctggagtctaatttccttggccctctgagccttttgagtctgggccctggtccaatgctgctgttgtctgaggaatggtttggtgagaacagatgttagaacttgtttgttgattcttgtctggctaataaatcatcaccaactgccttctcctacaggg

SEQ ID NO: 3838 - DNA, 5356 bp, Homo sapiens
  source 1..5356: mol_type = genomic DNA
cacaaatctgtgattacctggcgggtgaaccgctccggtggcggggagagcgggctcccagcgctgggtaggggccgggttccggcgagcgccatcccggagcgtcagtttcccagtttgggaagtgaggagaacctgcctcgcccttccccgccaaggcttagggaagtgtggctgtccagctgggctgagtcgcccaagaaggacgtgacaggtgccgacgccaccgccgagcccatgatcctggaacagtacgtggtggtgtccaactataagaagcaggagaactcggagctgagcctccaggccggggaggtggtggatgtcatcgagaagaacgagagcggctggtggttcgtgagcacttctgaggagcagggctgggtccctgccacctacctggaggcccagaatggtactcgggatgactccgacatcaacacctctaagactggagaagaggagaagtatgtcaccgtgcagccttacaccagccaaagcaaggacgagattggctttgagaagggcgtcacagtggaggtgatccggaagaatctggaaggctggtggtatatcagatacctgggcaaagagggctgggcgccagcatcctacctgaagaaggccaaggatgacctgccaacccggaagaagaacctggccggcccagtggagatcattgggaacatcatggagatcagcaacctgctgaacaagaaggcgtctggggacaaggaaactccaccagccgaaggcgagggccatgaggcccccattgccaagaaggagatcagcctgcccatcctctgcaatgcctccaatggcagtgccgtgggcgttcctgacaggactgtctccaggctggcccagggctctccagctgtggccaggattgcccctcagcgggcccagatcagctccccgaacctacggacaagacctccaccacgcagagaatccagcctggggttccaactgccaaagccaccagagcccccttctgttgaggtggagtactacaccattgccgaattccagtcgtgcatttccgatggcatcagctttcggggtggacagaaggcagaggtcattgataagaactcaggtggctggtggtacgtgcagatcggtgagaaggagggctgggcccccgcatcatacatcgataagcgcaagaagcccaacctgagccgccgcacaagcacgctgacccggcccaaggtgcccccgccagcaccccccagcaagcccaaggaggccgaggagggccctacgggggccagtgagagccaggactccccgcggaagctcaagtatgaggagcctgagtatgacatccctgcattcggctttgactcagagcctgagctgagcgaggagcccgtggaggacagagcctcaggggagaggcggcctgcccagccccaccggccctcgccggcctcttctctgcagcgggcccgcttcaaggtgggtgagtcttcagaggatgtggccctggaagaggagaccatctatgagaatgagggcttccggccatatgcagaggacaccctgtcagccagaggctcctccggggacagcgactccccaggcagctcctcgctgtccctgaccaggaaaaactcccccaaatcaggctcccccaagtcatcatcactcctaaagctcaaggcagagaagaatgcccaggcagaaatggggaagaaccactcctcagcctccttttcctcatccatcaccatcaacaccacttgctgctcctcctcttcctcctcctcctcttccttgtccaaaaccagtggcgacctgaagccccgctctgcttcggacgcaggcatccgcggcactcccaaggtcagggcaaagaaggatgctgatgcgaacgctgggctgacctcctgtccccgggccaagccatcggtccggcccaagccattcctaaaccgagcagagtcgcagagccaagagaagatggacatcagcactttacggcgccagctgagacccacaggccagctccgtggagggctcaagggctccaagagtgaggattcggagctgcccccgcagacggcctccgaggctcccagtgaggggtctaggagaagctcatccgacctcatcaccctcccagccaccactcccccatgtcccaccaagaaggaatgggaagggccagccacctcgtacatgacatgcagcgcctaccagaaggtccaggactcggagatcagcttccccgcgggcgtggaggtgcaggtgctggagaagcaggagagcgggtggtggtatgtgaggtttggggagctggagggctgggccccttcccactatttggtgctggatgagaacgagcaacctgacccctctggcaaagagctggacacagtgcccgccaagggcaggcagaacgaaggcaaatcagacagcctggagaagatcgagaggcgcgtccaagcactgaacaccgtcaaccagagcaagaaggccacgccccccatcccctccaaacctcccgggggcttcggcaagacctcaggcactccagcggtgaagatgaggaacggagtgcggcaggtggcggtcaggccccagtcggtgtttgtgtccccgccacccaaggacaacaacctgtcctgcgccctgcggaggaatgagtcactcacggccactgatggcctccgaggcgtccgacggaactcctcctttagcactgctcgctccgctgccgccgaggccaagggccgcctggccgaacgggctgccagccagggttcagactcacccctactgcccgcccagcgcaacagcatacccgtgtcccctgtgcgccccaagcccatcgagaagtctcagttcatccacaataacctcaaagatgtgtacgtctctatcgcagactacgagggggatgaggagacagcaggcttccaggagggggtgtccatggaggttctggagaggaaccctaatggctggtggtactgccagatcctggatggtgtgaagcccttcaaaggctgggtgccttccaactaccttgagaaaaagaactagcagagggcctgggctcttccagcctcagtgtgcctctctggccgcccactggatgagcggtgagacgaacaaaagggaaaggaaaaaatgggggtggggggtggggggtggacaacattcaacactgcagaatgggtgacctcaaagatgccccctgtccaagccatcccacagctggaaggtaggggatgggggtgcccacactgagtgaggaagggaatggaccagggagtcccaggcctgggacccagagccaagaaagctgagatatcctgtgcaccatagggacttcaccaatggattacatgccatctgggacaggccatgtgggagaccccagttgtgcctttgctacagatctggaaaagacaaggtcatgggggcctccagtgtcctgcccctgcttggcccagttttgattgctggcatcttgccaccccaggtatccctggtattgtcctaagctgtatttgtgaattgtgctggtttcctgggcattgccacgcctaccacaggtgggtacattagaagccaccactggctttcaggcttgggggtgtcttctgagctcaagcctgcttctgggccaggccattgtcactgttagttgaagaaaaagcagttcccaggtgccagcaaagaccatctttcataactgtcactgtcttggccttgagaagagagcccgctctccgtggggcaccccatggaggacacagtaccagagtttacagagagggtgggcgaagccaccggtctcttcctaatctgcacagactattttgggtatttctgggcgggcagttcctttgcatgtttcgggagaggtttgttgatttggggcttatatgtcaggcctttggtttgcgtcttattttaggggttgtttgggggcctgggtggtcggcctcacatgggaaggggatgggtagtggatggggtttctgttgtatcttgtgggcgggtgattttgcttttgtttttgtttcacattcttccccctccacaagccaaagtcgtttcatttggtttccactgtgtggactgtgctggagcttggcgcctgccagaaaaatttggggctaggcaagccccaggttgcagacatggtgaagcagagaaactgttcttctggttcctgcacaacctcagaggggcaaaaaccctccccaggaaggaggagggtgttcaggagccagacttttggagagaaggcagctcccagcctgctgggtgaccgccattctgcgtgtgttccccagctgggcagggctggaagccttacgtatgaagcatggagaagcagccattgtccccactatgggcagaggggggacccggctggccccttgggtcagactggagccaacaccgccagccaccccctctggcctgctggcaatgccacaggtgcccaagaagatggaggatccctgtgccaggagccaacctggtcttcccgagggtcagtgccccagtgaagacagaagcgagagaataaagttccctgtaggtcctctgtcacctttgggttgtgtttttcaattgttgacatttcagaggggaccctccagaagcccagccggcttcccccaaggactcccccttcgctgggagtggatttccacacgtgcctttgatttcggacagattgggcctcacagccaccgattcagctgccagggtccctggactgggggttggtgttttctatagaggaggaaaggccctccctcaccctgctccccacccaggcagggcagcatgggacccagtgtctcagtgccttcaaaacccacccccacccctaccctaccccaccacaccccatcccagaggccttgcctgggcaaccctaagcccctgtccctcgccatacactgatgcctggcagctagagcaaatggctcgtgttctttgtcgaaggcctgtggtgagattgttttgtttccttttgttttgtgagtttgtttaaaattgaaattagttattttcttctgctggacagtattaaatagagcaggatgttgagttaatctgctagattgcagtactaatggtagtggtttagtgtcttcatgttaatattatttgtacttatttgaacaataatgataaagaagtggttcattattttttaattaatgcactttaaataaggtagaatggaaaaaacccagagagcaaagtgcattacttaaagatgcagtatatacttttctcatttttaaacagcacatatttattaagagaaaaaaagtaatttatgactatttaaaataaaatttaaaagtag

SEQ ID NO: 3839 - DNA, 11245 bp, Homo sapiens
  source 1..11245: mol_type = genomic DNA
ccgggagtccgggcagcgttcggcgcgccgggccggggtggcgggcggccccgggaccccggcagctggagaaggagccggagcccggccgggatgagaaggtgacgccgccgggggcgccactcgctttgtgggggaagatgctcgcctactgcgtgcaggatgccaccgtggtggacgtggagaagcggaggaacccctccaagcactacgtatacataatcaatgtgacctggtctgactccacctcccagactatctaccggaggtacagcaagttctttgacctgcagatgcagcttttggataagtttcccattgaaggtggccagaaggaccccaagcaaaggatcatccccttcctcccaggcaagatcctcttccgcagaagccacatccgggacgtagctgtgaagagactgaagcccatcgatgaatactgccgggcacttgtccggctgcccccccacatctcacagtgtgacgaagtcttccggttcttcgaggctcgacccgaggatgtcaaccctccaaaagaggactatggcagttccaagaggaaatcagtgtggctgtccagctgggctgagtcgcccaagaaggacgtgacaggtgccgacgccaccgccgagcccatgatcctggaacagtacgtggtggtgtccaactataagaagcaggagaactcggagctgagcctccaggccggggaggtggtggatgtcatcgagaagaacgagagcggctggtggttcgtgagcacttctgaggagcagggctgggtccctgccacctacctggaggcccagaatggtactcgggatgactccgacatcaacacctctaagactggagaagaggagaagtatgtcaccgtgcagccttacaccagccaaagcaaggacgagattggctttgagaagggcgtcacagtggaggtgatccggaagaatctggaaggctggtggtatatcagatacctgggcaaagagggctgggcgccagcatcctacctgaagaaggccaaggatgacctgccaacccggaagaagaacctggccggcccagtggagatcattgggaacatcatggagatcagcaacctgctgaacaagaaggcgtctggggacaaggaaactccaccagccgaaggcgagggccatgaggcccccattgccaagaaggagatcagcctgcccatcctctgcaatgcctccaatggcagtgccgtgggcgttcctgacaggactgtctccaggctggcccagggctctccagctgtggccaggattgcccctcagcgggcccagatcagctccccgaacctacggacaagacctccaccacgcagagaatccagcctggggttccaactgccaaagccaccagagcccccttctgttgaggtggagtactacaccattgccgaattccagtcgtgcatttccgatggcatcagctttcggggtggacagaaggcagaggtcattgataagaactcaggtggctggtggtacgtgcagatcggtgagaaggagggctgggcccccgcatcatacatcgataagcgcaagaagcccaacctgagccgccgcacaagcacgctgacccggcccaaggtgcccccgccagcaccccccagcaagcccaaggaggccgaggagggccctacgggggccagtgagagccaggactccccgcggaagctcaagtatgaggagcctgagtatgacatccctgcattcggctttgactcagagcctgagctgagcgaggagcccgtggaggacagagcctcaggggagaggcggcctgcccagccccaccggccctcgccggcctcttctctgcagcgggcccgcttcaaggtgggtgagtcttcagaggatgtggccctggaagaggagaccatctatgagaatgagggcttccggccatatgcagaggacaccctgtcagccagaggctcctccggggacagcgactccccaggcagctcctcgctgtccctgaccaggaaaaactcccccaaatcaggctcccccaagtcatcatcactcctaaagctcaaggcagagaagaatgcccaggcagaaatggggaagaaccactcctcagcctccttttcctcatccatcaccatcaacaccacttgctgctcctcctcttcctcctcctcctcttccttgtccaaaaccagtggcgacctgaagccccgctctgcttcggacgcaggcatccgcggcactcccaaggtcagggcaaagaaggatgctgatgcgaacgctgggctgacctcctgtccccgggccaagccatcggtccggcccaagccattcctaaaccgagcagagtcgcagagccaagagaagatggacatcagcactttacggcgccagctgagacccacaggccagctccgtggagggctcaagggctccaagagtgaggattcggagctgcccccgcagacggcctccgaggctcccagtgaggggtctaggagaagctcatccgacctcatcaccctcccagccaccactcccccatgtcccaccaagaaggaatgggaagggccagccacctcgtacatgacatgcagcgcctaccagaaggtccaggactcggagatcagcttccccgcgggcgtggaggtgcaggtgctggagaagcaggagagcgggtggtggtatgtgaggtttggggagctggagggctgggccccttcccactatttggtgctggatgagaacgagcaacctgacccctctggcaaagagctggacacagtgcccgccaagggcaggcagaacgaaggcaaatcagacagcctggagaagatcgagaggcgcgtccaagcactgaacaccgtcaaccagagcaagaaggccacgccccccatcccctccaaacctcccgggggcttcggcaagacctcaggcactccagcggtgaagatgaggaacggagtgcggcaggtggcggtcaggccccagtcggtgtttgtgtccccgccacccaaggacaacaacctgtcctgcgccctgcggaggaatgagtcactcacggccactgatggcctccgaggcgtccgacggaactcctcctttagcactgctcgctccgctgccgccgaggccaagggccgcctggccgaacgggctgccagccagggttcagactcacccctactgcccgcccagcgcaacagcatacccgtgtcccctgtgcgccccaagcccatcgagaagtctcagttcatccacaataacctcaaagatgtgtacgtctctatcgcagactacgagggggatgaggagacagcaggcttccaggagggggtgtccatggaggttctggagaggaaccctaatggctggtggtactgccagatcctggatggtgtgaagcccttcaaaggctgggtgccttccaactaccttgagaaaaagaactagcagagggcctgggctcttccagcctcagtgtgcctctctggccgcccactggatgagcggtgagacgaacaaaagggaaaggaaaaaatgggggtggggggtggggggtggacaacattcaacactgcagaatgggtgacctcaaagatgccccctgtccaagccatcccacagctggaaggtaggggatgggggtgcccacactgagtgaggaagggaatggaccagggagtcccaggcctgggacccagagccaagaaagctgagatatcctgtgcaccatagggacttcaccaatggattacatgccatctgggacaggccatgtgggagaccccagttgtgcctttgctacagatctggaaaagacaaggtcatgggggcctccagtgtcctgcccctgcttggcccagttttgattgctggcatcttgccaccccaggtatccctggtattgtcctaagctgtatttgtgaattgtgctggtttcctgggcattgccacgcctaccacaggtgggtacattagaagccaccactggctttcaggcttgggggtgtcttctgagctcaagcctgcttctgggccaggccattgtcactgttagttgaagaaaaagcagttcccaggtgccagcaaagaccatctttcataactgtcactgtcttggccttgagaagagagcccgctctccgtggggcaccccatggaggacacagtaccagagtttacagagagggtgggcgaagccaccggtctcttcctaatctgcacagactattttgggtatttctgggcgggcagttcctttgcatgtttcgggagaggtttgttgatttggggcttatatgtcaggcctttggtttgcgtcttattttaggggttgtttgggggcctgggtggtcggcctcacatgggaaggggatgggtagtggatggggtttctgttgtatcttgtgggcgggtgattttgcttttgtttttgtttcacattcttccccctccacaagccaaagtcgtttcatttggtttccactgtgtggactgtgctggagcttggcgcctgccagaaaaatttggggctaggcaagccccaggttgcagacatggtgaagcagagaaactgttcttctggttcctgcacaacctcagaggggcaaaaaccctccccaggaaggaggagggtgttcaggagccagacttttggagagaaggcagctcccagcctgctgggtgaccgccattctgcgtgtgttccccagctgggcagggctggaagccttacgtatgaagcatggagaagcagccattgtccccactatgggcagaggggggacccggctggccccttgggtcagactggagccaacaccgccagccaccccctctggcctgctggcaatgccacaggtgcccaagaagatggaggatccctgtgccaggagccaacctggtcttcccgagggtcagtgccccagtgaagacagaagcgagagaataaagttccctgtaggtcctctgtcacctttgggttgtgtttttcaattgttgacatttcagaggggaccctccagaagcccagccggcttcccccaaggactcccccttcgctgggagtggatttccacacgtgcctttgatttcggacagattgggcctcacagccaccgattcagctgccagggtccctggactgggggttggtgttttctatagaggaggaaaggccctccctcaccctgctccccacccaggcagggcagcatgggacccagtgtctcagtgccttcaaaacccacccccacccctaccctaccccaccacaccccatcccagaggccttgcctgggcaaccctaagcccctgtccctcgccatacactgatgcctggcagctagagcaaatggctcgtgttctttgtcgaaggcctgtggtgagattgttttgtttccttttgttttgtgagtttgtttaaaattgaaattagttattttcttctgctggacagtattaaatagagcaggatgttgagttaatctgctagattgcagtactaatggtagtggtttagtgtcttcatgttaatattatttgtacttatttgaacaataatgataaagaagtggttcattattttttaattaatgcactttaaataaggtagaatggaaaaaacccagagagcaaagtgcattacttaaagatgcagtatatacttttctcatttttaaacagcacatatttattaagagaaaaaaagtaatttatgactatttaaaataaaatttaaaagtagagtgactgtcaggtaaagaaccttcaatgtagctatcttccagggggagggccctgcagcctcgctcctcagatgtctgcactgagccagttcagtcactagtgcgccagccaggccaggagggagtgcagagcatgtctgccaagcacagagcatctcagttggactggaccacagtgctcccgagagcctgcctttcctgcccttccccaccacctgcactgccccccacattctcccagccccccccaaggaccccctctccttgacccccagtgctgtaagtaatagagtcattaaaatgcaggactgaaagagacctcagaggtctctatcccatcccttcctgttactgcggcccaaggacaggaaacaacttttccaaaatcccacagctagttaatgacagatctccccactacattaatcccgtgctcctcctcactgccattatagtttattgtgtggtcatgtttacattgtgacatccagccccaaggatggctgggagttgctcaggcatccaggaaaagtggggaatgctgccatctggtgacagcatgtagatttgggcagtgaacagggattgccatgccccagtcttcgcacctcgccccctcaccccctaactcacagcacaaaccctgcaaacccaaagagaatattaatacttgaagcaagaagggtgcatgccagtccttctccgacatggccagggggtaccaggccttgtgcgcctggcctcctagccctagccagggcgagagggcctttcccttgagctactgagctgctttgtgatgctgaaggatactgccggcagcaggcagaggagggagggggcctagggctctgacccatctggaggaaaaccagatcggactaaaaaaggaaaaagaaaaacaaaatctccgcagtgtccaaacctagtttcccatgagttgcgactgaaaatgtgaaacgacactgtattgctgtatactgcaactttaaccataatgagcccttctgaggtcattattgaggttcatataatgcccgaagatgcagcatttggtgctttgttttcctttccgtttcaagacctttttcttttattgcaaggggaaaaaaatgtcatctccccccacctcatccctctttgtgacagcagacctggctgtgttgcccctctcctcctcactattctcaccaggccatgggactttgggggcagtgagagagagctggaaaggggcaaccctgagcagcaggtgtgccccatgccctgtgggtttcccctatgtccaatgactgtagacgggctgtcttgccaggcctcagccccgtctaccctaagcctggccccaaaggtttctctttcttcctccttgattttccatcttgacgaaggcattatatagaatcattttaatcactttcagatgttagagcagcgtattttacaggcatttatatccattgctttcctcagcaaggcatgttactacttttatcatctaaggaaaaaagacaagggaattccagtcaggcattattttcctattactagtgtttgcagaataggtgtaggactatttaagtttagaccttggtttggtagttcttgtttttaataaggggaaaaagataaaataacccctatttttcctgttattgtatttaactaatatattatttctttaaggttactcacttcccctacccctccaaataccttgcattctcaatcaaaaatggaaacaatctgagagacaggaaaagtgcaatattaccaagatggatgccagggctcattggggacaatggagggaataccagtggcgctcagagagcaagaggcagggagcggggtgctgaaggaatcctagctgtggaacaggtgggtgggttggtggagtttgatcttgtggcgttctcctctcccccttctttgggaagatgataggggtccctgccagatccacccagaagaaagggattcaggcatggggcccttgacctctaggccccagtccctggagcagaggcaggccctcgggagctgttccttgttttgatttctgttgtggtgcagccagctgctcagagagacctggcctaaaaatgactcccagcagccctctctcaccccagtgtcctgatatttgggctgtgatccttctggtgtatgtttgaatctttctaaaactgggtgccctcagttcagtttctaggcaggaagcctagaagtcaccagatctttttgggggatgtgagaaccttgagccgcgcacaccctggtgagacaccaattcccacaagcctgcagcagggcctggggctgagcctgggctgcccattcatctcagcgacttcagcctgagaagtgagccctgcctgggctccacacccagagagtccatacaaattctgctccgggaagagtcggggggtctattcaagtttctctgcagacaaaacttcccacaacaggtaccaatctggcctccttcctcagcaccggtagagaaagcaacagaatgggaagtttcctctgggttggagcctcagagctctgcccctcaaggtgacagggacgtccctgtggcttgttccctccacctccagtactgtatgcttgctacttcaaccccctatttggtgaatttctgcacagacacagatctctgtgcctggaatgggactgtgccctgtgcgggtctctcccttggcgtatatccatctagatatttagtctttgagaatctcaaagcagagctctctgggaagagaactgtccacattgctaaataattaagattccctcacttttttgagggccatgtgttgtgagagagagagagagagagagagtgtgtgtgtgtgtgtgtgtgtgtgtgtgtctgtgtatgcaagtgttggtaacttcccacttgaactaaataacatggggttagagaaaaaaaaataccaggcaagctgtctccattgaacaagtccttggcaatgggcaggtcccaagggactcacagcttctggcagcaagtgtgtcattcacacacatcattctggctggagagtgcaatgtgtcatttttttttctttttgtaattattttattaagtatttagttggaaatttcacactggcattaacaggtctagcataagtggcctaggcagtcatcccaggctccaaaatgaagatgtgcaaaagagatgccactgggaatagaaacactgagttggttcagttaggtcatcccctgcagacgtgtcatcgagcaggctgactcccacccctcagccatgccatgggtatgagaagccccttataatgaaagctgccagccctttcgtccttgtttcagagggtgggtcaggtggttggggtgagaacttgctcacggtgcacccaacaagacctgcaggtgcatataagtttagtcccaactgcagggccagaccaaacacttcctgggaagtgtgtggagggctgtgctagaccttcctgagtttctggctaaatcatcagccctgtttggtgcagtctcatgtctctgtggttcccaagctgcatgatcagagccagtgagaagacaggatcagtgacccacagctttggggaaaaacagccccactgttaacttccctcctgcaaacctgggtccccaggccataaggtgggcacactggtgcttacagactgggtggagagccctaccttccaaggtcttgatcccagcctgcctataaggttgggattagcatgcaatcccccttccccaatcctgtctttttaaaatctcaagtttgcacttaaccttgacaacagcaccctctcctactccagtcctagaactcagtggccttagagaatggggtcccctgcactgaaggtccccgccttgctcccagttccatcctggccaataggctgcgcctcaagaggtgaaagagaaaaaagggagggagggaggaagaattatttagaacaaaaggatggctcgagcacgttagaggcaagtgagaggcacgttggtgagaagagcatgtgcatgtttggggtagctggggcctactgtcccttcattagggaaggaggcttccagaagcggatgtcttctagaaagaaaaattgtgtgaaggctgaaaaggggcttggagttttgtctttgttgattagaaagaaggaagaagtcagctctgagtgtttcaggaagaagagagcaggtagaaagggaatttagtgatttaacacccaagggtccagccatagcaggttggaaaatcctccaaatttggccacagaaactggctaggaaaaaactgccactcattgggccacacgctgggtccccatcagttctcaatgaatggtcattgatttacttagcagagagaagtcaccagccacaaaccaatctttgagtttgcaggccctgattccagaatatatgcatccagctcccgggttctcagctggttttgcccacttccctttgactgtccaatccaaagccagtctctcaagttgtatggctcaaagagcagtgaccacaatgggtcatacagtagggacccacctccacaaattagaaccagagttcagactccattgggcacatctgggaggaaggcaacctcctttgtcgtcttgttggtaccagtcattctcaagtatctctgacacctgtggtggttcagtttgctgagcctgccacctggtatgaattagactgggtgtgatgaacattcatccatggatataccctaccattttgcgttgccttataaccaaggcacactccccataagagtttactgcagagaaagaacagcaaaacagccaccctccttgaatttacaactcattatctgcaacaggttttctttaaatccaagacacaggatgggaaatgggtttccccaccaggtactcagaggtctgcaggaagtgactcccgggcaaggcagacttcagtaatccctgaagcgtgagcatgtggactgcatggctgggtggggactggtggatgtctctggagctccagaaccttggagaattcctcatggaattcccctcccagctcttagtgggctctgtggggtcaggaggagcccttcctccaggttttccttctttcctcctcagcagagaaactggagaaaggacattaaactcagtgcagtcgatttgagtgctgaaatatttccagaatcaatggtggtgctaaactatctccatgtttctagcatttttaatagtggagttggtttgtttttaatctcatcacaaaaatgcagtgcccttggggaagggaccagccccttggcctgccactttccaggtgtcctttatcactttgacgggactctttggtctgcagaaaatgctctgtcttggcatgcttctagactgtaagatttgggttttgttttgtattttatgtttacatgcatcttatatttccctgaaaactaaataaagttttgggcctttttaaccg

SEQ ID NO: 3840 - DNA, 11468 bp, Homo sapiens
  source 1..11468: mol_type = genomic DNA
gcgagcgggcgagcgcagcgcggcggccgcgcgggagtgaaggggcgcgcggcaggccggcggggagtcccccggggcgcacggagcccgcgcgccctccgggaccctcccccgtccctgggccggacctgtgggcgccgggagtccgggcagcgttcggcgcgccgggccggggtggcgggcggccccgggaccccggcagctggagaaggagccggagcccggccgggatgagaaggtgacgccgccgggggcgccactcgctttgtgggggaagatgctcgcctactgcgtgcaggatgccaccgtggtggacgtggagaagcggaggaacccctccaagcactacgtatacataatcaatgtgacctggtctgactccacctcccagactatctaccggaggtacagcaagttctttgacctgcagatgcagcttttggataagtttcccattgaaggtggccagaaggaccccaagcaaaggatcatccccttcctcccaggcaagatcctcttccgcagaagccacatccgggacgtagctgtgaagagactgaagcccatcgatgaatactgccgggcacttgtccggctgcccccccacatctcacagtgtgacgaagtcttccggttcttcgaggctcgacccgaggatgtcaaccctccaaaagaggactatggcagttccaagaggaaatcagtgtggctgtccagctgggctgagtcgcccaagaaggacgtgacaggtgccgacgccaccgccgagcccatgatcctggaacagtacgtggtggtgtccaactataagaagcaggagaactcggagctgagcctccaggccggggaggtggtggatgtcatcgagaagaacgagagcggctggtggttcgtgagcacttctgaggagcagggctgggtccctgccacctacctggaggcccagaatggtactcgggatgactccgacatcaacacctctaagactggagaagtgtccaagagacgcaaggcccatctgcggcgcctggatcgccggtggaccctgggcgggatggtcaacaggcagcacagccgagaggagaagtatgtcaccgtgcagccttacaccagccaaagcaaggacgagattggctttgagaagggcgtcacagtggaggtgatccggaagaatctggaaggctggtggtatatcagatacctgggcaaagagggctgggcgccagcatcctacctgaagaaggccaaggatgacctgccaacccggaagaagaacctggccggcccagtggagatcattgggaacatcatggagatcagcaacctgctgaacaagaaggcgtctggggacaaggaaactccaccagccgaaggcgagggccatgaggcccccattgccaagaaggagatcagcctgcccatcctctgcaatgcctccaatggcagtgccgtgggcgttcctgacaggactgtctccaggctggcccagggctctccagctgtggccaggattgcccctcagcgggcccagatcagctccccgaacctacggacaagacctccaccacgcagagaatccagcctggggttccaactgccaaagccaccagagcccccttctgttgaggtggagtactacaccattgccgaattccagtcgtgcatttccgatggcatcagctttcggggtggacagaaggcagaggtcattgataagaactcaggtggctggtggtacgtgcagatcggtgagaaggagggctgggcccccgcatcatacatcgataagcgcaagaagcccaacctgagccgccgcacaagcacgctgacccggcccaaggtgcccccgccagcaccccccagcaagcccaaggaggccgaggagggccctacgggggccagtgagagccaggactccccgcggaagctcaagtatgaggagcctgagtatgacatccctgcattcggctttgactcagagcctgagctgagcgaggagcccgtggaggacagagcctcaggggagaggcggcctgcccagccccaccggccctcgccggcctcttctctgcagcgggcccgcttcaaggtgggtgagtcttcagaggatgtggccctggaagaggagaccatctatgagaatgagggcttccggccatatgcagaggacaccctgtcagccagaggctcctccggggacagcgactccccaggcagctcctcgctgtccctgaccaggaaaaactcccccaaatcaggctcccccaagtcatcatcactcctaaagctcaaggcagagaagaatgcccaggcagaaatggggaagaaccactcctcagcctccttttcctcatccatcaccatcaacaccacttgctgctcctcctcttcctcctcctcctcttccttgtccaaaaccagtggcgacctgaagccccgctctgcttcggacgcaggcatccgcggcactcccaaggtcagggcaaagaaggatgctgatgcgaacgctgggctgacctcctgtccccgggccaagccatcggtccggcccaagccattcctaaaccgagcagagtcgcagagccaagagaagatggacatcagcactttacggcgccagctgagacccacaggccagctccgtggagggctcaagggctccaagagtgaggattcggagctgcccccgcagacggcctccgaggctcccagtgaggggtctaggagaagctcatccgacctcatcaccctcccagccaccactcccccatgtcccaccaagaaggaatgggaagggccagccacctcgtacatgacatgcagcgcctaccagaaggtccaggactcggagatcagcttccccgcgggcgtggaggtgcaggtgctggagaagcaggagagcgggtggtggtatgtgaggtttggggagctggagggctgggccccttcccactatttggtgctggatgagaacgagcaacctgacccctctggcaaagagctggacacagtgcccgccaagggcaggcagaacgaaggcaaatcagacagcctggagaagatcgagaggcgcgtccaagcactgaacaccgtcaaccagagcaagaaggccacgccccccatcccctccaaacctcccgggggcttcggcaagacctcaggcactccagcggtgaagatgaggaacggagtgcggcaggtggcggtcaggccccagtcggtgtttgtgtccccgccacccaaggacaacaacctgtcctgcgccctgcggaggaatgagtcactcacggccactgatggcctccgaggcgtccgacggaactcctcctttagcactgctcgctccgctgccgccgaggccaagggccgcctggccgaacgggctgccagccagggttcagactcacccctactgcccgcccagcgcaacagcatacccgtgtcccctgtgcgccccaagcccatcgagaagtctcagttcatccacaataacctcaaagatgtgtacgtctctatcgcagactacgagggggatgaggagacagcaggcttccaggagggggtgtccatggaggttctggagaggaaccctaatggctggtggtactgccagatcctggatggtgtgaagcccttcaaaggctgggtgccttccaactaccttgagaaaaagaactagcagagggcctgggctcttccagcctcagtgtgcctctctggccgcccactggatgagcggtgagacgaacaaaagggaaaggaaaaaatgggggtggggggtggggggtggacaacattcaacactgcagaatgggtgacctcaaagatgccccctgtccaagccatcccacagctggaaggtaggggatgggggtgcccacactgagtgaggaagggaatggaccagggagtcccaggcctgggacccagagccaagaaagctgagatatcctgtgcaccatagggacttcaccaatggattacatgccatctgggacaggccatgtgggagaccccagttgtgcctttgctacagatctggaaaagacaaggtcatgggggcctccagtgtcctgcccctgcttggcccagttttgattgctggcatcttgccaccccaggtatccctggtattgtcctaagctgtatttgtgaattgtgctggtttcctgggcattgccacgcctaccacaggtgggtacattagaagccaccactggctttcaggcttgggggtgtcttctgagctcaagcctgcttctgggccaggccattgtcactgttagttgaagaaaaagcagttcccaggtgccagcaaagaccatctttcataactgtcactgtcttggccttgagaagagagcccgctctccgtggggcaccccatggaggacacagtaccagagtttacagagagggtgggcgaagccaccggtctcttcctaatctgcacagactattttgggtatttctgggcgggcagttcctttgcatgtttcgggagaggtttgttgatttggggcttatatgtcaggcctttggtttgcgtcttattttaggggttgtttgggggcctgggtggtcggcctcacatgggaaggggatgggtagtggatggggtttctgttgtatcttgtgggcgggtgattttgcttttgtttttgtttcacattcttccccctccacaagccaaagtcgtttcatttggtttccactgtgtggactgtgctggagcttggcgcctgccagaaaaatttggggctaggcaagccccaggttgcagacatggtgaagcagagaaactgttcttctggttcctgcacaacctcagaggggcaaaaaccctccccaggaaggaggagggtgttcaggagccagacttttggagagaaggcagctcccagcctgctgggtgaccgccattctgcgtgtgttccccagctgggcagggctggaagccttacgtatgaagcatggagaagcagccattgtccccactatgggcagaggggggacccggctggccccttgggtcagactggagccaacaccgccagccaccccctctggcctgctggcaatgccacaggtgcccaagaagatggaggatccctgtgccaggagccaacctggtcttcccgagggtcagtgccccagtgaagacagaagcgagagaataaagttccctgtaggtcctctgtcacctttgggttgtgtttttcaattgttgacatttcagaggggaccctccagaagcccagccggcttcccccaaggactcccccttcgctgggagtggatttccacacgtgcctttgatttcggacagattgggcctcacagccaccgattcagctgccagggtccctggactgggggttggtgttttctatagaggaggaaaggccctccctcaccctgctccccacccaggcagggcagcatgggacccagtgtctcagtgccttcaaaacccacccccacccctaccctaccccaccacaccccatcccagaggccttgcctgggcaaccctaagcccctgtccctcgccatacactgatgcctggcagctagagcaaatggctcgtgttctttgtcgaaggcctgtggtgagattgttttgtttccttttgttttgtgagtttgtttaaaattgaaattagttattttcttctgctggacagtattaaatagagcaggatgttgagttaatctgctagattgcagtactaatggtagtggtttagtgtcttcatgttaatattatttgtacttatttgaacaataatgataaagaagtggttcattattttttaattaatgcactttaaataaggtagaatggaaaaaacccagagagcaaagtgcattacttaaagatgcagtatatacttttctcatttttaaacagcacatatttattaagagaaaaaaagtaatttatgactatttaaaataaaatttaaaagtagagtgactgtcaggtaaagaaccttcaatgtagctatcttccagggggagggccctgcagcctcgctcctcagatgtctgcactgagccagttcagtcactagtgcgccagccaggccaggagggagtgcagagcatgtctgccaagcacagagcatctcagttggactggaccacagtgctcccgagagcctgcctttcctgcccttccccaccacctgcactgccccccacattctcccagccccccccaaggaccccctctccttgacccccagtgctgtaagtaatagagtcattaaaatgcaggactgaaagagacctcagaggtctctatcccatcccttcctgttactgcggcccaaggacaggaaacaacttttccaaaatcccacagctagttaatgacagatctccccactacattaatcccgtgctcctcctcactgccattatagtttattgtgtggtcatgtttacattgtgacatccagccccaaggatggctgggagttgctcaggcatccaggaaaagtggggaatgctgccatctggtgacagcatgtagatttgggcagtgaacagggattgccatgccccagtcttcgcacctcgccccctcaccccctaactcacagcacaaaccctgcaaacccaaagagaatattaatacttgaagcaagaagggtgcatgccagtccttctccgacatggccagggggtaccaggccttgtgcgcctggcctcctagccctagccagggcgagagggcctttcccttgagctactgagctgctttgtgatgctgaaggatactgccggcagcaggcagaggagggagggggcctagggctctgacccatctggaggaaaaccagatcggactaaaaaaggaaaaagaaaaacaaaatctccgcagtgtccaaacctagtttcccatgagttgcgactgaaaatgtgaaacgacactgtattgctgtatactgcaactttaaccataatgagcccttctgaggtcattattgaggttcatataatgcccgaagatgcagcatttggtgctttgttttcctttccgtttcaagacctttttcttttattgcaaggggaaaaaaatgtcatctccccccacctcatccctctttgtgacagcagacctggctgtgttgcccctctcctcctcactattctcaccaggccatgggactttgggggcagtgagagagagctggaaaggggcaaccctgagcagcaggtgtgccccatgccctgtgggtttcccctatgtccaatgactgtagacgggctgtcttgccaggcctcagccccgtctaccctaagcctggccccaaaggtttctctttcttcctccttgattttccatcttgacgaaggcattatatagaatcattttaatcactttcagatgttagagcagcgtattttacaggcatttatatccattgctttcctcagcaaggcatgttactacttttatcatctaaggaaaaaagacaagggaattccagtcaggcattattttcctattactagtgtttgcagaataggtgtaggactatttaagtttagaccttggtttggtagttcttgtttttaataaggggaaaaagataaaataacccctatttttcctgttattgtatttaactaatatattatttctttaaggttactcacttcccctacccctccaaataccttgcattctcaatcaaaaatggaaacaatctgagagacaggaaaagtgcaatattaccaagatggatgccagggctcattggggacaatggagggaataccagtggcgctcagagagcaagaggcagggagcggggtgctgaaggaatcctagctgtggaacaggtgggtgggttggtggagtttgatcttgtggcgttctcctctcccccttctttgggaagatgataggggtccctgccagatccacccagaagaaagggattcaggcatggggcccttgacctctaggccccagtccctggagcagaggcaggccctcgggagctgttccttgttttgatttctgttgtggtgcagccagctgctcagagagacctggcctaaaaatgactcccagcagccctctctcaccccagtgtcctgatatttgggctgtgatccttctggtgtatgtttgaatctttctaaaactgggtgccctcagttcagtttctaggcaggaagcctagaagtcaccagatctttttgggggatgtgagaaccttgagccgcgcacaccctggtgagacaccaattcccacaagcctgcagcagggcctggggctgagcctgggctgcccattcatctcagcgacttcagcctgagaagtgagccctgcctgggctccacacccagagagtccatacaaattctgctccgggaagagtcggggggtctattcaagtttctctgcagacaaaacttcccacaacaggtaccaatctggcctccttcctcagcaccggtagagaaagcaacagaatgggaagtttcctctgggttggagcctcagagctctgcccctcaaggtgacagggacgtccctgtggcttgttccctccacctccagtactgtatgcttgctacttcaaccccctatttggtgaatttctgcacagacacagatctctgtgcctggaatgggactgtgccctgtgcgggtctctcccttggcgtatatccatctagatatttagtctttgagaatctcaaagcagagctctctgggaagagaactgtccacattgctaaataattaagattccctcacttttttgagggccatgtgttgtgagagagagagagagagagagagtgtgtgtgtgtgtgtgtgtgtgtgtgtgtctgtgtatgcaagtgttggtaacttcccacttgaactaaataacatggggttagagaaaaaaaaataccaggcaagctgtctccattgaacaagtccttggcaatgggcaggtcccaagggactcacagcttctggcagcaagtgtgtcattcacacacatcattctggctggagagtgcaatgtgtcatttttttttctttttgtaattattttattaagtatttagttggaaatttcacactggcattaacaggtctagcataagtggcctaggcagtcatcccaggctccaaaatgaagatgtgcaaaagagatgccactgggaatagaaacactgagttggttcagttaggtcatcccctgcagacgtgtcatcgagcaggctgactcccacccctcagccatgccatgggtatgagaagccccttataatgaaagctgccagccctttcgtccttgtttcagagggtgggtcaggtggttggggtgagaacttgctcacggtgcacccaacaagacctgcaggtgcatataagtttagtcccaactgcagggccagaccaaacacttcctgggaagtgtgtggagggctgtgctagaccttcctgagtttctggctaaatcatcagccctgtttggtgcagtctcatgtctctgtggttcccaagctgcatgatcagagccagtgagaagacaggatcagtgacccacagctttggggaaaaacagccccactgttaacttccctcctgcaaacctgggtccccaggccataaggtgggcacactggtgcttacagactgggtggagagccctaccttccaaggtcttgatcccagcctgcctataaggttgggattagcatgcaatcccccttccccaatcctgtctttttaaaatctcaagtttgcacttaaccttgacaacagcaccctctcctactccagtcctagaactcagtggccttagagaatggggtcccctgcactgaaggtccccgccttgctcccagttccatcctggccaataggctgcgcctcaagaggtgaaagagaaaaaagggagggagggaggaagaattatttagaacaaaaggatggctcgagcacgttagaggcaagtgagaggcacgttggtgagaagagcatgtgcatgtttggggtagctggggcctactgtcccttcattagggaaggaggcttccagaagcggatgtcttctagaaagaaaaattgtgtgaaggctgaaaaggggcttggagttttgtctttgttgattagaaagaaggaagaagtcagctctgagtgtttcaggaagaagagagcaggtagaaagggaatttagtgatttaacacccaagggtccagccatagcaggttggaaaatcctccaaatttggccacagaaactggctaggaaaaaactgccactcattgggccacacgctgggtccccatcagttctcaatgaatggtcattgatttacttagcagagagaagtcaccagccacaaaccaatctttgagtttgcaggccctgattccagaatatatgcatccagctcccgggttctcagctggttttgcccacttccctttgactgtccaatccaaagccagtctctcaagttgtatggctcaaagagcagtgaccacaatgggtcatacagtagggacccacctccacaaattagaaccagagttcagactccattgggcacatctgggaggaaggcaacctcctttgtcgtcttgttggtaccagtcattctcaagtatctctgacacctgtggtggttcagtttgctgagcctgccacctggtatgaattagactgggtgtgatgaacattcatccatggatataccctaccattttgcgttgccttataaccaaggcacactccccataagagtttactgcagagaaagaacagcaaaacagccaccctccttgaatttacaactcattatctgcaacaggttttctttaaatccaagacacaggatgggaaatgggtttccccaccaggtactcagaggtctgcaggaagtgactcccgggcaaggcagacttcagtaatccctgaagcgtgagcatgtggactgcatggctgggtggggactggtggatgtctctggagctccagaaccttggagaattcctcatggaattcccctcccagctcttagtgggctctgtggggtcaggaggagcccttcctccaggttttccttctttcctcctcagcagagaaactggagaaaggacattaaactcagtgcagtcgatttgagtgctgaaatatttccagaatcaatggtggtgctaaactatctccatgtttctagcatttttaatagtggagttggtttgtttttaatctcatcacaaaaatgcagtgcccttggggaagggaccagccccttggcctgccactttccaggtgtcctttatcactttgacgggactctttggtctgcagaaaatgctctgtcttggcatgcttctagactgtaagatttgggttttgttttgtattttatgtttacatgcatcttatatttccctgaaaactaaataaagttttgggcctttttaaccgaa

SEQ ID NO: 3841 - DNA, 3251 bp, Homo sapiens
  source 1..3251: mol_type = genomic DNA
gttctttgacctgcagatgcagcttttggataagtttcccattgaaggtggccagaaggaccccaagcaaaggatcatccccttcctcccaggcaagatcctcttccgcagaagccacatccgggacgtagctgtgaagagactgaagcccatcgatgaatactgccgggcacttgtccggctgcccccccacatctcacagtgtgacgaagtcttccggttcttcgaggctcgacccgaggatgtcaaccctccaaaagaggactatggcagttccaagaggaaatcagtgtggctgtccagctgggctgagtcgcccaagaaggacgtgacaggtgccgacgccaccgccgagcccatgatcctggaacagtacgtggtggtgtccaactataagaagcaggagaactcggagctgagcctccaggccggggaggtggtggatgtcatcgagaagaacgagagcggctggtggttcgtgagcacttctgaggagcagggctgggtccctgccacctacctggaggcccagaatggtactcgggatgactccgacatcaacacctctaagactggagaagaggagaagtatgtcaccgtgcagccttacaccagccaaagcaaggacgagattggctttgagaagggcgtcacagtggaggtgatccggaagaatctggaaggctggtggtatatcagatacctgggcaaagagggctgggcgccagcatcctacctgaagaaggccaaggatgacctgccaacccggaagaagaacctggccggcccagtggagatcattgggaacatcatggagatcagcaacctgctgaacaagaaggcgtctggggacaaggaaactccaccagccgaaggcgagggccatgaggcccccattgccaagaaggagatcagcctgcccatcctctgcaatgcctccaatggcagtgccgtgggcgttcctgacaggactgtctccaggctggcccagggctctccagctgtggccaggattgcccctcagcgggcccagatcagctccccgaacctacggacaagacctccaccacgcagagaatccagcctggggttccaactgccaaagccaccagagcccccttctgttgaggtggagtactacaccattgccgaattccagtcgtgcatttccgatggcatcagctttcggggtggacagaaggcagaggtcattgataagaactcaggtggctggtggtacgtgcagatcggtgagaaggagggctgggcccccgcatcatacatcgataagcgcaagaagcccaacctgagccgccgcacaagcacgctgacccggcccaaggtgcccccgccagcaccccccagcaagcccaaggaggccgaggagggccctacgggggccagtgagagccaggactccccgcggaagctcaagtatgaggagcctgagtatgacatccctgcattcggctttgactcagagcctgagctgagcgaggagcccgtggaggacagagcctcaggggagaggcggcctgcccagccccaccggccctcgccggcctcttctctgcagcgggcccgcttcaaggtgggtgagtcttcagaggatgtggccctggaagaggagaccatctatgagaatgagggcttccggccatatgcagaggacaccctgtcagccagaggctcctccggggacagcgactccccaggcagctcctcgctgtccctgaccaggaaaaactcccccaaatcaggctcccccaagtcatcatcactcctaaagctcaaggcagagaagaatgcccaggcagaaatggggaagaaccactcctcagcctccttttcctcatccatcaccatcaacaccacttgctgctcctcctcttcctcctcctcctcttccttgtccaaaaccagtggcgacctgaagccccgctctgcttcggacgcaggcatccgcggcactcccaaggtcagggcaaagaaggatgctgatgcgaacgctgggctgacctcctgtccccgggccaagccatcggtccggcccaagccattcctaaaccgagcagagtcgcagagccaagagaagatggacatcagcactttacggcgccagctgagacccacaggccagctccgtggagggctcaagggctccaagagtgaggattcggagctgcccccgcagacggcctccgaggctcccagtgaggggtctaggagaagctcatccgacctcatcaccctcccagccaccactcccccatgtcccaccaagaaggaatgggaagggccagccacctcgtacatgacatgcagcgcctaccagaaggtccaggactcggagatcagcttccccgcgggcgtggaggtgcaggtgctggagaagcaggagagcgggtggtggtatgtgaggtttggggagctggagggctgggccccttcccactatttggtgctggatgagaacgagcaacctgacccctctggcaaagagctggacacagtgcccgccaagggcaggcagaacgaaggcaaatcagacagcctggagaagatcgagaggcgcgtccaagcactgaacaccgtcaaccagagcaagaaggccacgccccccatcccctccaaacctcccgggggcttcggcaagacctcaggcactccagcggtgaagatgaggaacggagtgcggcaggtggcggtcaggccccagtcggtgtttgtgtccccgccacccaaggacaacaacctgtcctgcgccctgcggaggaatgagtcactcacggccactgatggcctccgaggcgtccgacggaactcctcctttagcactgctcgctccgctgccgccgaggccaagggccgcctggccgaacgggctgccagccagggttcagactcacccctactgcccgcccagcgcaacagcatacccgtgtcccctgtgcgccccaagcccatcgagaagtctcagttcatccacaataacctcaaagatgtgtacgtctctatcgcagactacgagggggatgaggagacagcaggcttccaggagggggtgtccatggaggttctggagaggaaccctaatggctggtggtactgccagatcctggatggtgtgaagcccttcaaaggctgggtgccttccaactaccttgagaaaaagaactagcagagggcctgggctcttccagcctcagtgtgcctctctggccgcccactggatgagcggtgagacgaac

SEQ ID NO: 3842 - DNA, 1393 bp, Homo sapiens
  source 1..1393: mol_type = genomic DNA
acatgagcagcggcaccggggaccgaccgcagccagcccgagggcgcccctgcagctgcagccccgcgctcgcgcccggccctaaccatgtctatctgttgttgcttctttttcagggactatggcagttccaagaggaaatcaggtgccgacgccaccgccgagcccatgatcctggaacagtacgtggtggtgtccaactataagaagcaggagaactcggagctgagcctccaggccggggaggtggtggatgtcatcgagaagaacgagagcggctggtggttcgtgagcacttctgaggagcagggctgggtccctgccacctacctggaggcccagaatggtactcgggatgactccgacatcaacacctctaagactggagaagtgtccaagagacgcaaggcccatctgcggcgcctggatcgccggtggaccctgggcgggatggtcaacaggcagcacagccgagaggagaagtatgtcaccgtgcagccttacaccagccaaagcaaggacgagattggctttgagaagggcgtcacagtggaggtgatccggaagaatctggaaggctggtggtatatcagatacctgggcaaagagggctgggcgccagcatcctacctgaagaaggccaaggatgacctgccaacccggaagaagaacctggccggcccagtggagatcattgggaacatcatggagatcagcaacctgctgaacaagaaggcgtctggggacaaggaaactccaccagccgaaggcgagggccatgaggcccccattgccaagaaggagatcagcctgcccatcctctgcaatgcctccaatggcagtgccgtgggcgttcctgacaggactgtctccaggctggcccagggctctccagctgtggccaggattgcccctcagcgggcccagatcagctccccgaacctacggacaagacctccaccacgcagagaatccagcctgacggagtctcgctgtcgccaggctggagtgcagtggcacgacctcggctcactacaatctccacatcccaggttcaagagattctcctgcctcagcctcctgagtagttgggatcataggcacatgccaccacacccagctaattttttaatatttttaatagagacggggtttcaccatgttggccaagatggtctccatctcctcacctcgtgatctgccagcctcggctcccaaagtgctgggattgctggggtgagccgctgcgcccggccttcctctcctttttaacaatcctcgcctccctctttccctccttccttctctcctcccttcaacaaatccttaccaaggacctaccaggcatcaggccccgtgcagacagaaagctagagacagcccctgacttcaa

SEQ ID NO: 3843 - DNA, 3359 bp, Homo sapiens
  source 1..3359: mol_type = genomic DNA
gacaccacaaggactgggagtggaagatgccttctccagggggaaattaggtagactgaggcaacagatgcccgttacagctacaggcaagatcctcttccgcagaagccacatccgggacgtagctgtgaagagactgaagcccatcgatgaatactgccgggcacttgtccggctgcccccccacatctcacagtgtgacgaagtcttccggttcttcgaggctcgacccgaggatgtcaaccctccaaaagaggactatggcagttccaagaggaaatcaggtgccgacgccaccgccgagcccatgatcctggaacagtacgtggtggtgtccaactataagaagcaggagaactcggagctgagcctccaggccggggaggtggtggatgtcatcgagaagaacgagagcggctggtggttcgtgagcacttctgaggagcagggctgggtccctgccacctacctggaggcccagaatggtactcgggatgactccgacatcaacacctctaagactggagaagtgtccaagagacgcaaggcccatctgcggcgcctggatcgccggtggaccctgggcgggatggtcaacaggcagcacagccgagaggagaagtatgtcaccgtgcagccttacaccagccaaagcaaggacgagattggctttgagaagggcgtcacagtggaggtgatccggaagaatctggaaggctggtggtatatcagatacctgggcaaagagggctgggcgccagcatcctacctgaagaaggccaaggatgacctgccaacccggaagaagaacctggccggcccagtggagatcattgggaacatcatggagatcagcaacctgctgaacaagaaggcgtctggggacaaggaaactccaccagccgaaggcgagggccatgaggcccccattgccaagaaggagatcagcctgcccatcctctgcaatgcctccaatggcagtgccgtgggcgttcctgacaggactgtctccaggctggcccagggctctccagctgtggccaggattgcccctcagcgggcccagatcagctccccgaacctacggacaagacctccaccacgcagagaatccagcctggggttccaactgccaaagccaccagagcccccttctgttgaggtggagtactacaccattgccgaattccagtcgtgcatttccgatggcatcagctttcggggtggacagaaggcagaggtcattgataagaactcaggtggctggtggtacgtgcagatcggtgagaaggagggctgggcccccgcatcatacatcgataagcgcaagaagcccaacctgagccgccgcacaagcacgctgacccggcccaaggtgcccccgccagcaccccccagcaagcccaaggaggccgaggagggccctacgggggccagtgagagccaggactccccgcggaagctcaagtatgaggagcctgagtatgacatccctgcattcggctttgactcagagcctgagctgagcgaggagcccgtggaggacagagcctcaggggagaggcggcctgcccagccccaccggccctcgccggcctcttctctgcagcgggcccgcttcaaggtgggtgagtcttcagaggatgtggccctggaagaggagaccatctatgagaatgagggcttccggccatatgcagaggacaccctgtcagccagaggctcctccggggacagcgactccccaggcagctcctcgctgtccctgaccaggaaaaactcccccaaatcaggctcccccaagtcatcatcactcctaaagctcaaggcagagaagaatgcccaggcagaaatggggaagaaccactcctcagcctccttttcctcatccatcaccatcaacaccacttgctgctcctcctcttcctcctcctcctcttccttgtccaaaaccagtggcgacctgaagccccgctctgcttcggacgcaggcatccgcggcactcccaaggtcagggcaaagaaggatgctgatgcgaacgctgggctgacctcctgtccccgggccaagccatcggtccggcccaagccattcctaaaccgagcagagtcgcagagccaagagaagatggacatcagcactttacggcgccagctgagacccacaggccagctccgtggagggctcaagggctccaagagtgaggattcggagctgcccccgcagacggcctccgaggctcccagtgaggggtctaggagaagctcatccgacctcatcaccctcccagccaccactcccccatgtcccaccaagaaggaatgggaagggccagccacctcgtacatgacatgcagcgcctaccagaaggtccaggactcggagatcagcttccccgcgggcgtggaggtgcaggtgctggagaagcaggagagcgggtggtggtatgtgaggtttggggagctggagggctgggccccttcccactatttggtgctggatgagaacgagcaacctgacccctctggcaaagagctggacacagtgcccgccaagggcaggcagaacgaaggcaaatcagacagcctggagaagatcgagaggcgcgtccaagcactgaacaccgtcaaccagagcaagaaggccacgccccccatcccctccaaacctcccgggggcttcggcaagacctcaggcactccagcggtgaagatgaggaacggagtgcggcaggtggcggtcaggcccatcgagaagtctcagttcatccacaataacctcaaagatgtgtacgtctctatcgcagactacgagggggatgaggagacagcaggcttccaggagggggtgtccatggaggttctggagaggaaccctaatggctggtggtactgccagatcctggatggtgtgaagcccttcaaaggctgggtgccttccaactaccttgagaaaaagaactagcagagggcctgggctcttccagcctcagtgtgcctctctggccgcccactggatgagcggtatccctggtattgtcctaagctgtatttgtgaattgtgctggtttcctgggcattgccacgcctaccacagctgggcagggctggaagccttacgtatgaagcatggagaagcagccattgtccccactatgggcagaggggggacccggctggccccttgggtcagactggagccaacaccgccagccaccccctctggcctgctggcaatgccacaggtgcccaagaagatggaggatccctgtgccaggagccaacctggtcttcccgagggtcagtgccccagtgaagacagaagcgagagaataaagttccctgtaggtcctctgtca

SEQ ID NO: 3844 - DNA, 3039 bp, Homo sapiens
  source 1..3039: mol_type = genomic DNA
gagaagctctctcccgctctctcctctccctctcccgcccgagggagcagggctgccttttctctcgggtgccgacgccaccgccgagcccatgatcctggaacagtacgtggtggtgtccaactataagaagcaggagaactcggagctgagcctccaggccggggaggtggtggatgtcatcgagaagaacgagagcggctggtggttcgtgagcacttctgaggagcagggctgggtccctgccacctacctggaggcccagaatggtactcgggatgactccgacatcaacacctctaagactggagaagtgtccaagagacgcaaggcccatctgcggcgcctggatcgccggtggaccctgggcgggatggtcaacaggcagcacagccgagaggagaagtatgtcaccgtgcagccttacaccagccaaagcaaggacgagattggctttgagaagggcgtcacagtggaggtgatccggaagaatctggaaggctggtggtatatcagatacctgggcaaagagggctgggcgccagcatcctacctgaagaaggccaaggatgacctgccaacccggaagaagaacctggccggcccagtggagatcattgggaacatcatggagatcagcaacctgctgaacaagaaggcgtctggggacaaggaaactccaccagccgaaggcgagggccatgaggcccccattgccaagaaggagatcagcctgcccatcctctgcaatgcctccaatggcagtgccgtgggcgttcctgacaggactgtctccaggctggcccagggctctccagctgtggccaggattgcccctcagcgggcccagatcagctccccgaacctacggacaagacctccaccacgcagagaatccagcctggggttccaactgccaaagccaccagagcccccttctgttgaggtggagtactacaccattgccgaattccagtcgtgcatttccgatggcatcagctttcggggtggacagaaggcagaggtcattgataagaactcaggtggctggtggtacgtgcagatcggtgagaaggagggctgggcccccgcatcatacatcgataagcgcaagaagcccaacctgagccgccgcacaagcacgctgacccggcccaaggtgcccccgccagcaccccccagcaagcccaaggaggccgaggagggccctacgggggccagtgagagccaggactccccgcggaagctcaagtatgaggagcctgagtatgacatccctgcattcggctttgactcagagcctgagctgagcgaggagcccgtggaggacagagcctcaggggagaggcggcctgcccagccccaccggccctcgccggcctcttctctgcagcgggcccgcttcaaggtgggtgagtcttcagaggatgtggccctggaagaggagaccatctatgagaatgagggcttccggccatatgcagaggacaccctgtcagccagaggctcctccggggacagcgactccccaggcagctcctcgctgtccctgaccaggaaaaactcccccaaatcaggctcccccaagtcatcatcactcctaaagctcaaggcagagaagaatgcccaggcagaaatggggaagaaccactcctcagcctccttttcctcatccatcaccatcaacaccacttgctgctcctcctcttcctcctcctcctcttccttgtccaaaaccagtggcgacctgaagccccgctctgcttcggacgcaggcatccgcggcactcccaaggtcagggcaaagaaggatgctgatgcgaacgctgggctgacctcctgtccccgggccaagccatcggtccggcccaagccattcctaaaccgagcagagtcgcagagccaagagaagatggacatcagcactttacggcgccagctgagacccacaggccagctccgtggagggctcaagggctccaagagtgaggattcggagctgcccccgcagacggcctccgaggctcccagtgaggggtctaggagaagctcatccgacctcatcaccctcccagccaccactcccccatgtcccaccaagaaggaatgggaagggccagccacctcgtacatgacatgcagcgcctaccagaaggtccaggactcggagatcagcttccccgcgggcgtggaggtgcaggtgctggagaagcaggagagcgggtggtggtatgtgaggtttggggagctggagggctgggccccttcccactatttggtgctggatgagaacgagcaacctgacccctctggcaaagagctggacacagtgcccgccaagggcaggcagaacgaaggcaaatcagacagcctggagaagatcgagaggcgcgtccaagcactgaacaccgtcaaccagagcaagaaggccacgccccccatcccctccaaacctcccgggggcttcggcaagacctcaggcactccagcggtgaagatgaggaacggagtgcggcaggtggcggtcaggccccagtcggtgtttgtgtccccgccacccaaggacaacaacctgtcctgcgccctgcggaggaatgagtcactcacggccactgatggcctccgaggcgtccgacggaactcctcctttagcactgctcgctccgctgccgccgaggccaagggccgcctggccgaacgggctgccagccagggttcagactcacccctactgcccgcccagcgcaacagcatacccgtgtcccctgtgcgccccaagcccatcgagaagtctcagttcatccacaataacctcaaagatgtgtacgtctctatcgcagactacgagggggatgaggagacagcaggcttccaggagggggtgtccatggaggttctggagaggaaccctaatggctggtggtactgccagatcctggatggtgtgaagcccttcaaaggctgggtgccttccaactaccttgagaaaaagaactagcagagggcctgggctcttccagcctcagtgtgcctctctgg

SEQ ID NO: 3845 - DNA, 3117 bp, Homo sapiens
  source 1..3117: mol_type = genomic DNA
agacattacacatgaacgggtcgttcctgctccggctcctgtttcctgtagcgtccatcctgccagagactgtactgcttaggggtgccgacgccaccgccgagcccatgatcctggaacagtacgtggtggtgtccaactataagaagcaggagaactcggagctgagcctccaggccggggaggtggtggatgtcatcgagaagaacgagagcggctggtggttcgtgagcacttctgaggagcagggctgggtccctgccacctacctggaggcccagaatggtactcgggatgactccgacatcaacacctctaagactggagaagtgtccaagagacgcaaggcccatctgcggcgcctggatcgccggtggaccctgggcgggatggtcaacaggcagcacagccgagaggagaagtatgtcaccgtgcagccttacaccagccaaagcaaggacgagattggctttgagaagggcgtcacagtggaggtgatccggaagaatctggaaggctggtggtatatcagatacctgggcaaagagggctgggcgccagcatcctacctgaagaaggccaaggatgacctgccaacccggaagaagaacctggccggcccagtggagatcattgggaacatcatggagatcagcaacctgctgaacaagaaggcgtctggggacaaggaaactccaccagccgaaggcgagggccatgaggcccccattgccaagaaggagatcagcctgcccatcctctgcaatgcctccaatggcagtgccgtgggcgttcctgacaggactgtctccaggctggcccagggctctccagctgtggccaggattgcccctcagcgggcccagatcagctccccgaacctacggacaagacctccaccacgcagagaatccagcctggggttccaactgccaaagccaccagagcccccttctgttgaggtggagtactacaccattgccgaattccagtcgtgcatttccgatggcatcagctttcggggtggacagaaggcagaggtcattgataagaactcaggtggctggtggtacgtgcagatcggtgagaaggagggctgggcccccgcatcatacatcgataagcgcaagaagcccaacctgagccgccgcacaagcacgctgacccggcccaaggtgcccccgccagcaccccccagcaagcccaaggaggccgaggagggccctacgggggccagtgagagccaggactccccgcggaagctcaagtatgaggagcctgagtatgacatccctgcattcggctttgactcagagcctgagctgagcgaggagcccgtggaggacagagcctcaggggagaggcggcctgcccagccccaccggccctcgccggcctcttctctgcagcgggcccgcttcaaggtgggtgagtcttcagaggatgtggccctggaagaggagaccatctatgagaatgagggcttccggccatatgcagaggacaccctgtcagccagaggctcctccggggacagcgactccccaggcagctcctcgctgtccctgaccaggaaaaactcccccaaatcaggctcccccaagtcatcatcactcctaaagctcaaggcagagaagaatgcccaggcagaaatggggaagaaccactcctcagcctccttttcctcatccatcaccatcaacaccacttgctgctcctcctcttcctcctcctcctcttccttgtccaaaaccagtggcgacctgaagccccgctctgcttcggacgcaggcatccgcggcactcccaaggtcagggcaaagaaggatgctgatgcgaacgctgggctgacctcctgtccccgggccaagccatcggtccggcccaagccattcctaaaccgagcagagtcgcagagccaagagaagatggacatcagcactttacggcgccagctgagacccacaggccagctccgtggagggctcaagggctccaagagtgaggattcggagctgcccccgcagacggcctccgaggctcccagtgaggggtctaggagaagctcatccgacctcatcaccctcccagccaccactcccccatgtcccaccaagaaggaatgggaagggccagccacctcgtacatgacatgcagcgcctaccagaaggtccaggactcggagatcagcttccccgcgggcgtggaggtgcaggtgctggagaagcaggagagcgggtggtggtatgtgaggtttggggagctggagggctgggccccttcccactatttggtgctggatgagaacgagcaacctgacccctctggcaaagagctggacacagtgcccgccaagggcaggcagaacgaaggcaaatcagacagcctggagaagatcgagaggcgcgtccaagcactgaacaccgtcaaccagagcaagaaggccacgccccccatcccctccaaacctcccgggggcttcggcaagacctcaggcactccagcggtgaagatgaggaacggagtgcggcaggtggcggtcaggccccagtcggtgtttgtgtccccgccacccaaggacaacaacctgtcctgcgccctgcggaggaatgagtcactcacggccactgatggcctccgaggcgtccgacggaactcctcctttagcactgctcgctccgctgccgccgaggccaagggccgcctggccgaacgggctgccagccagggttcagactcacccctactgcccgcccagcgcaacagcatacccgtgtcccctgtgcgccccaagcccatcgagaagtctcagttcatccacaataacctcaaagatgtgtacgtctctatcgcagactacgagggggatgaggagacagcaggcttccaggagggggtgtccatggaggttctggagaggaaccctaatggctggtggtactgccagatcctggatggtgtgaagcccttcaaaggctgggtgccttccaactaccttgagaaaaagaactagcagagggcctgggctcttccagcctcagtgtgcctctctggccgcccactggatgagcggtgagacgaacaaaagggaaaggaaaaaatgggggtggggggtg

SEQ ID NO: 3846 - DNA, 780 bp, Homo sapiens
  source 1..780: mol_type = genomic DNA
ggttagtgaggccggaagtgagtgtaataaagtttctccagggaggcagggcccggggagaaagttggagcggtaacctaagctggcagtggcgtgatccggcaccaaatcggcccgcggtgcggtgcggagactccatgaggccctgacggagtttcgctcttatcgtccaggctggagtgcaatggtgcgatctcggctcactgcaacctccgcctcctgagttcaagtgattctcctgcctcagcctcctgagtagctgggattacaggcgcccaccaccacgcccggctaatttttgtatttttagtagagacggggtttccccatgttggctaggctagcctcgaactcctgacctcaggacatgaacaagctgagtggaggcggcgggcgcaggactcgggtggaagggggccagcttgggggcgaggagtggacccgccacgggagctttgtcaataagcccacgcggggctggctgcatcccaacgacaaagtcatgggacccggggtttcctacttggttcggtacatgggttgtgtggaggtcctccagtcaatgcgtgccctggacttcaacacccggactcaggtcaccagggaggccatcagtctggtgtgtgaggctgtgccgggtgctaagggggcgacaaggaggagaaagccctgtagccgcccgctcagctctatcctggggaggagtaacctgaaatttgctggaatgccaatcactctcaccgtctccaccagcagcctcaacctcatggccgcagactg

SEQ ID NO: 3847 - DNA, 1692 bp, Homo sapiens
  source 1..1692: mol_type = genomic DNA
gtttctccagggaggcagggcccggggagaaagttggagcggtaacctaagctggcagtggcgtgatccggcaccaaatcggcccgcggtgcggtgcggagactccatgaggccctggacatgaacaagctgagtggaggcggcgggcgcaggactcgggtggaagggggccagcttgggggcgaggagtggacccgccacgggagctttgtcaataagcccacgcggggctggctgcatcccaacgacaaagtcatgggacccggggtttcctacttggttcggtacatgggttgtgtggaggtcctccagtcaatgcgtgccctggacttcaacacccggactcaggtcaccagggaggccatcagtctggtgtgtgaggctgtgccgggtgctaagggggcgacaaggaggagaaagccctgtagccgcccgctcagctctatcctggggaggagtaacctgaaatttgctggaatgccaatcactctcaccgtctccaccagcagcctcaacctcatggccgcagactgcaaacagatcatcgccaaccaccacatgcaatctatctcatttgcatccggcggggatccggacacagccgagtatgtcgcctatgttgccaaagaccctgtgaatcagagagcctgccacattctggagtgtcccgaagggcttgcccaggatgtcatcagcaccattggccaggccttcgagttgcgcttcaaacaatacctcaggaacccacccaaactggtcacccctcatgacaggatggctggctttgatggctcagcatgggatgaggaggaggaagagccacctgaccatcagtactataatgacttcccggggaaggaaccccccttggggggggtggtagacatgaggcttcgggaaggagccgctccaggggctgctcgacccactgcacccaatgcccagacccccagccacttgggagctacattgcctgtaggacagcctgttgggggagatccagaagtccgcaaacagatgccacctccaccaccctgtccaggcagagagctttttgatgatccctcctatgtcaacgtccagaacctagacaaggcccggcaagcagtgggtggtgctgggccccccaatcctgctatcaatggcagtgcaccccgggacctgtttgacatgaagcccttcgaagatgctcttcgcgtgcctccacctccccagtcggtgtccatggctgagcagctccgaggggagccctggttccatgggaagctgagccggcgggaggctgaggcactgctgcagctcaatggggacttcctggtacgggagagcacgaccacacctggccagtatgtgctcactggcttgcagagtgggcagcctaagcatttgctactggtggaccctgagggtgtgagatggggtttcgccatgttgcccaagctgttcttgaactcccgggctcaagtgatccgcctccctcggcctcccagagtgctgggattacaggcacggaccaccatgcccagcctccacatctttttttgcactgtgtatactcttctgagacatgccaacttcctccaggtcaagaaaggggtatatagctctcagcttcactctttcagggctgatgtcgcctttgccttttctcacttcactgacctgtctattcctacaactgtctctttctag

SEQ ID NO: 3848 - DNA, 2288 bp, Homo sapiens
  source 1..2288: mol_type = genomic DNA
gaagaggctccacgttgggcggggatggggcctgaaactgtctgggtctgagccccaagtacaatccactccggaatgagtctctgtcatcgctggaggaaggggcttctgggtccacccccccggaggagctgccttccccatcagcttcatccctggggcccatcctgcctcctctgcctggggacgatagtcccactaccctgtgctccttcttcccccggatgagcaacctgaggctggccaacccggctggggggcgcccagggtctaagggggagccaggaagggcagctgatgatggggaggggatcgtaggggcagccatgccagactcaggccccctacccctcctccaggacatgaacaagctgagtggaggcggcgggcgcaggactcgggtggaagggggccagcttgggggcgaggagtggacccgccacgggagctttgtcaataagcccacgcggggctggctgcatcccaacgacaaagtcatgggacccggggtttcctacttggttcggtacatgggttgtgtggaggtcctccagtcaatgcgtgccctggacttcaacacccggactcaggtcaccagggaggccatcagtctggtgtgtgaggctgtgccgggtgctaagggggcgacaaggaggagaaagccctgtagccgcccgctcagctctatcctggggaggagtaacctgaaatttgctggaatgccaatcactctcaccgtctccaccagcagcctcaacctcatggccgcagactgcaaacagatcatcgccaaccaccacatgcaatctatctcatttgcatccggcggggatccggacacagccgagtatgtcgcctatgttgccaaagaccctgtgaatcagagagcctgccacattctggagtgtcccgaagggcttgcccaggatgtcatcagcaccattggccaggccttcgagttgcgcttcaaacaatacctcaggaacccacccaaactggtcacccctcatgacaggatggctggctttgatggctcagcatgggatgaggaggaggaagagccacctgaccatcagtactataatgacttcccggggaaggaaccccccttggggggggtggtagacatgaggcttcgggaaggagccgctccaggggctgctcgacccactgcacccaatgcccagacccccagccacttgggagctacattgcctgtaggacagcctgttgggggagatccagaagtccgcaaacagatgccacctccaccaccctgtccagcaggcagagagctttttgatgatccctcctatgtcaacgtccagaacctagacaaggcccggcaagcagtgggtggtgctgggccccccaatcctgctatcaatggcagtgcaccccgggacctgtttgacatgaagcccttcgaagatgctcttcgcgtgcctccacctccccagtcggtgtccatggctgagcagctccgaggggagccctggttccatgggaagctgagccggcgggaggctgaggcactgctgcagctcaatggggacttcctggtacgggagagcacgaccacacctggccagtatgtgctcactggcttgcagagtgggcagcctaagcatttgctactggtggaccctgagggtgtggttcggactaaggatcaccgctttgaaagtgtcagtcaccttatcagctaccacatggacaatcacttgcccatcatctctgcgggcagcgaactgtgtctacagcaacctgtggagcggaaactgtgatctgccctagcgctctcttccagaagatgccctccaatcctttccaccctattccctaactctcgggacctcgtttgggagtgttctgtgggcttggccttgtgtcagagctgggagtagcatggactctgggtttcatatccagctgagtgagagggtttgagtcaaaagcctgggtgagaatcctgcctctccccaaacattaatcaccaaagtattaatgtacagagtggcccctcacctgggcctttcctgtgccaacctgatgccccttccccaagaaggtgagtgcttgtcatggaaaatgtcctgtggtgacaggcccagtggaacagtcacccttctgggcaagggggaacaaatcacacctctgggcttcagggtatcccagacccctctcaacacccgccccccccatgtttaaactttgtgcctttgaccatctcttaggtctaatgatattttatgcaaacagttcttggacccctgaattcaatgaca

SEQ ID NO: 3849 - DNA, 3472 bp, Homo sapiens
  source 1..3472: mol_type = genomic DNA
gaggctccacgttgggcggggatggggcctgaaactgtctgggtctgagctggggagcggaagccacttgtccctctccctccccaggacttctgtgactcctgggccacagaggtccaaccaggctaagggcctggggataccccctgcctggcccccttgcccaaactggcaggggggccaggctgggcagcagcccctctttcacctcaactatggatctcctgccccccaagcccaagtacaatccactccggaatgagtctctgtcatcgctggaggaaggggcttctgggtccacccccccggaggagctgccttccccatcagcttcatccctggggcccatcctgcctcctctgcctggggacgatagtcccactaccctgtgctccttcttcccccggatgagcaacctgaggctggccaacccggctggggggcgcccagggtctaagggggagccaggaagggcagctgatgatggggaggggatcgtaggggcagccatgccagactcaggccccctacccctcctccaggacatgaacaagctgagtggaggcggcgggcgcaggactcgggtggaagggggccagcttgggggcgaggagtggacccgccacgggagctttgtcaataagcccacgcggggctggctgcatcccaacgacaaagtcatgggacccggggtttcctacttggttcggtacatgggttgtgtggaggtcctccagtcaatgcgtgccctggacttcaacacccggactcaggtcaccagggaggccatcagtctggtgtgtgaggctgtgccgggtgctaagggggcgacaaggaggagaaagccctgtagccgcccgctcagctctatcctggggaggagtaacctgaaatttgctggaatgccaatcactctcaccgtctccaccagcagcctcaacctcatggccgcagactgcaaacagatcatcgccaaccaccacatgcaatctatctcatttgcatccggcggggatccggacacagccgagtatgtcgcctatgttgccaaagaccctgtgaatcagagagcctgccacattctggagtgtcccgaagggcttgcccaggatgtcatcagcaccattggccaggccttcgagttgcgcttcaaacaatacctcaggaacccacccaaactggtcacccctcatgacaggatggctggctttgatggctcagcatgggatgaggaggaggaagagccacctgaccatcagtactataatgacttcccggggaaggaaccccccttggggggggtggtagacatgaggcttcgggaaggagccgctccaggggctgctcgacccactgcacccaatgcccagacccccagccacttgggagctacattgcctgtaggacagcctgttgggggagatccagaagtccgcaaacagatgccacctccaccaccctgtccaggcagagagctttttgatgatccctcctatgtcaacgtccagaacctagacaaggcccggcaagcagtgggtggtgctgggccccccaatcctgctatcaatggcagtgcaccccgggacctgtttgacatgaagcccttcgaagatgctcttcgcgtgcctccacctccccagtcggtgtccatggctgagcagctccgaggggagccctggttccatgggaagctgagccggcgggaggctgaggcactgctgcagctcaatggggacttcctggtacgggagagcacgaccacacctggccagtatgtgctcactggcttgcagagtgggcagcctaagcatttgctactggtggaccctgagggtgtggttcggactaaggatcaccgctttgaaagtgtcagtcaccttatcagctaccacatggacaatcacttgcccatcatctctgcgggcagcgaactgtgtctacagcaacctgtggagcggaaactgtgatctgccctagcgctctcttccagaagatgccctccaatcctttccaccctattccctaactctcgggacctcgtttgggagtgttctgtgggcttggccttgtgtcagagctgggagtagcatggactctgggtttcatatccagctgagtgagagggtttgagtcaaaagcctgggtgagaatcctgcctctccccaaacattaatcaccaaagtattaatgtacagagtggcccctcacctgggcctttcctgtgccaacctgatgccccttccccaagaaggtgagtgcttgtcatggaaaatgtcctgtggtgacaggcccagtggaacagtcacccttctgggcaagggggaacaaatcacacctctgggcttcagggtatcccagacccctctcaacacccgccccccccatgtttaaactttgtgcctttgaccatctcttaggtctaatgatattttatgcaaacagttcttggacccctgaattcaatgacagggatgccaacaccttcttggcttctgggacctgtgttcttgctgagcaccctctccggtttgggttgggataacagaggcaggagtggcagctgtcccctctccctggggatatgcaacccttagagattgccccagagccccactcccggccaggcgggagatggacccctcccttgctcagtgcctcctggccggggcccctcaccccaaggggtctgtatatacatttcataaggcctgccctcccatgttgcatgcctatgtactctacgccaaagtgcagcccttcctcctgaagcctctgccctgcctccctttctgggagggcggggtgggggtgactgaatttgggcctcttgtacagttaactctcccaggtggattttgtggaggtgagaaaaggggcattgagactataaagcagtagacaatccccacataccatctgtagagttggaactgcattcttttaaagttttatatgcatatattttagggctgtagacttactttcctattttcttttccattgcttattcttgagcacaaaatgataatcaattattacatttatacatcacctttttgacttttccaagcccttttacagctcttggcattttcctcgcctaggcctgtgaggtaactgggatcgcaccttttataccagagacctgaggcagatgaaatttatttccatctaggactagaaaaacttgggtctcttaccgcgagactgagaggcagaagtcagcccgaatgcctgtcagtttcatggaggggaaacgcaaaacctgcagttcctgagtaccttctacaggcccggcccagcctaggcccggggtggccacaccacagcaagccggccccccctcttttggccttgtggataagggagagttgaccgttttcatcctggcctccttttgctgtttggatgtttccacgggtctcacttataccaaagggaaaactcttcattaaagtccgtatttcttcta

SEQ ID NO: 3850 - DNA, 2881 bp, Homo sapiens
  source 1..2881: mol_type = genomic DNA
agagaagaggctccacgttgggcggggatggggcctgaaactgtctgggtctgagctggggagcggaagccacttgtccctctccctccccaggacttctgtgactcctgggccacagaggtccaaccaggctaagggcctggggataccccctgcctggcccccttgcccaaactggcaggggggccaggctgggcagcagcccctctttcacctcaactatggatctcctgccccccaagcccaagtacaatccactccggaatgagtctctctctatcctggggaggagtaacctgaaatttgctggaatgccaatcactctcaccgtctccaccagcagcctcaacctcatggccgcagactgcaaacagatcatcgccaaccaccacatgcaatctatctcatttgcatccggcggggatccggacacagccgagtatgtcgcctatgttgccaaagaccctgtgaatcagagagcctgccacattctggagtgtcccgaagggcttgcccaggatgtcatcagcaccattggccaggccttcgagttgcgcttcaaacaatacctcaggaacccacccaaactggtcacccctcatgacaggatggctggctttgatggctcagcatgggatgaggaggaggaagagccacctgaccatcagtactataatgacttcccggggaaggaaccccccttggggggggtggtagacatgaggcttcgggaaggagccgctccaggggctgctcgacccactgcacccaatgcccagacccccagccacttgggagctacattgcctgtaggacagcctgttgggggagatccagaagtccgcaaacagatgccacctccaccaccctgtccaggcagagagctttttgatgatccctcctatgtcaacgtccagaacctagacaaggcccggcaagcagtgggtggtgctgggccccccaatcctgctatcaatggcagtgcaccccgggacctgtttgacatgaagcccttcgaagatgctcttcgcgtgcctccacctccccagtcggtgtccatggctgagcagctccgaggggagccctggttccatgggaagctgagccggcgggaggctgaggcactgctgcagctcaatggggacttcctggtacgggagagcacgaccacacctggccagtatgtgctcactggcttgcagagtgggcagcctaagcatttgctactggtggaccctgagggtgtggttcggactaaggatcaccgctttgaaagtgtcagtcaccttatcagctaccacatggacaatcacttgcccatcatctctgcgggcagcgaactgtgtctacagcaacctgtggagcggaaactgtgatctgccctagcgctctcttccagaagatgccctccaatcctttccaccctattccctaactctcgggacctcgtttgggagtgttctgtgggcttggccttgtgtcagagctgggagtagcatggactctgggtttcatatccagctgagtgagagggtttgagtcaaaagcctgggtgagaatcctgcctctccccaaacattaatcaccaaagtattaatgtacagagtggcccctcacctgggcctttcctgtgccaacctgatgccccttccccaagaaggtgagtgcttgtcatggaaaatgtcctgtggtgacaggcccagtggaacagtcacccttctgggcaagggggaacaaatcacacctctgggcttcagggtatcccagacccctctcaacacccgccccccccatgtttaaactttgtgcctttgaccatctcttaggtctaatgatattttatgcaaacagttcttggacccctgaattcaatgacagggatgccaacaccttcttggcttctgggacctgtgttcttgctgagcaccctctccggtttgggttgggataacagaggcaggagtggcagctgtcccctctccctggggatatgcaacccttagagattgccccagagccccactcccggccaggcgggagatggacccctcccttgctcagtgcctcctggccggggcccctcaccccaaggggtctgtatatacatttcataaggcctgccctcccatgttgcatgcctatgtactctacgccaaagtgcagcccttcctcctgaagcctctgccctgcctccctttctgggagggcggggtgggggtgactgaatttgggcctcttgtacagttaactctcccaggtggattttgtggaggtgagaaaaggggcattgagactataaagcagtagacaatccccacataccatctgtagagttggaactgcattcttttaaagttttatatgcatatattttagggctgtagacttactttcctattttcttttccattgcttattcttgagcacaaaatgataatcaattattacatttatacatcacctttttgacttttccaagcccttttacagctcttggcattttcctcgcctaggcctgtgaggtaactgggatcgcaccttttataccagagacctgaggcagatgaaatttatttccatctaggactagaaaaacttgggtctcttaccgcgagactgagaggcagaagtcagcccgaatgcctgtcagtttcatggaggggaaacgcaaaacctgcagttcctgagtaccttctacaggcccggcccagcctaggcccggggtggccacaccacagcaagccggccccccctcttttggccttgtggataagggagagttgaccgttttcatcctggcctccttttgctgtttggatgtttccacgggtctcacttataccaaagggaaaactcttcattaaagtccgtatttcttcta

SEQ ID NO: 3851 - DNA, 3059 bp, Homo sapiens
  source 1..3059: mol_type = genomic DNA
gagtgtaataaagtttctccagggaggcagggcccggggagaaagttggagcggtaacctaagctggcagtggcgtgatccggcaccaaatcggcccgcggtgcggtgcggagactccatgaggccctggacatgaacaagctgagtggaggcggcgggcgcaggactcgggtggaagggggccagcttgggggcgaggagtggacccgccacgggagctttgtcaataagcccacgcggggctggctgcatcccaacgacaaagtcatgggacccggggtttcctacttggttcggtacatgggttgtgtggaggtcctccagtcaatgcgtgccctggacttcaacacccggactcaggtcaccagggaggccatcagtctggtgtgtgaggctgtgccgggtgctaagggggcgacaaggaggagaaagccctgtagccgcccgctcagctctatcctggggaggagtaacctgaaatttgctggaatgccaatcactctcaccgtctccaccagcagcctcaacctcatggccgcagactgcaaacagatcatcgccaaccaccacatgcaatctatctcatttgcatccggcggggatccggacacagccgagtatgtcgcctatgttgccaaagaccctgtgaatcagagagcctgccacattctggagtgtcccgaagggcttgcccaggatgtcatcagcaccattggccaggccttcgagttgcgcttcaaacaatacctcaggaacccacccaaactggtcacccctcatgacaggatggctggctttgatggctcagcatgggatgaggaggaggaagagccacctgaccatcagtactataatgacttcccggggaaggaaccccccttggggggggtggtagacatgaggcttcgggaaggagccgctccaggggctgctcgacccactgcacccaatgcccagacccccagccacttgggagctacattgcctgtaggacagcctgttgggggagatccagaagtccgcaaacagatgccacctccaccaccctgtccaggcagagagctttttgatgatccctcctatgtcaacgtccagaacctagacaaggcccggcaagcagtgggtggtgctgggccccccaatcctgctatcaatggcagtgcaccccgggacctgtttgacatgaagcccttcgaagatgctcttcgcgtgcctccacctccccagtcggtgtccatggctgagcagctccgaggggagccctggttccatgggaagctgagccggcgggaggctgaggcactgctgcagctcaatggggacttcctggtacgggagagcacgaccacacctggccagtatgtgctcactggcttgcagagtgggcagcctaagcatttgctactggtggaccctgagggtgtggttcggactaaggatcaccgctttgaaagtgtcagtcaccttatcagctaccacatggacaatcacttgcccatcatctctgcgggcagcgaactgtgtctacagcaacctgtggagcggaaactgtgatctgccctagcgctctcttccagaagatgccctccaatcctttccaccctattccctaactctcgggacctcgtttgggagtgttctgtgggcttggccttgtgtcagagctgggagtagcatggactctgggtttcatatccagctgagtgagagggtttgagtcaaaagcctgggtgagaatcctgcctctccccaaacattaatcaccaaagtattaatgtacagagtggcccctcacctgggcctttcctgtgccaacctgatgccccttccccaagaaggtgagtgcttgtcatggaaaatgtcctgtggtgacaggcccagtggaacagtcacccttctgggcaagggggaacaaatcacacctctgggcttcagggtatcccagacccctctcaacacccgccccccccatgtttaaactttgtgcctttgaccatctcttaggtctaatgatattttatgcaaacagttcttggacccctgaattcaatgacagggatgccaacaccttcttggcttctgggacctgtgttcttgctgagcaccctctccggtttgggttgggataacagaggcaggagtggcagctgtcccctctccctggggatatgcaacccttagagattgccccagagccccactcccggccaggcgggagatggacccctcccttgctcagtgcctcctggccggggcccctcaccccaaggggtctgtatatacatttcataaggcctgccctcccatgttgcatgcctatgtactctacgccaaagtgcagcccttcctcctgaagcctctgccctgcctccctttctgggagggcggggtgggggtgactgaatttgggcctcttgtacagttaactctcccaggtggattttgtggaggtgagaaaaggggcattgagactataaagcagtagacaatccccacataccatctgtagagttggaactgcattcttttaaagttttatatgcatatattttagggctgtagacttactttcctattttcttttccattgcttattcttgagcacaaaatgataatcaattattacatttatacatcacctttttgacttttccaagcccttttacagctcttggcattttcctcgcctaggcctgtgaggtaactgggatcgcaccttttataccagagacctgaggcagatgaaatttatttccatctaggactagaaaaacttgggtctcttaccgcgagactgagaggcagaagtcagcccgaatgcctgtcagtttcatggaggggaaacgcaaaacctgcagttcctgagtaccttctacaggcccggcccagcctaggcccggggtggccacaccacagcaagccggccccccctcttttggccttgtggataagggagagttgaccgttttcatcctggcctccttttgctgtttggatgtttccacgggtctcacttataccaaagggaaaactcttcattaaagtccgtatttcttcta

SEQ ID NO: 3852 - DNA, 3062 bp, Homo sapiens
  source 1..3062: mol_type = genomic DNA
gagtgtaataaagtttctccagggaggcagggcccggggagaaagttggagcggtaacctaagctggcagtggcgtgatccggcaccaaatcggcccgcggtgcggtgcggagactccatgaggccctggacatgaacaagctgagtggaggcggcgggcgcaggactcgggtggaagggggccagcttgggggcgaggagtggacccgccacgggagctttgtcaataagcccacgcggggctggctgcatcccaacgacaaagtcatgggacccggggtttcctacttggttcggtacatgggttgtgtggaggtcctccagtcaatgcgtgccctggacttcaacacccggactcaggtcaccagggaggccatcagtctggtgtgtgaggctgtgccgggtgctaagggggcgacaaggaggagaaagccctgtagccgcccgctcagctctatcctggggaggagtaacctgaaatttgctggaatgccaatcactctcaccgtctccaccagcagcctcaacctcatggccgcagactgcaaacagatcatcgccaaccaccacatgcaatctatctcatttgcatccggcggggatccggacacagccgagtatgtcgcctatgttgccaaagaccctgtgaatcagagagcctgccacattctggagtgtcccgaagggcttgcccaggatgtcatcagcaccattggccaggccttcgagttgcgcttcaaacaatacctcaggaacccacccaaactggtcacccctcatgacaggatggctggctttgatggctcagcatgggatgaggaggaggaagagccacctgaccatcagtactataatgacttcccggggaaggaaccccccttggggggggtggtagacatgaggcttcgggaaggagccgctccaggggctgctcgacccactgcacccaatgcccagacccccagccacttgggagctacattgcctgtaggacagcctgttgggggagatccagaagtccgcaaacagatgccacctccaccaccctgtccagcaggcagagagctttttgatgatccctcctatgtcaacgtccagaacctagacaaggcccggcaagcagtgggtggtgctgggccccccaatcctgctatcaatggcagtgcaccccgggacctgtttgacatgaagcccttcgaagatgctcttcgcgtgcctccacctccccagtcggtgtccatggctgagcagctccgaggggagccctggttccatgggaagctgagccggcgggaggctgaggcactgctgcagctcaatggggacttcctggtacgggagagcacgaccacacctggccagtatgtgctcactggcttgcagagtgggcagcctaagcatttgctactggtggaccctgagggtgtggttcggactaaggatcaccgctttgaaagtgtcagtcaccttatcagctaccacatggacaatcacttgcccatcatctctgcgggcagcgaactgtgtctacagcaacctgtggagcggaaactgtgatctgccctagcgctctcttccagaagatgccctccaatcctttccaccctattccctaactctcgggacctcgtttgggagtgttctgtgggcttggccttgtgtcagagctgggagtagcatggactctgggtttcatatccagctgagtgagagggtttgagtcaaaagcctgggtgagaatcctgcctctccccaaacattaatcaccaaagtattaatgtacagagtggcccctcacctgggcctttcctgtgccaacctgatgccccttccccaagaaggtgagtgcttgtcatggaaaatgtcctgtggtgacaggcccagtggaacagtcacccttctgggcaagggggaacaaatcacacctctgggcttcagggtatcccagacccctctcaacacccgccccccccatgtttaaactttgtgcctttgaccatctcttaggtctaatgatattttatgcaaacagttcttggacccctgaattcaatgacagggatgccaacaccttcttggcttctgggacctgtgttcttgctgagcaccctctccggtttgggttgggataacagaggcaggagtggcagctgtcccctctccctggggatatgcaacccttagagattgccccagagccccactcccggccaggcgggagatggacccctcccttgctcagtgcctcctggccggggcccctcaccccaaggggtctgtatatacatttcataaggcctgccctcccatgttgcatgcctatgtactctacgccaaagtgcagcccttcctcctgaagcctctgccctgcctccctttctgggagggcggggtgggggtgactgaatttgggcctcttgtacagttaactctcccaggtggattttgtggaggtgagaaaaggggcattgagactataaagcagtagacaatccccacataccatctgtagagttggaactgcattcttttaaagttttatatgcatatattttagggctgtagacttactttcctattttcttttccattgcttattcttgagcacaaaatgataatcaattattacatttatacatcacctttttgacttttccaagcccttttacagctcttggcattttcctcgcctaggcctgtgaggtaactgggatcgcaccttttataccagagacctgaggcagatgaaatttatttccatctaggactagaaaaacttgggtctcttaccgcgagactgagaggcagaagtcagcccgaatgcctgtcagtttcatggaggggaaacgcaaaacctgcagttcctgagtaccttctacaggcccggcccagcctaggcccggggtggccacaccacagcaagccggccccccctcttttggccttgtggataagggagagttgaccgttttcatcctggcctccttttgctgtttggatgtttccacgggtctcacttataccaaagggaaaactcttcattaaagtccgtatttcttcta

SEQ ID NO: 3853 - DNA, 692 bp, Homo sapiens
  source 1..692: mol_type = genomic DNA
gaaagttggagcggtaacctaagctggcagtggcgtgatccggcaccaaatcggcccgcggtgcggtgcggagactccatgaggccctggacatgaacaagctgagtggaggcggcgggcgcaggactcgggtggaagggggccagcttgggggcgaggagtggacccgccacgggagctttgtcaataagcccacgcggggctggctgcatcccaacgacaaagtcatgggacccggggtttcctacttggttcggtacatgggttgtgtggaggtcctccagtcaatgcgtgccctggacttcaacacccggactcaggtcaccagggaggccatcagtctggtgtgtgaggctgtgccgggtgctaagggggcgacaaggaggagaaagccctgtagccgcccgctcagctctatcctggggaggagtaacctgaaatttgctggaatgccaatcactctcaccgtctccaccagcagcctcaacctcatggccgcagactgcaaacaggacacagccgagtatgtcgcctatgttgccaaagaccctgtgaatcagagagcctgccacattctggagtgtcccgaagggcttgcccaggatgtcatcagcaccattggccaggccttcgagttgcgcttcaaacaatacctcaggaacccacccaaactggtcacccctcatgacagg

SEQ ID NO: 3854 - DNA, 780 bp, Homo sapiens
  source 1..780: mol_type = genomic DNA
cccagttgagtgggaggcaggcaggcaggcgctgggtctgagtacccctctttccccagggaggccatcagtctggtgtgtgaggctgtgccgggtgctaagggggcgacaaggaggagaaagccctgtagccgcccgctcagctctatcctggggaggagtaacctgaaatttgctggaatgccaatcactctcaccgtctccaccagcagcctcaacctcatggccgcagactgcaaacaggacacagccgagtatgtcgcctatgttgccaaagaccctgtgaatcagagagcctgccacattctggagtgtcccgaagggcttgcccaggatgtcatcagcaccattggccaggccttcgagttgcgcttcaaacaatacctcaggaacccacccaaactggtcacccctcatgacaggatggctggctttgatggctcagcatgggatgaggaggaggaagagccacctgaccatcagtactataatgacttcccggggaaggaaccccccttggggggggtggtagacatgaggcttcgggaaggagccgctccaggggctgctcgacccactgcacccaatgcccagacccccagccacttgggagctacattgcctgtaggacagcctgttgggggagatccagaagtccgcaaacagatgccacctccaccaccctgtccagcaggcagagagctttttgatgatccctcctatgtcaacgtccagaacctagacaaggcccggcaagcagtgggtggtgctgggcccccc

SEQ ID NO: 3855 - DNA, 550 bp, Homo sapiens
  source 1..550: mol_type = genomic DNA
ggcaggcaggcgctgggtctgagtacccctctttccccagggaggccatcagtctggtgtgtgaggctgtgccgggtgctaagggggcgacaaggaggagaaagccctgtagccgcccgctcagctctatcctggggaggagtaacctgaaatttgctggaatgccaatcactctcaccgtctccaccagcagcctcaacctcatggccgcagactgcaaacagatcatcgccaaccaccacatgcaatctatctcatttgcatccggcggggatccggacacagccgagtatgtcgcctatgttgccaaagaccctgtgaatcagagagcctgccacattctggagtgtcccgaagggcttgcccaggatgtcatcagcaccattggccaggccttcgagttgcgcttcaaacaatacctcaggaacccacccaaactggtcacccctcatgacaggatggctggctttgatggctcagcatgggatgaggaggaggaagagccacctgaccatcagtactataatgacttcccggggaaggaaccccc

SEQ ID NO: 3856 - DNA, 1305 bp, Homo sapiens
  source 1..1305: mol_type = genomic DNA
ggatgaggaggaggaagagccacctgaccatcagtactataatgacttcccggggaaggaaccccccttggggggggtggtagacatgaggcttcgggaaggagccgctccaggggctgctcgacccactgcacccaatgcccagacccccagccacttgggagctacattgcctgtaggacagcctgttgggggagatccagaagtccgcaaacagatgccacctccaccaccctgtccaggcagagagctttttgatgatccctcctatgtcaacgtccagaacctagacaaggcccggcaagcagtgggtggtgctgggccccccaatcctgctatcaatggcagtgcaccccgggacctgtttgacatgaagcccttcgaagatgctcttcgcgtgcctccacctccccagtcggtgtccatggctgagcagctccgaggggagccctggttccatgggaagctgagccggcgggaggctgaggcactgctgcagctcaatggggacttcctggtacgggagagcacgaccacacctggccagtatgtgctcactggcttgcagagtgggcagcctaagcatttgctactggtggaccctgagggtgtgagatggggtttcgccatgttgcccaagctgttcttgaactcccgggctcaagtgatccgcctccctcggcctcccagagtgctgggattacaggcacggaccaccatgcccagcctccacatctttttttgcactgtgtatactcttctgagacatgccaacttcctccaggtcaagaaaggggtatatagctctcagcttcactctttcagggctgatgtcgcctttgccttttctcacttcactgacctgtctattcctacaactgtctctttctagagaagcctcaatgatcaggattgacaggccacactctcccccaccatttttttctcctccttcaagcctcttgtctgtttcaccctcttccaccttggaggctgaggtcttatttgactcttcacctgaattgaccttcttccttcccaccctcccaggttcggactaaggatcaccgctttgaaagtgtcagtcaccttatcagctaccacatggacaatcacttgcccatcatctctgcgggcagcgaactgtgtctacagcaacctgtggagcggaaactgtgatctgccctagcgctctcttccagaagatgccctccaatcctttccaccctattccctaactctcgggacctcgtttgggagtgttctgtgggcttggccttgtgtcagagctgggagtagcatgga

SEQ ID NO: 3857 - DNA, 3481 bp, Homo sapiens
  source 1..3481: mol_type = genomic DNA
agagaagaggctccacgttgggcggggatggggcctgaaactgtctgggtctgagctggggagcggaagccacttgtccctctccctccccaggacttctgtgactcctgggccacagaggtccaaccaggctaagggcctggggataccccctgcctggcccccttgcccaaactggcaggggggccaggctgggcagcagcccctctttcacctcaactatggatctcctgccccccaagcccaagtacaatccactccggaatgagtctctgtcatcgctggaggaaggggcttctgggtccacccccccggaggagctgccttccccatcagcttcatccctggggcccatcctgcctcctctgcctggggacgatagtcccactaccctgtgctccttcttcccccggatgagcaacctgaggctggccaacccggctggggggcgcccagggtctaagggggagccaggaagggcagctgatgatggggaggggatcgtaggggcagccatgccagactcaggccccctacccctcctccaggacatgaacaagctgagtggaggcggcgggcgcaggactcgggtggaagggggccagcttgggggcgaggagtggacccgccacgggagctttgtcaataagcccacgcggggctggctgcatcccaacgacaaagtcatgggacccggggtttcctacttggttcggtacatgggttgtgtggaggtcctccagtcaatgcgtgccctggacttcaacacccggactcaggtcaccagggaggccatcagtctggtgtgtgaggctgtgccgggtgctaagggggcgacaaggaggagaaagccctgtagccgcccgctcagctctatcctggggaggagtaacctgaaatttgctggaatgccaatcactctcaccgtctccaccagcagcctcaacctcatggccgcagactgcaaacagatcatcgccaaccaccacatgcaatctatctcatttgcatccggcggggatccggacacagccgagtatgtcgcctatgttgccaaagaccctgtgaatcagagagcctgccacattctggagtgtcccgaagggcttgcccaggatgtcatcagcaccattggccaggccttcgagttgcgcttcaaacaatacctcaggaacccacccaaactggtcacccctcatgacaggatggctggctttgatggctcagcatgggatgaggaggaggaagagccacctgaccatcagtactataatgacttcccggggaaggaaccccccttggggggggtggtagacatgaggcttcgggaaggagccgctccaggggctgctcgacccactgcacccaatgcccagacccccagccacttgggagctacattgcctgtaggacagcctgttgggggagatccagaagtccgcaaacagatgccacctccaccaccctgtccagcaggcagagagctttttgatgatccctcctatgtcaacgtccagaacctagacaaggcccggcaagcagtgggtggtgctgggccccccaatcctgctatcaatggcagtgcaccccgggacctgtttgacatgaagcccttcgaagatgctcttcgcgtgcctccacctccccagtcggtgtccatggctgagcagctccgaggggagccctggttccatgggaagctgagccggcgggaggctgaggcactgctgcagctcaatggggacttcctggtacgggagagcacgaccacacctggccagtatgtgctcactggcttgcagagtgggcagcctaagcatttgctactggtggaccctgagggtgtggttcggactaaggatcaccgctttgaaagtgtcagtcaccttatcagctaccacatggacaatcacttgcccatcatctctgcgggcagcgaactgtgtctacagcaacctgtggagcggaaactgtgatctgccctagcgctctcttccagaagatgccctccaatcctttccaccctattccctaactctcgggacctcgtttgggagtgttctgtgggcttggccttgtgtcagagctgggagtagcatggactctgggtttcatatccagctgagtgagagggtttgagtcaaaagcctgggtgagaatcctgcctctccccaaacattaatcaccaaagtattaatgtacagagtggcccctcacctgggcctttcctgtgccaacctgatgccccttccccaagaaggtgagtgcttgtcatggaaaatgtcctgtggtgacaggcccagtggaacagtcacccttctgggcaagggggaacaaatcacacctctgggcttcagggtatcccagacccctctcaacacccgccccccccatgtttaaactttgtgcctttgaccatctcttaggtctaatgatattttatgcaaacagttcttggacccctgaattcaatgacagggatgccaacaccttcttggcttctgggacctgtgttcttgctgagcaccctctccggtttgggttgggataacagaggcaggagtggcagctgtcccctctccctggggatatgcaacccttagagattgccccagagccccactcccggccaggcgggagatggacccctcccttgctcagtgcctcctggccggggcccctcaccccaaggggtctgtatatacatttcataaggcctgccctcccatgttgcatgcctatgtactctacgccaaagtgcagcccttcctcctgaagcctctgccctgcctccctttctgggagggcggggtgggggtgactgaatttgggcctcttgtacagttaactctcccaggtggattttgtggaggtgagaaaaggggcattgagactataaagcagtagacaatccccacataccatctgtagagttggaactgcattcttttaaagttttatatgcatatattttagggctgtagacttactttcctattttcttttccattgcttattcttgagcacaaaatgataatcaattattacatttatacatcacctttttgacttttccaagcccttttacagctcttggcattttcctcgcctaggcctgtgaggtaactgggatcgcaccttttataccagagacctgaggcagatgaaatttatttccatctaggactagaaaaacttgggtctcttaccgcgagactgagaggcagaagtcagcccgaatgcctgtcagtttcatggaggggaaacgcaaaacctgcagttcctgagtaccttctacaggcccggcccagcctaggcccggggtggccacaccacagcaagccggccccccctcttttggccttgtggataagggagagttgaccgttttcatcctggcctccttttgctgtttggatgtttccacgggtctcacttataccaaagggaaaactcttcattaaagtccgtatttcttcta

SEQ ID NO: 3858 - DNA, 2490 bp, Homo sapiens
  source 1..2490: mol_type = genomic DNA
atgacgcagggtccgggcgggcgcgcgcccccggcgccccccgcgccccccgagcccgaggcgcccaccaccttctgcgcgttgctgccccgaatgccgcagtggaagttcgcggccccgggcggcttcctgggccgcggcccggcggcggcgcgggcggctggggcctcggggggcgcggacccccaacccgagccggcgggcccggggggcgtcccggcgctggcggccgccgtcctgggcgcctgcgagccccgctgcgccgcgccctgtcccctgcccgcgctcagccgctgtcggggcgcggggtcgcgggggtcgcggggcgggcggggggcggcggggtccggggacgccgccgccgccgccgagtggatccggaagggcagcttcatccacaaacccgcgcacggctggctacaccccgacgccagggtcctggggcccggggtctcctacgtcgtgcggtacatgggctgcatcgaggttctccgctctatgcgctccctggactttaacacgcgcacgcaggtgaccagggaagccatcaaccggctccatgaggccgtgcctggcgtccggggatcctggaagaaaaaggcccccaacaaggccctggcgtccgtcctgggcaagagcaaccttcgctttgccggcatgagcatctccatccacatctccactgatggcctcagcctctccgtgcctgccacgcgccaggtcatcgccaaccaccacatgccgtccatctccttcgcgtcaggcggagacacggacatgacggattacgtggcctacgtcgccaaggaccccatcaaccagagagcctgccacatcctggagtgctgtgagggcctggcacagagcatcatcagcaccgtgggccaagctttcgagctgcgcttcaagcagtacctgcacagcccgcccaaggtggcgctgcccccagaaaggctggcagggccggaggagtcggcctggggggacgaggaggactctttggagcacaattactacaacagcatcccggggaaggagccgccgctgggcgggctagtggactccaggctggccctgacacagccctgcgccctcacggccctcgaccagggcccatctccttctctaagagatgcctgcagcctgccatgggacgtggggtccaccggtacagctccaccgggggacggctacgtgcaggcggacgcccggggccccccggaccacgaggagcacctgtatgtcaacacccagggtctggacgcccccgagccggaggacagccccaaaaaggatctgtttgacatgcgaccctttgaggatgccctgaagttgcatgagtgctcagtggcggcaggcgtgacagcagcccctcttcccttggaggaccagtggcccagcccccctacccgccgggcccctgtggcccccacggaggaacagctgcgtcaggagccctggtaccacggccggatgagccgccgggcggcagagaggatgcttcgagctgacggggacttccttgtgcgagacagcgtcaccaaccccgggcagtatgtcctcaccggcatgcacgccgggcagcccaagcacctgctgctcgtggaccccgagggcgtggtacggacgaaggacgtgctgtttgagagcatcagccacctgatcgaccaccacctgcagaacgggcagcccatcgtggccgccgagagtgagctgcacctgcgtggcgtggtctcacgggagccctgagccaggtgaccgttctcagccctggctcctgcctgttctcagccccggctcctgcctgtcatggccttggggctctcagccctcctcctggatcctggtcaggccgaaccaccgctgcctctccttcctccgcatgagcctctggcatggtccttcctccagctggccccgggctgggcagagcctcctcctgccggggcccctgcccaccccctcctttgcctggagtgagggtgttcataccaaagacggaaccatttcgcctttaaagaaaatatatccagaagcagccgctgcctcggagccctggcccttgggtccccctctcgcctggctggttcggtctaacgccccggagagtcagggctcccaggaccctggggaggaggcggattccgggcctggctgggcttcctcttcccacctgaggactgggtgcacagttgtctttgaggggggacgcttaaggtgctttggggttctcaggccaggatacatgctggcgctgaagtgcaggcagccttgaggtcacctgggatctcggggtagccaggctgctccaagacagtggatatcgaggcagtcgtgaggcccctactccacctgggagcaggggaaggacgtggttgcctggcctgggctgcgcccagcagcttccccccagtcctgccctcccagctgtcgacccagatgggatgttcggatcggtttgtaattaaacctgggaatggccacaagagc

SEQ ID NO: 3859 - DNA, 2453 bp, Homo sapiens
  source 1..2453: mol_type = genomic DNA
agtcctgcgcgcccccgggcggagatggggagggcacccggcgttctgagcggaagtacggttgagccgatttccggggccactggtgtgacgtgtcccgcgcttggcgcagcaggaagcggcggcgaacgcggcctgaattcccggcgccggccccagctcctctgccgctgccgccatgctcgacttcttcaccattttctccaagggcgggcttgtgctctggtgcttccagggcgttagcgactcatgcaccggacccgttaacgcgttgattcgttccgtgctgctgcaggttggttttcagaagatcctgacactgacatatgtagacaaattgatagatgacgtgcatcggctgtttcgggacaagtaccgcacagagatccaacagcaaagtgctttaagtttattaaatggcacttttgatttccaaaatgacttcctgcggctccttcgtgaagcagaggagagcagtaagatccgtgctcccactaccatgaagaaatttgaagattctgaaaaggccaagaaacctgtgaggtccatgattgagacacggggggaaaagcccaaggaaaaagcaaagaatagcaaaaaaaagggggccaagaaggaaggttctgatggtcctttggctaccagcaaaccagtccctgcagaaaagtcaggtcttccagtgggtcctgagaacggagtagaactttccaaagaggagctgatccgcaggaagcgcgaggagttcattcagaagcatgggaggggtatggagaagtccaacaagtccacgaagtcagatgctccaaaggagaagggcaaaaaagcaccccgggtgtgggaactgggtggctgtgctaacaaagaagtgttggattacagtactcccaccaccaatggaacccctgaggctgccttgtctgaggacatcaacctgattcgagggactgggtctggggggcagcttcaggatctggactgcagcagctctgatgacgaaggggctgctcaaaactctaccaaacctagtgcgaccaagggaacactgggtggcatgtttggtatgctgaagggccttgtgggttcaaagagcttgagtcgtgaagacatggaatctgtgctggacaagatgcgtgatcatctcattgctaagaacgtggctgcagacattgccgtccagctctgtgaatctgttgccaacaagttggaagggaaggtgatggggacgttcagcacggtgacttccacagtaaagcaagccctacaggagtccctggtgcagattctgcagccacagcgtcgtgtagacatgctccgggacatcatggatgcccagcgtcgccagcgcccttatgtcgtcaccttctgcggcgttaatggagtggggaaatctactaatcttgccaagatttccttctggttgttagagaatggcttcagtgtcctcattgctgcctgtgatacatttcgtgctggggccgtggagcagctgcgtacacacacccggcgtttgagtgccctacaccctccagagaagcatggtggccgcaccatggtgcagttgtttgaaaagggctatggcaaggatgctgctggcattgccatggaagccattgcttttgcacgtaaccaaggctttgacgtggtgctggtggacacggcaggccgcatgcaagacaatgcccctctgatgactgccctggccaaactcattactgtcaatacacctgatttggtgctgtttgtaggagaagccttagtaggcaatgaagccgtggaccagctggtcaagttcaacagagccttggctgaccattctatggctcagacacctcggctcattgatggcattgttcttaccaaatttgataccattgatgacaaggtgggagctgctatttctatgacgtacatcacaagcaaacccatcgtctttgtgggcaccggccagacctactgtgacctacgcagcctcaatgccaaggctgtggtggctgccctcatgaaggcttaacgtggctcttgcccaataccaaatcgccgctttccccacaagcccttcttcctgtatcaagaatgtgctttagagtatgtgagcaacctgtcttcagtgtagtacaaaggcagagtgagggggcttgtggctccttccaaccccactccccgttcagcacagccgccatctgcaaggaaggcctaatcatgttacaatcactgcccactgaccctctcccagcgggcctcccccttcctactcaggcacccccttcactctgcctacagactcagtcttattacagctttgaccaatggttggaacccaacaccagagctttgctaataattagtgtggtcaagagccgtctgagcctaatgagtcccagctgcattaggttaagagactcttccagagccagcgccaggtcttgaatggcacctctccctaggatacacag

SEQ ID NO: 3860 - DNA, 4310 bp, Homo sapiens
  source 1..4310: mol_type = genomic DNA
gctgagcgcggagccgcccggtgattggtgggggcggaagggggccgggcgccagcgctgccttttctcctgccgggtagtttcgctttcctgcgcagagtctgcggaggggctcggctgcaccggggggatcgcgcctggcagaccccagaccgagcagaggcgacccagcgcgctcgggagaggctgcaccgccgcgcccccgcctagcccttccggatcctgcgcgcagaaaagtttcatttgctgtatgccatcctcgagagctgtctaggttaacgttcgcactctgtgtatataacctcgacagtcttggcacctaacgtgctgtgcgtagctgctcctttggttgaatccccaggcccttgttggggcacaaggtggcaggatgtctcagtggtacgaacttcagcagcttgactcaaaattcctggagcaggttcaccagctttatgatgacagttttcccatggaaatcagacagtacctggcacagtggttagaaaagcaagactgggagcacgctgccaatgatgtttcatttgccaccatccgttttcatgacctcctgtcacagctggatgatcaatatagtcgcttttctttggagaataacttcttgctacagcataacataaggaaaagcaagcgtaatcttcaggataattttcaggaagacccaatccagatgtctatgatcatttacagctgtctgaaggaagaaaggaaaattctggaaaacgcccagagatttaatcaggctcagtcggggaatattcagagcacagtgatgttagacaaacagaaagagcttgacagtaaagtcagaaatgtgaaggacaaggttatgtgtatagagcatgaaatcaagagcctggaagatttacaagatgaatatgacttcaaatgcaaaaccttgcagaacagagaacacgagaccaatggtgtggcaaagagtgatcagaaacaagaacagctgttactcaagaagatgtatttaatgcttgacaataagagaaaggaagtagttcacaaaataatagagttgctgaatgtcactgaacttacccagaatgccctgattaatgatgaactagtggagtggaagcggagacagcagagcgcctgtattggggggccgcccaatgcttgcttggatcagctgcagaactggttcactatagttgcggagagtctgcagcaagttcggcagcagcttaaaaagttggaggaattggaacagaaatacacctacgaacatgaccctatcacaaaaaacaaacaagtgttatgggaccgcaccttcagtcttttccagcagctcattcagagctcgtttgtggtggaaagacagccctgcatgccaacgcaccctcagaggccgctggtcttgaagacaggggtccagttcactgtgaagttgagactgttggtgaaattgcaagagctgaattataatttgaaagtcaaagtcttatttgataaagatgtgaatgagagaaatacagtaaaaggatttaggaagttcaacattttgggcacgcacacaaaagtgatgaacatggaggagtccaccaatggcagtctggcggctgaatttcggcacctgcaattgaaagaacagaaaaatgctggcaccagaacgaatgagggtcctctcatcgttactgaagagcttcactcccttagttttgaaacccaattgtgccagcctggtttggtaattgacctcgagacgacctctctgcccgttgtggtgatctccaacgtcagccagctcccgagcggttgggcctccatcctttggtacaacatgctggtggcggaacccaggaatctgtccttcttcctgactccaccatgtgcacgatgggctcagctttcagaagtgctgagttggcagttttcttctgtcaccaaaagaggtctcaatgtggaccagctgaacatgttgggagagaagcttcttggtcctaacgccagccccgatggtctcattccgtggacgaggttttgtaaggaaaatataaatgataaaaattttcccttctggctttggattgaaagcatcctagaactcattaaaaaacacctgctccctctctggaatgatgggtgcatcatgggcttcatcagcaaggagcgagagcgtgccctgttgaaggaccagcagccggggaccttcctgctgcggttcagtgagagctcccgggaaggggccatcacattcacatgggtggagcggtcccagaacggaggcgaacctgacttccatgcggttgaaccctacacgaagaaagaactttctgctgttactttccctgacatcattcgcaattacaaagtcatggctgctgagaatattcctgagaatcccctgaagtatctgtatccaaatattgacaaagaccatgcctttggaaagtattactccaggccaaaggaagcaccagagccaatggaacttgatggccctaaaggaactggatatatcaagactgagttgatttctgtgtctgaagttcacccttctagacttcagaccacagacaacctgctccccatgtctcctgaggagtttgacgaggtgtctcggatagtgggctctgtagaattcgacagtatgatgaacacagtatagagcatgaatttttttcatcttctctggcgacagttttccttctcatctgtgattccctcctgctactctgttccttcacatcctgtgtttctagggaaatgaaagaaaggccagcaaattcgctgcaacctgttgatagcaagtgaatttttctctaactcagaaacatcagttactctgaagggcatcatgcatcttactgaaggtaaaattgaaaggcattctctgaagagtgggtttcacaagtgaaaaacatccagatacacccaaagtatcaggacgagaatgagggtcctttgggaaaggagaagttaagcaacatctagcaaatgttatgcataaagtcagtgcccaactgttataggttgttggataaatcagtggttatttagggaactgcttgacgtaggaacggtaaatttctgtgggagaattcttacatgttttctttgctttaagtgtaactggcagttttccattggtttacctgtgaaatagttcaaagccaagtttatatacaattatatcagtcctctttcaaaggtagccatcatggatctggtagggggaaaatgtgtattttattacatctttcacattggctatttaaagacaaagacaaattctgtttcttgagaagagaatattagctttactgtttgttatggcttaatgacactagctaatatcaatagaaggatgtacatttccaaattcacaagttgtgtttgatatccaaagctgaatacattctgctttcatcttggtcacatacaattatttttacagttctcccaagggagttaggctattcacaaccactcattcaaaagttgaaattaaccatagatgtagataaactcagaaatttaattcatgtttcttaaatgggctactttgtcctttttgttattagggtggtatttagtctattagccacaaaattgggaaaggagtagaaaaagcagtaactgacaacttgaataatacaccagagataatatgagaatcagatcatttcaaaactcatttcctatgtaactgcattgagaactgcatatgtttcgctgatatatgtgtttttcacatttgcgaatggttccattctctctcctgtactttttccagacacttttttgagtggatgatgtttcgtgaagtatactgtatttttacctttttccttccttatcactgacacaaaaagtagattaagagatgggtttgacaaggttcttcccttttacatactgctgtctatgtggctgtatcttgtttttccactactgctaccacaactatattatcatgcaaatgctgtattcttctttggtggagataaagatttcttgagttttgttttaaaattaaagctaaagtatctgtattgcattaaatataatatgcacacagtgctttccgtggcactgcatacaatctgaggcctcctctctcagtttttatatagatggcgagaacctaagtttcagttgattttacaattgaaatgactaaaaaacaaagaagacaacattaaaacaatattgtttctaattgctgaggtttagctgtcagttctttttgccctttgggaattcggcatggtttcattttactgcactagccaagagactttacttttaagaagtattaaaattctaaaattcta

SEQ ID NO: 3861 - DNA, 2716 bp, Homo sapiens
  source 1..2716: mol_type = genomic DNA
tcgctttcctgcgcagagtctgcggaggggctcggctgcaccggggggatcgcgcctggcagaccccagaccgagcagaggcgacccagcgcgctcgggagaggctgcaccgccgcgcccccgcctagcccttccggatcctgcgcgcagaaaagtttcatttgctgtatgccatcctcgagagctgtctaggttaacgttcgcactctgtgtatataacctcgacagtcttggcacctaacgtgctgtgcgtagctgctcctttggttgaatccccaggcccttgttggggcacaaggtggcaggatgtctcagtggtacgaacttcagcagcttgactcaaaattcctggagcaggttcaccagctttatgatgacagttttcccatggaaatcagacagtacctggcacagtggttagaaaagcaagactgggagcacgctgccaatgatgtttcatttgccaccatccgttttcatgacctcctgtcacagctggatgatcaatatagtcgcttttctttggagaataacttcttgctacagcataacataaggaaaagcaagcgtaatcttcaggataattttcaggaagacccaatccagatgtctatgatcatttacagctgtctgaaggaagaaaggaaaattctggaaaacgcccagagatttaatcaggctcagtcggggaatattcagagcacagtgatgttagacaaacagaaagagcttgacagtaaagtcagaaatgtgaaggacaaggttatgtgtatagagcatgaaatcaagagcctggaagatttacaagatgaatatgacttcaaatgcaaaaccttgcagaacagagaacacgagaccaatggtgtggcaaagagtgatcagaaacaagaacagctgttactcaagaagatgtatttaatgcttgacaataagagaaaggaagtagttcacaaaataatagagttgctgaatgtcactgaacttacccagaatgccctgattaatgatgaactagtggagtggaagcggagacagcagagcgcctgtattggggggccgcccaatgcttgcttggatcagctgcagaactggttcactatagttgcggagagtctgcagcaagttcggcagcagcttaaaaagttggaggaattggaacagaaatacacctacgaacatgaccctatcacaaaaaacaaacaagtgttatgggaccgcaccttcagtcttttccagcagctcattcagagctcgtttgtggtggaaagacagccctgcatgccaacgcaccctcagaggccgctggtcttgaagacaggggtccagttcactgtgaagttgagactgttggtgaaattgcaagagctgaattataatttgaaagtcaaagtcttatttgataaagatgtgaatgagagaaatacagtaaaaggatttaggaagttcaacattttgggcacgcacacaaaagtgatgaacatggaggagtccaccaatggcagtctggcggctgaatttcggcacctgcaattgaaagaacagaaaaatgctggcaccagaacgaatgagggtcctctcatcgttactgaagagcttcactcccttagttttgaaacccaattgtgccagcctggtttggtaattgacctcgagacgacctctctgcccgttgtggtgatctccaacgtcagccagctcccgagcggttgggcctccatcctttggtacaacatgctggtggcggaacccaggaatctgtccttcttcctgactccaccatgtgcacgatgggctcagctttcagaagtgctgagttggcagttttcttctgtcaccaaaagaggtctcaatgtggaccagctgaacatgttgggagagaagcttcttggtcctaacgccagccccgatggtctcattccgtggacgaggttttgtaaggaaaatataaatgataaaaattttcccttctggctttggattgaaagcatcctagaactcattaaaaaacacctgctccctctctggaatgatgggtgcatcatgggcttcatcagcaaggagcgagagcgtgccctgttgaaggaccagcagccggggaccttcctgctgcggttcagtgagagctcccgggaaggggccatcacattcacatgggtggagcggtcccagaacggaggcgaacctgacttccatgcggttgaaccctacacgaagaaagaactttctgctgttactttccctgacatcattcgcaattacaaagtcatggctgctgagaatattcctgagaatcccctgaagtatctgtatccaaatattgacaaagaccatgcctttggaaagtattactccaggccaaaggaagcaccagagccaatggaacttgatggccctaaaggaactggatatatcaagactgagttgatttctgtgtctgaagtgtaagtgaacacagaagagtgacatgtttacaaacctcaagccagccttgctcctggctggggcctgttgaagatgcttgtattttacttttccattgtaattgctatcgccatcacagctgaacttgttgagatccccgtgttactgcctatcagcattttactactttaaaaaaaaaaaaaaagccaaaaaccaaatttgtatttaaggtatataaattttcccaaaactgataccctttgaaaaagtataaataaaatgagcaaaagttgat

SEQ ID NO: 3862 - DNA, 2723 bp, Homo sapiens
  source 1..2723: mol_type = genomic DNA
agcgctgccttttctcctgccgggtagtttcgctttcctgcgcagagtctgcggaggggctcggctgcaccggggggatcgcgcctggcagaccccagaccgagcagaggcgacccagcgcgctcgggagaggctgcaccgccgcgcccccgcctagcccttccggatcctgcgcgcagaaaagtttcatttgctgtatgccatcctcgagagctgtctaggttaacgttcgcactctgtgtatataacctcgacagtcttggcacctaacgtgctgtgcgtagctgctcctttggttgaatccccaggcccttgttggggcacaaggtggcagggatacaccagtgcacagaatcctccaccaacatccatcccttcaagtggtgaaaacagacaataatgaaaataaaatatgtggatgtctcagtggtacgaacttcagcagcttgactcaaaattcctggagcaggttcaccagctttatgatgacagttttcccatggaaatcagacagtacctggcacagtggttagaaaagcaagactgggagcacgctgccaatgatgtttcatttgccaccatccgttttcatgacctcctgtcacagctggatgatcaatatagtcgcttttctttggagaataacttcttgctacagcataacataaggaaaagcaagcgtaatcttcaggataattttcaggaagacccaatccagatgtctatgatcatttacagctgtctgaaggaagaaaggaaaattctggaaaacgcccagagatttaatcaggctcagtcggggaatattcagagcacagtgatgttagacaaacagaaagagcttgacagtaaagtcagaaatgtgaaggacaaggttatgtgtatagagcatgaaatcaagagcctggaagatttacaagatgaatatgacttcaaatgcaaaaccttgcagaacagagaacacgagaccaatggtgtggcaaagagtgatcagaaacaagaacagctgttactcaagaagatgtatttaatgcttgacaataagagaaaggaagtagttcacaaaataatagagttgctgaatgtcactgaacttacccagaatgccctgattaatgatgaactagtggagtggaagcggagacagcagagcgcctgtattggggggccgcccaatgcttgcttggatcagctgcagaactggttcactatagttgcggagagtctgcagcaagttcggcagcagcttaaaaagttggaggaattggaacagaaatacacctacgaacatgaccctatcacaaaaaacaaacaagtgttatgggaccgcaccttcagtcttttccagcagctcattcagagctcgtttgtggtggaaagacagccctgcatgccaacgcaccctcagaggccgctggtcttgaagacaggggtccagttcactgtgaagttgagactgttggtgaaattgcaagagctgaattataatttgaaagtcaaagtcttatttgataaagatgtgaatgagagaaatacagtaaaaggatttaggaagttcaacattttgggcacgcacacaaaagtgatgaacatggaggagtccaccaatggcagtctggcggctgaatttcggcacctgcaattgaaagaacagaaaaatgctggcaccagaacgaatgagggtcctctcatcgttactgaagagcttcactcccttagttttgaaacccaattgtgccagcctggtttggtaattgacctcgagacgacctctctgcccgttgtggtgatctccaacgtcagccagctcccgagcggttgggcctccatcctttggtacaacatgctggtggcggaacccaggaatctgtccttcttcctgactccaccatgtgcacgatgggctcagctttcagaagtgctgagttggcagttttcttctgtcaccaaaagaggtctcaatgtggaccagctgaacatgttgggagagaagcttcttggtcctaacgccagccccgatggtctcattccgtggacgaggttttgtaaggaaaatataaatgataaaaattttcccttctggctttggattgaaagcatcctagaactcattaaaaaacacctgctccctctctggaatgatgggtgcatcatgggcttcatcagcaaggagcgagagcgtgccctgttgaaggaccagcagccggggaccttcctgctgcggttcagtgagagctcccgggaaggggccatcacattcacatgggtggagcggtcccagaacggaggcgaacctgacttccatgcggttgaaccctacacgaagaaagaactttctgctgttactttccctgacatcattcgcaattacaaagtcatggctgctgagaatattcctgagaatcccctgaagtatctgtatccaaatattgacaaagaccatgcctttggaaagtattactccaggccaaaggaagcaccagagccaatggaacttgatggccctaaaggaactggatatatcaagactgagttgatttctgtgtctgaagtgtaagtgaacacagaagagtgacatgtttacaaacctcaagccagccttgctcctggctggggcctgttgaagatgcttgtattttacttttccattgtaattgctatcgccatcacagctgaacttgttgagatccccgtgttactgcctatcagcattttactacttt

SEQ ID NO: 3863 - DNA, 3097 bp, Homo sapiens
  source 1..3097: mol_type = genomic DNA
gtgcagttggacgccgggcgaggacgggccgtctgtgctgacccgcgaatagtgatcccagaggaagaacgcgtcctgagtattccaagtgcgagcagtgccacctgttctcggagatggcactgctcagcacgattgtccttgccagtcgtgctctggcagtgaagaggacttgtgaaatataattttcctctagaaggcactgcaccttcccatttaccgtcactttctcccgtttccacccctttccatcagtcacgttttcttcttttcgcagaaagtttcatttgctgtatgccatcctcgagagctgtctaggttaacgttcgcactctgtgtatataacctcgacagtcttggcacctaacgtgctgtgcgtagctgctcctttggttgaatccccaggcccttgttggggcacaaggtggcaggatgtctcagtggtacgaacttcagcagcttgactcaaaattcctggagcaggttcaccagctttatgatgacagttttcccatggaaatcagacagtacctggcacagtggttagaaaagcaagactgggagcacgctgccaatgatgtttcatttgccaccatccgttttcatgacctcctgtcacagctggatgatcaatatagtcgcttttctttggagaataacttcttgctacagcataacataaggaaaagcaagcgtaatcttcaggataattttcaggaagacccaatccagatgtctatgatcatttacagctgtctgaaggaagaaaggaaaattctggaaaacgcccagagatttaatcaggctcagtcggggaatattcagagcacagtgatgttagacaaacagaaagagcttgacagtaaagtcagaaatgtgaaggacaaggttatgtgtatagagcatgaaatcaagagcctggaagatttacaagatgaatatgacttcaaatgcaaaaccttgcagaacagagaacacgagaccaatggtgtggcaaagagtgatcagaaacaagaacagctgttactcaagaagatgtatttaatgcttgacaataagagaaaggaagtagttcacaaaataatagagttgctgaatgtcactgaacttacccagaatgccctgattaatgatgaactagtggagtggaagcggagacagcagagcgcctgtattggggggccgcccaatgcttgcttggatcagctgcagaactggttcactatagttgcggagagtctgcagcaagttcggcagcagcttaaaaagttggaggaattggaacagaaatacacctacgaacatgaccctatcacaaaaaacaaacaagtgttatgggaccgcaccttcagtcttttccagcagctcattcagagctcgtttgtggtggaaagacagccctgcatgccaacgcaccctcagaggccgctggtcttgaagacaggggtccagttcactgtgaagttgagactgttggtgaaattgcaagagctgaattataatttgaaagtcaaagtcttatttgataaagatgtgaatgagagaaatacagtaaaaggatttaggaagttcaacattttgggcacgcacacaaaagtgatgaacatggaggagtccaccaatggcagtctggcggctgaatttcggcacctgcaattgaaagaacagaaaaatgctggcaccagaacgaatgagggtcctctcatcgttactgaagagcttcactcccttagttttgaaacccaattgtgccagcctggtttggtaattgacctcgagacgacctctctgcccgttgtggtgatctccaacgtcagccagctcccgagcggttgggcctccatcctttggtacaacatgctggtggcggaacccaggaatctgtccttcttcctgactccaccatgtgcacgatgggctcagctttcagaagtgctgagttggcagttttcttctgtcaccaaaagaggtctcaatgtggaccagctgaacatgttgggagagaagcttcttggtcctaacgccagccccgatggtctcattccgtggacgaggttttgtaaggaaaatataaatgataaaaattttcccttctggctttggattgaaagcatcctagaactcattaaaaaacacctgctccctctctggaatgatgggtgcatcatgggcttcatcagcaaggagcgagagcgtgccctgttgaaggaccagcagccggggaccttcctgctgcggttcagtgagagctcccgggaaggggccatcacattcacatgggtggagcggtcccagaacggaggcgaacctgacttccatgcggttgaaccctacacgaagaaagaactttctgctgttactttccctgacatcattcgcaattacaaagtcatggctgctgagaatattcctgagaatcccctgaagtatctgtatccaaatattgacaaagaccatgcctttggaaagtattactccaggccaaaggaagcaccagagccaatggaacttgatggccctaaaggaactggatatatcaagactgagttgatttctgtgtctgaagttcacccttctagacttcagaccacagacaacctgctccccatgtctcctgaggagtttgacgaggtgtctcggatagtgggctctgtagaattcgacagtatgatgaacacagtatagagcatgaatttttttcatcttctctggcgacagttttccttctcatctgtgattccctcctgctactctgttccttcacatcctgtgtttctagggaaatgaaagaaaggccagcaaattcgctgcaacctgttgatagcaagtgaatttttctctaactcagaaacatcagttactctgaagggcatcatgcatcttactgaaggtaaaattgaaaggcattctctgaagagtgggtttcacaagtgaaaaacatccagatacacccaaagtatcaggacgagaatgagggtcctttgggaaaggagaagttaagcaacatctagcaaatgttatgcataaagtcagtgcccaactgttataggttgttggataaatcagtggttatttagggaactgcttgacgtaggaa

SEQ ID NO: 3864 - DNA, 736 bp, Homo sapiens
  source 1..736: mol_type = genomic DNA
gggggccgggcgccagcgctgccttttctcctgccgggtagtttcgctttcctgcgcagagtctgcggaggggctcggctgcaccggggggatcgcgcctggcagaccccagaccgagcagaggcgacccagcgcgctcgggagaggctgcaccgccgcgcccccgcctagcccttccggatcctgcgcgcagagatgtctcagtggtacgaacttcagcagcttgactcaaaattcctggagcaggttcaccagctttatgatgacagttttcccatggaaatcagacagtacctggcacagtggttagaaaagcaagactgggagcacgctgccaatgatgtttcatttgccaccatccgttttcatgacctcctgtcacagctggatgatcaatatagtcgcttttctttggagaataacttcttgctacagcataacataaggaaaagcaagcgtaatcttcaggataattttcaggaagacccaatccagatgtctatgatcatttacagctgtctgaaggaagaaaggaaaattctggaaaacgcccagagatttaatcaggctcagtcggggaatattcagagcacagtgatgttagacaaacagaaagagcttgacagtaaagtcagaaatgtgaaggacaaggttatgtgtatagagcatgaaatcaagagcctggaagatttacaagatgaatatgacttcaaatgcaaaaccttgcagaacagag

SEQ ID NO: 3865 - DNA, 567 bp, Homo sapiens
  source 1..567: mol_type = genomic DNA
gcagaccgagcctgaggacgcctatagaaactgccagaccccaacctctggttcaagggcagctacccaggctggctgagggtcacagcttaccagacaggacaagatctgagtcagtgcaagtgcaaactgtgtagatagcgaagtgaagcgggtaaaagagaccttttcaggacaaggaaagaaacggtggaagtgcaaggaaagtttcatttgctgtatgccatcctcgagagctgtctaggttaacgttcgcactctgtgtatataacctcgacagtcttggcacctaacgtgctgtgcgtagctgctcctttggttgaatccccaggcccttgttggggcacaaggtggcaggatgtctcagtggtacgaacttcagcagcttgactcaaaattcctggagcaggttcaccagctttatgatgacagttttcccatggaaatcagacagtacctggcacagtggttagaaaagcaagactgggagcacgctgccaatgatgtttcatttgccaccatccgttttcatgacctcctgtcacagctggatgatcaatatagtcg

SEQ ID NO: 3866 - DNA, 2594 bp, Homo sapiens
  source 1..2594: mol_type = genomic DNA
gattggtgggggcggaagggggccgggcgccagcgctgccttttctcctgccgggtagtttcgctttcctgcgcagagtctgcggaggggctcggctgcaccggggggatcgcgcctggcagaccccagaccgagcagaggcgacccagcgcgctcgggagaggctgcaccgccgcgcccccgcctagcccttccggatcctgcgcgcagaaaagtttcatttgctgtatgccatcctcgagagctgtctaggttaacgttcgcactctgtgtatataacctcgacagtcttggcacctaacgtgctgtgcgtagctgctcctttggttgaatccccaggcccttgttggggcacaaggtggcaggatgtctcagtggtacgaacttcagcagcttgactcaaaattcctggagcaggttcaccagctttatgatgacagttttcccatggaaatcagacagtacctggcacagtggttagaaaagcaagactgggagcacgctgccaatgatgtttcatttgccaccatccgttttcatgacctcctgtcacagctggatgatcaatatagtcgcttttctttggagaataacttcttgctacagcataacataaggaaaagcaagcgtaatcttcaggataattttcaggaagacccaatccagatgtctatgatcatttacagctgtctgaaggaagaaaggaaaattctggaaaacgcccagagatttaatcaggctcagtcggggaatattcagagcacagtgatgttagacaaacagaaagagcttgacagtaaagtcagaaatgtgaaggacaaggttatgtgtatagagcatgaaatcaagagcctggaagatttacaagatgaatatgacttcaaatgcaaaaccttgcagaacagaggaagtagttcacaaaataatagagttgctgaatgtcactgaacttacccagaatgccctgattaatgatgaactagtggagtggaagcggagacagcagagcgcctgtattggggggccgcccaatgcttgcttggatcagctgcagaactggttcactatagttgcggagagtctgcagcaagttcggcagcagcttaaaaagttggaggaattggaacagaaatacacctacgaacatgaccctatcacaaaaaacaaacaagtgttatgggaccgcaccttcagtcttttccagcagctcattcagagctcgtttgtggtggaaagacagccctgcatgccaacgcaccctcagaggccgctggtcttgaagacaggggtccagttcactgtgaagttgagactgttggtgaaattgcaagagctgaattataatttgaaagtcaaagtcttatttgataaagatgtgaatgagagaaatacagtaaaaggatttaggaagttcaacattttgggcacgcacacaaaagtgatgaacatggaggagtccaccaatggcagtctggcggctgaatttcggcacctgcaattgaaagaacagaaaaatgctggcaccagaacgaatgagggtcctctcatcgttactgaagagcttcactcccttagttttgaaacccaattgtgccagcctggtttggtaattgacctcgagacgacctctctgcccgttgtggtgatctccaacgtcagccagctcccgagcggttgggcctccatcctttggtacaacatgctggtggcggaacccaggaatctgtccttcttcctgactccaccatgtgcacgatgggctcagctttcagaagtgctgagttggcagttttcttctgtcaccaaaagaggtctcaatgtggaccagctgaacatgttgggagagaagcttcttggtcctaacgccagccccgatggtctcattccgtggacgaggttttgtaaggaaaatataaatgataaaaattttcccttctggctttggattgaaagcatcctagaactcattaaaaaacacctgctccctctctggaatgatgggtgcatcatgggcttcatcagcaaggagcgagagcgtgccctgttgaaggaccagcagccggggaccttcctgctgcggttcagtgagagctcccgggaaggggccatcacattcacatgggtggagcggtcccagaacggaggcgaacctgacttccatgcggttgaaccctacacgaagaaagaactttctgctgttactttccctgacatcattcgcaattacaaagtcatggctgctgagaatattcctgagaatcccctgaagtatctgtatccaaatattgacaaagaccatgcctttggaaagtattactccaggccaaaggaagcaccagagccaatggaacttgatggccctaaaggaactggatatatcaagactgagttgatttctgtgtctgaagtgtaagtgaacacagaagagtgacatgtttacaaacctcaagccagccttgctcctggctggggcctgttgaagatgcttgtattttacttttccattgtaattgctatcgccatcacagctgaacttgttgagatccccgtgttactgcctatcagcattttactactttaaaaaaaaaaaaaaa

SEQ ID NO: 3867 - DNA, 572 bp, Homo sapiens
  source 1..572: mol_type = genomic DNA
aaactgcaccgcgcaaagccaggggcgtgggcgggcccgggctgctctacctgcgctcggaaagctagggctccaaagcgttcctgagcggtttttgaccgcgaatgtgatagtgctcatggatgtctcagtggtacgaacttcagcagcttgactcaaaattcctggagcaggttcaccagctttatgatgacagttttcccatggaaatcagacagtacctggcacagtggttagaaaagcaagactgggagcacgctgccaatgatgtttcatttgccaccatccgttttcatgacctcctgtcacagctggatgatcaatatagtcgcttttctttggagaataacttcttgctacagcataacataaggaaaagcaagcgtaatcttcaggataattttcaggaagacccaatccagatgtctatgatcatttacagctgtctgaaggaagaaaggaaaattctggaaaacgcccagagatttaatcaggctcagtcggggaatattcagagcacagtgatgttagacaaacagaaagagcttgacagtaaagtcagaaatgtgaag

SEQ ID NO: 3868 - DNA, 2261 bp, Homo sapiens
  source 1..2261: mol_type = genomic DNA
gtgctgtgcgtagctgctcctttggttgaatccccaggcccttgttggggcacaaggtggcaggatgtctcagtggtacgaacttcagcagcttgactcaaaattcctggagcaggttcaccagctttatgatgacagttttcccatggaaatcagacagtacctggcacagtggttagaaaagcaagactgggagcacgctgccaatgatgtttcatttgccaccatccgttttcatgacctcctgtcacagctggatgatcaatatagtcgcttttctttggagaataacttcttgctacagcataacataaggaaaagcaagcgtaatcttcaggataattttcaggaagacccaatccagatgtctatgatcatttacagctgtctgaaggaagaaaggaaaattctggaaaacgcccagagatttaatcaggctcagtcggggaatattcagagcacagtgatgttagacaaacagaaagagcttgacagtaaagtcagaaatgtgaaggacaaggttatgtgtatagagcatgaaatcaagagcctggaagatttacaagatgaatatgacttcaaatgcaaaaccttgcagaacagaggaagtagttcacaaaataatagagttgctgaatgtcactgaacttacccagaatgccctgattaatgatgaactagtggagtggaagcggagacagcagagcgcctgtattggggggccgcccaatgcttgcttggatcagctgcagaactggttcactatagttgcggagagtctgcagcaagttcggcagcagcttaaaaagttggaggaattggaacagaaatacacctacgaacatgaccctatcacaaaaaacaaacaagtgttatgggaccgcaccttcagtcttttccagcagctcattcagagctcgtttgtggtggaaagacagccctgcatgccaacgcaccctcagaggccgctggtcttgaagacaggggtccagttcactgtgaagttgagactgttggtgaaattgcaagagctgaattataatttgaaagtcaaagtcttatttgataaagatgtgaatgagagaaatacagtaaaaggatttaggaagttcaacattttgggcacgcacacaaaagtgatgaacatggaggagtccaccaatggcagtctggcggctgaatttcggcacctgcaattgaaagaacagaaaaatgctggcaccagaacgaatgagggtcctctcatcgttactgaagagcttcactcccttagttttgaaacccaattgtgccagcctggtttggtaattgacctcgagacgacctctctgcccgttgtggtgatctccaacgtcagccagctcccgagcggttgggcctccatcctttggtacaacatgctggtggcggaacccaggaatctgtccttcttcctgactccaccatgtgcacgatgggctcagctttcagaagtgctgagttggcagttttcttctgtcaccaaaagaggtctcaatgtggaccagctgaacatgttgggagagaagcttcttggtcctaacgccagccccgatggtctcattccgtggacgaggttttgtaaggaaaatataaatgataaaaattttcccttctggctttggattgaaagcatcctagaactcattaaaaaacacctgctccctctctggaatgatgggtgcatcatgggcttcatcagcaaggagcgagagcgtgccctgttgaaggaccagcagccggggaccttcctgctgcggttcagtgagagctcccgggaaggggccatcacattcacatgggtggagcggtcccagaacggaggcgaacctgacttccatgcggttgaaccctacacgaagaaagaactttctgctgttactttccctgacatcattcgcaattacaaagtcatggctgctgagaatattcctgagaatcccctgaagtatctgtatccaaatattgacaaagaccatgcctttggaaagtattactccaggccaaaggaagcaccagagccaatggaacttgatggccctaaaggaactggatatatcaagactgagttgatttctgtgtctgaagttcacccttctagacttcagaccacagacaacctgctccccatgtctcctgaggagtttgacgaggtgtctcggatagtgggctctgtagaattcgacagtatgatgaacacagtatagagcatgaatttttttcatcttctctggcgacagttt

SEQ ID NO: 3869 - DNA, 2029 bp, Homo sapiens
  source 1..2029: mol_type = genomic DNA
gaatgtcatgaagacccaatccagatgtctatgatcatttacagctgtctgaaggaagaaaggaaaattctggaaaacgcccagagatttaatcaggctcagtcggggaatattcagagcacagtgatgttagacaaacagaaagagcttgacagtaaagtcagaaatgtgaaggacaaggttatgtgtatagagcatgaaatcaagagcctggaagatttacaagatgaatatgacttcaaatgcaaaaccttgcagaacagagaacacgagaccaatggtgtggcaaagagtgatcagaaacaagaacagctgttactcaagaagatgtatttaatgcttgacaataagagaaaggaagtagttcacaaaataatagagttgctgaatgtcactgaacttacccagaatgccctgattaatgatgaactagtggagtggaagcggagacagcagagcgcctgtattggggggccgcccaatgcttgcttggatcagctgcagaactggttcactatagttgcggagagtctgcagcaagttcggcagcagcttaaaaagttggaggaattggaacagaaatacacctacgaacatgaccctatcacaaaaaacaaacaagtgttatgggaccgcaccttcagtcttttccagcagctcattcagagctcgtttgtggtggaaagacagccctgcatgccaacgcaccctcagaggccgctggtcttgaagacaggggtccagttcactgtgaagttgagactgttggtgaaattgcaagagctgaattataatttgaaagtcaaagtcttatttgataaagatgtgaatgagagaaatacagtaaaaggatttaggaagttcaacattttgggcacgcacacaaaagtgatgaacatggaggagtccaccaatggcagtctggcggctgaatttcggcacctgcaattgaaagaacagaaaaatgctggcaccagaacgaatgagggtcctctcatcgttactgaagagcttcactcccttagttttgaaacccaattgtgccagcctggtttggtaattgacctcgagacgacctctctgcccgttgtggtgatctccaacgtcagccagctcccgagcggttgggcctccatcctttggtacaacatgctggtggcggaacccaggaatctgtccttcttcctgactccaccatgtgcacgatgggctcagctttcagaagtgctgagttggcagttttcttctgtcaccaaaagaggtctcaatgtggaccagctgaacatgttgggagagaagcttcttggtcctaacgccagccccgatggtctcattccgtggacgaggttttgtaaggaaaatataaatgataaaaattttcccttctggctttggattgaaagcatcctagaactcattaaaaaacacctgctccctctctggaatgatgggtgcatcatgggcttcatcagcaaggagcgagagcgtgccctgttgaaggaccagcagccggggaccttcctgctgcggttcagtgagagctcccgggaaggggccatcacattcacatgggtggagcggtcccagaacggaggcgaacctgacttccatgcggttgaaccctacacgaagaaagaactttctgctgttactttccctgacatcattcgcaattacaaagtcatggctgctgagaatattcctgagaatcccctgaagtatctgtatccaaatattgacaaagaccatgcctttggaaagtattactccaggccaaaggaagcaccagagccaatggaacttgatggccctaaaggaactggatatatcaagactgagttgatttctgtgtctgaagtgtaagtgaacacagaagagtgacatgtttacaaacctcaagccagccttgctcctggctggggcctgttgaagatgcttgtattttacttttccattgtaattgctatcgccatcacagctgaacttgttgagatccccgtgttactgcctatcagcattttactacttt

SEQ ID NO: 3870 - DNA, 3259 bp, Homo sapiens
  source 1..3259: mol_type = genomic DNA
actgcaaccctaatcagagcccaaatggcgcagtgggaaatgctgcagaatcttgacagcccctttcaggatcagctgcaccagctttactcgcacagcctcctgcctgtggacattcgacagtacttggctgtctggattgaagaccagaactggcaggaagctgcacttgggagtgatgattccaaggctaccatgctattcttccacttcttggatcagctgaactatgagtgtggccgttgcagccaggacccagagtccttgttgctgcagcacaatttgcggaaattctgccgggacattcagcccttttcccaggatcctacccagttggctgagatgatctttaacctccttctggaagaaaaaagaattttgatccaggctcagagggcccaattggaacaaggagagccagttctcgaaacacctgtggagagccagcaacatgagattgaatcccggatcctggatttaagggctatgatggagaagctggtaaaatccatcagccaactgaaagaccagcaggatgtcttctgcttccgatataagatccaggccaaagggaagacaccctctctggacccccatcagaccaaagagcagaagattctgcaggaaactctcaatgaactggacaaaaggagaaaggaggtgctggatgcctccaaagcactgctaggccgattaactaccctaatcgagctactgctgccaaagttggaggagtggaaggcccagcagcaaaaagcctgcatcagagctcccattgaccacgggttggaacagctggagacatggttcacagctggagcaaagctgttgtttcacctgaggcagctgctgaaggagctgaagggactgagttgcctggttagctatcaggatgaccctctgaccaaaggggtggacctacgcaacgcccaggtcacagagttgctacagcgtctgctccacagagcctttgtggtagaaacccagccctgcatgccccaaactccccatcgacccctcatcctcaagactggcagcaagttcaccgtccgaacaaggctgctggtgagactccaggaaggcaatgagtcactgactgtggaagtctccattgacaggaatcctcctcaattacaaggcttccggaagttcaacattctgacttcaaaccagaaaactttgacccccgagaaggggcagagtcagggtttgatttgggactttggttacctgactctggtggagcaacgttcaggtggttcaggaaagggcagcaataaggggccactaggtgtgacagaggaactgcacatcatcagcttcacggtcaaatatacctaccagggtctgaagcaggagctgaaaacggacaccctccctgtggtgattatttccaacatgaaccagctctcaattgcctgggcttcagttctctggttcaatttgctcagcccaaaccttcagaaccagcagttcttctccaacccccccaaggccccctggagcttgctgggccctgctctcagttggcagttctcctcctatgttggccgaggcctcaactcagaccagctgagcatgctgagaaacaagctgttcgggcagaactgtaggactgaggatccattattgtcctgggctgacttcactaagcgagagagccctcctggcaagttaccattctggacatggctggacaaaattctggagttggtacatgaccacctgaaggatctctggaatgatggacgcatcatgggctttgtgagtcggagccaggagcgccggctgctgaagaagaccatgtctggcacctttctactgcgcttcagtgaatcgtcagaagggggcattacctgctcctgggtggagcaccaggatgatgacaaggtgctcatctactctgtgcaaccgtacacgaaggaggtgctgcagtcactcccgctgactgaaatcatccgccattaccagttgctcactgaggagaatatacctgaaaacccactgcgcttcctctatccccgaatcccccgggatgaagcttttgggtgctactaccaggagaaagttaatctccaggaacggaggaaatacctgaaacacaggctcattgtggtctctaatagacaggtggatgaactgcaacaaccgctggagcttaagccagagccagagctggagtcattagagctggaactagggctggtgccagagccagagctcagcctggacttagagccactgctgaaggcagggctggatctggggccagagctagagtctgtgctggagtccactctggagcctgtgatagagcccacactatgcatggtatcacaaacagtgccagagccagaccaaggacctgtatcacagccagtgccagagccagatttgccctgtgatctgagacatttgaacactgagccaatggaaatcttcagaaactgtgtaaagattgaagaaatcatgccgaatggtgacccactgttggctggccagaacaccgtggatgaggtttacgtctcccgccccagccacttctacactgatggacccttgatgccttctgacttctaggaaccacatttcctctgttcttttcatatctcttgcccttcctactcctcatagcatgatattgttctccaaggatgggaatcaggcatgtgtcccttccaagctgtgttaactgttcaaactcaggcctgtgtgactccattggggtgagaggtgaaagcataacatgggtacagaggggacaacaatgaatcagaacagatgctgagccataggtctaaataggatcctggaggctgcctgctgtgctgggaggtataggggtcctgggggcaggccagggcagttgacaggtacttggagggctcagggcagtggcttctttccagtatggaaggatttcaacattttaatagttggttaggctaaactggtgcatactggcattggcccttggtggggagcacagacacaggataggactccatttctttcttccattccttcatgtctaggataacttgctttcttctttcctttactcctggctcaagccctgaatttcttcttttcctgcaggggttgagagctttctgccttagcctaccatgtgaaactctaccctgaagaaagggatggataggaagtagacctctttttcttaccagtctcctcccctactctgcccctaagctggctgtacctgttcctcccccataaaatgatcctgccaatctaa

SEQ ID NO: 3871 - DNA, 1548 bp, Homo sapiens
  source 1..1548: mol_type = genomic DNA
agctcatactagggacgggaagtcgcgaccagagccattggagggcgcggggactgcaaccctaatcagagcccaaatggcgcagtgggaaatgctgcagaatcttgacagcccctttcaggatcagctgcaccagctttactcgcacagcctcctgcctgtggacattcgacagtacttggctgtctggattgaagaccagaactggcaggaagctgcacttgggagtgatgattccaaggctaccatgctattcttccacttcttggatcagctgaactatgagtgtggccgttgcagccaggacccagagtccttgttgctgcagcacaatttgcggaaattctgccgggacattcaggatcctacccagttggctgagatgatctttaacctccttctggaagaaaaaagaattttgatccaggctcagagggcccaattggaacaaggagagccagttctcgaaacacctgtggagagccagcaacatgagattgaatcccggatcctggatttaagggctatgatggagaagctggtaaaatccatcagccaactgaaagaccagcaggatgtcttctgcttccgatataagatccaggccaaagggaagacaccctctctggacccccatcagaccaaagagcagaagattctgcaggaaactctcaatgaactggacaaaaggagaaaggaggtgctggatgcctccaaagcactgctaggccgattaactaccctaatcgagctactgctgccaaagttggaggagtggaaggcccagcagcaaaaagcctgcatcagagctcccattgaccacgggttggaacagctggagacatggttcacagctggagcaaagctgttgtttcacctgaggcagctgctgaaggagctgaagggactgagttgcctggttagctatcaggatgaccctctgaccaaaggggtggacctacgcaacgcccaggtcacagagttgctacagcgtctgctccacagagcctttgtggtagaaacccagccctgcatgccccaaactccccatcgacccctcatcctcaagactggcagcaagttcaccgtccgaacaaggctgctggtgagactccaggaaggcaatgagtcactgactgtggaagtctccattgacaggaatcctcctcaattacaaggcttccggaagttcaacattctgacttcaaaccagaaaactttgacccccgagaaggggcagagtcagggtttgatttgggactttggttacctgactctggtggagcaacgttcaggtggttcaggaaagggcagcaataaggggccactaggtgtgacagaggaactgcacatcatcagcttcacggtcaaatatacctaccagggtctgaagcaggagctgaaagtgagtgaaaatggagggcaaggagagagaaagcagctttggaagaaggcataagaaggggataaacagaagcctcttgggaaccagcagttcttctccaacccccccaaggccccctggagcttgctgggccctgctctcag

SEQ ID NO: 3872 - DNA, 3073 bp, Homo sapiens
  source 1..3073: mol_type = genomic DNA
agctcatactagggacgggaagtcgcgaccagagccattggagggcgcggggactgcaaccctaatcagagcccaaatggcgcagtgggaaatgctgcagaatcttgacagcccctttcaggatcagctgcaccagctttactcgcacagcctcctgcctgtggacattcgacagtacttggctgtctggattgaagaccagaactggcaggaagctgcacttgggagtgatgattccaaggctaccatgctattcttccacttcttggatcagctgaactatgagtgtggccgttgcagccaggacccagagtccttgttgctgcagcacaatttgcggaaattctgccgggacattcaggatcctacccagttggctgagatgatctttaacctccttctggaagaaaaaagaattttgatccaggctcagagggcccaattggaacaaggagagccagttctcgaaacacctgtggagagccagcaacatgagattgaatcccggatcctggatttaagggctatgatggagaagctggtaaaatccatcagccaactgaaagaccagcaggatgtcttctgcttccgatataagatccaggccaaagggaagacaccctctctggacccccatcagaccaaagagcagaagattctgcaggaaactctcaatgaactggacaaaaggagaaaggaggtgctggatgcctccaaagcactgctaggccgattaactaccctaatcgagctactgctgccaaagttggaggagtggaaggcccagcagcaaaaagcctgcatcagagctcccattgaccacgggttggaacagctggagacatggttcacagctggagcaaagctgttgtttcacctgaggcagctgctgaaggagctgaagggactgagttgcctggttagctatcaggatgaccctctgaccaaaggggtggacctacgcaacgcccaggtcacagagttgctacagcgtctgctccacagagcctttgtggtagaaacccagccctgcatgccccaaactccccatcgacccctcatcctcaagactggcagcaagttcaccgtccgaacaaggctgctggtgagactccaggaaggcaatgagtcactgactgtggaagtctccattgacaggaatcctcctcaattacaaggcttccggaagttcaacattctgacttcaaaccagaaaactttgacccccgagaaggggcagagtcagggtttgatttgggactttggttacctgactctggtggagcaacgttcaggtggttcaggaaagggcagcaataaggggccactaggtgtgacagaggaactgcacatcatcagcttcacggtcaaatatacctaccagggtctgaagcaggagctgaaaacggacaccctccctgtggtgattatttccaacatgaaccagctctcaattgcctgggcttcagttctctggttcaatttgctcagcccaaaccttcagaaccagcagttcttctccaacccccccaaggccccctggagcttgctgggccctgctctcagttggcagttctcctcctatgttggccgaggcctcaactcagaccagctgagcatgctgagaaacaagctgttcgggcagaactgtaggactgaggatccattattgtcctgggctgacttcactaagcgagagagccctcctggcaagttaccattctggacatggctggacaaaattctggagttggtacatgaccacctgaaggatctctggaatgatggacgcatcatgggctttgtgagtcggagccaggagcgccggctgctgaagaagaccatgtctggcacctttctactgcgcttcagtgaatcgtcagaagggggcattacctgctcctgggtggagcaccaggatgatgacaaggtgctcatctactctgtgcaaccgtacacgaaggaggtgctgcagtcactcccgctgactgaaatcatccgccattaccagttgctcactgaggagaatatacctgaaaacccactgcgcttcctctatccccgaatcccccgggatgaagcttttgggtgctactaccaggagaaagttaatctccaggaacggaggaaatacctgaaacacaggctcattgtggtctctaatagacaggtggatgaactgcaacaaccgctggagcttaagccagagccagagctggagtcattagagctggaactagggctggtgccagagccagagctcagcctggacttagagccactgctgaaggcagggctggatctggggccagagctagagtctgtgctggagtccactctggagcctgtgatagagcccacactatgcatggtatcacaaacagtgccagagccagaccaaggacctgtatcacagccagtgccagagccagatttgccctgtgatctgagacatttgaacactgagccaatggaaatcttcagaaactgtgtaaagattgaagaaatcatgccgaatggtgacccactgttggctggccagaacaccgtggatgaggtttacgtctcccgccccagccacttctacactgatggacccttgatgccttctgacttctaggaaccacatttcctctgttcttttcatatctcttgcccttcctactcctcatagcatgatattgttctccaaggatgggaatcaggcatgtgtcccttccaagctgtgttaactgttcaaactcaggcctgtgtgactccattggggtgagaggtgaaagcataacatgggtacagaggggacaacaatgaatcagaacagatgctgagccataggtctaaataggatcctggaggctgcctgctgtgctgggaggtataggggtcctgggggcaggccagggcagttgacaggtacttggagggctcagggcagtggcttctttccagtatggaaggatttcaacattttaatagttggttaggctaaactggtgcatactggcattggcccttggtggggagcacagacacaggataggactccatttctttcttccattccttcatgtct

SEQ ID NO: 3873 - DNA, 4866 bp, Homo sapiens
  source 1..4866: mol_type = genomic DNA
cgctgtctctccccctcggctcggagaggcccttcggcctgagggagcctcgccgcccgtccccggcacacgcgcagccccggcctctcggcctctgccggagaaacagttgggacccctgattttagcaggatggcccaatggaatcagctacagcagcttgacacacggtacctggagcagctccatcagctctacagtgacagcttcccaatggagctgcggcagtttctggccccttggattgagagtcaagattgggcatatgcggccagcaaagaatcacatgccactttggtgtttcataatctcctgggagagattgaccagcagtatagccgcttcctgcaagagtcgaatgttctctatcagcacaatctacgaagaatcaagcagtttcttcagagcaggtatcttgagaagccaatggagattgcccggattgtggcccggtgcctgtgggaagaatcacgccttctacagactgcagccactgcggcccagcaagggggccaggccaaccaccccacagcagccgtggtgacggagaagcagcagatgctggagcagcaccttcaggatgtccggaagagagtgcaggatctagaacagaaaatgaaagtggtagagaatctccaggatgactttgatttcaactataaaaccctcaagagtcaaggagacatgcaagatctgaatggaaacaaccagtcagtgaccaggcagaagatgcagcagctggaacagatgctcactgcgctggaccagatgcggagaagcatcgtgagtgagctggcggggcttttgtcagcgatggagtacgtgcagaaaactctcacggacgaggagctggctgactggaagaggcggcaacagattgcctgcattggaggcccgcccaacatctgcctagatcggctagaaaactggataacgtcattagcagaatctcaacttcagacccgtcaacaaattaagaaactggaggagttgcagcaaaaagtttcctacaaaggggaccccattgtacagcaccggccgatgctggaggagagaatcgtggagctgtttagaaacttaatgaaaagtgcctttgtggtggagcggcagccctgcatgcccatgcatcctgaccggcccctcgtcatcaagaccggcgtccagttcactactaaagtcaggttgctggtcaaattccctgagttgaattatcagcttaaaattaaagtgtgcattgacaaagactctggggacgttgcagctctcagaggatcccggaaatttaacattctgggcacaaacacaaaagtgatgaacatggaagaatccaacaacggcagcctctctgcagaattcaaacacttgaccctgagggagcagagatgtgggaatgggggccgagccaattgtgatgcttccctgattgtgactgaggagctgcacctgatcacctttgagaccgaggtgtatcaccaaggcctcaagattgacctagagacccactccttgccagttgtggtgatctccaacatctgtcagatgccaaatgcctgggcgtccatcctgtggtacaacatgctgaccaacaatcccaagaatgtaaacttttttaccaagcccccaattggaacctgggatcaagtggccgaggtcctgagctggcagttctcctccaccaccaagcgaggactgagcatcgagcagctgactacactggcagagaaactcttgggacctggtgtgaattattcagggtgtcagatcacatgggctaaattttgcaaagaaaacatggctggcaagggcttctccttctgggtctggctggacaatatcattgaccttgtgaaaaagtacatcctggccctttggaacgaagggtacatcatgggctttatcagtaaggagcgggagcgggccatcttgagcactaagcctccaggcaccttcctgctaagattcagtgaaagcagcaaagaaggaggcgtcactttcacttgggtggagaaggacatcagcggtaagacccagatccagtccgtggaaccatacacaaagcagcagctgaacaacatgtcatttgctgaaatcatcatgggctataagatcatggatgctaccaatatcctggtgtctccactggtctatctctatcctgacattcccaaggaggaggcattcggaaagtattgtcggccagagagccaggagcatcctgaagctgacccaggtagcgctgccccatacctgaagaccaagtttatctgtgtgacaccaacgacctgcagcaataccattgacctgccgatgtccccccgcactttagattcattgatgcagtttggaaataatggtgaaggtgctgaaccctcagcaggagggcagtttgagtccctcacctttgacatggagttgacctcggagtgcgctacctcccccatgtgaggagctgagaacggaagctgcagaaagatacgactgaggcgcctacctgcattctgccacccctcacacagccaaaccccagatcatctgaaactactaactttgtggttccagattttttttaatctcctacttctgctatctttgagcaatctgggcacttttaaaaatagagaaatgagtgaatgtgggtgatctgcttttatctaaatgcaaataaggatgtgttctctgagacccatgatcaggggatgtggcggggggtggctagagggagaaaaaggaaatgtcttgtgttgttttgttcccctgccctcctttctcagcagctttttgttattgttgttgttgttcttagacaagtgcctcctggtgcctgcggcatccttctgcctgtttctgtaagcaaatgccacaggccacctatagctacatactcctggcattgcactttttaaccttgctgacatccaaatagaagataggactatctaagccctaggtttctttttaaattaagaaataataacaattaaagggcaaaaaacactgtatcagcatagcctttctgtatttaagaaacttaagcagccgggcatggtggctcacgcctgtaatcccagcactttgggaggccgaggcggatcataaggtcaggagatcaagaccatcctggctaacacggtgaaaccccgtctctactaaaagtacaaaaaattagctgggtgtggtggtgggcgcctgtagtcccagctactcgggaggctgaggcaggagaatcgcttgaacctgagaggcggaggttgcagtgagccaaaattgcaccactgcacactgcactccatcctgggcgacagtctgagactctgtctcaaaaaaaaaaaaaaaaaaaagaaacttcagttaacagcctccttggtgctttaagcattcagcttccttcaggctggtaatttatataatccctgaaacgggcttcaggtcaaacccttaagacatctgaagctgcaacctggcctttggtgttgaaataggaaggtttaaggagaatctaagcattttagacttttttttataaatagacttattttcctttgtaatgtattggccttttagtgagtaaggctgggcagagggtgcttacaaccttgactccctttctccctggacttgatctgctgtttcagaggctaggttgtttctgtgggtgccttatcagggctgggatacttctgattctggcttccttcctgccccaccctcccgaccccagtccccctgatcctgctagaggcatgtctccttgcgtgtctaaaggtccctcatcctgtttgttttaggaatcctggtctcaggacctcatggaagaagagggggagagagttacaggttggacatgatgcacactatggggccccagcgacgtgtctggttgagctcagggaatatggttcttagccagtttcttggtgatatccagtggcacttgtaatggcgtcttcattcagttcatgcagggcaaaggcttactgataaacttgagtctgccctcgtatgagggtgtatacctggcctccctctgaggctggtgactcctccctgctggggccccacaggtgaggcagaacagctagagggcctccccgcctgcccgccttggctggctagctcgcctctcctgtgcgtatgggaacacctagcacgtgctggatgggctgcctctgactcagaggcatggccggatttggcaactcaaaaccaccttgcctcagctgatcagagtttctgtggaattctgtttgttaaatcaaattagctggtctctgaattaagggggagacgaccttctctaagatgaacagggttcgccccagtcctcctgcctggagacagttgatgtgtcatgcagagctcttacttctccagcaacactcttcagtacataataagcttaactgataaacagaatatttagaaaggtgagacttgggcttaccattgggtttaaatcatagggacctagggcgagggttcagggcttctctggagcagatattgtcaagttcatggccttaggtagcatgtatctggtcttaactctgattgtagcaaaagttctgagaggagctgagccctgttgtggcccattaaagaacagggtcctcaggccctgcccgcttcctgtccactgccccctccccatccccagcccagccgagggaatcccgtgggttgcttacctacctataaggtggtttataagctgctgtcctggccactgcattcaaattccaatgtgtacttcatagtgtaaaaatttatattattgtgaggttttttgtcttttttttttttttttttttttggtatattgctgtatctactttaacttccagaaataaacgttatataggaaccgtc

SEQ ID NO: 3874 - DNA, 2615 bp, Homo sapiens
  source 1..2615: mol_type = genomic DNA
gggaacaagccccaaccggatcctggacaggcaccccggcttggcgctgtctctccccctcggctcggagaggcccttcggcctgagggagcctcgccgcccgtccccggcacacgcgcagccccggcctctcggcctctgccggagaaacagggcatatgcggccagcaaagaatcacatgccactttggtgtttcataatctcctgggagagattgaccagcagtatagccgcttcctgcaagagtcgaatgttctctatcagcacaatctacgaagaatcaagcagtttcttcagagcaggtatcttgagaagccaatggagattgcccggattgtggcccggtgcctgtgggaagaatcacgccttctacagactgcagccactgcggcccagcaagggggccaggccaaccaccccacagcagccgtggtgacggagaagcagcagatgctggagcagcaccttcaggatgtccggaagagagtgcaggatctagaacagaaaatgaaagtggtagagaatctccaggatgactttgatttcaactataaaaccctcaagagtcaaggagacatgcaagatctgaatggaaacaaccagtcagtgaccaggcagaagatgcagcagctggaacagatgctcactgcgctggaccagatgcggagaagcatcgtgagtgagctggcggggcttttgtcagcgatggagtacgtgcagaaaactctcacggacgaggagctggctgactggaagaggcggcaacagattgcctgcattggaggcccgcccaacatctgcctagatcggctagaaaactggataacgtcattagcagaatctcaacttcagacccgtcaacaaattaagaaactggaggagttgcagcaaaaagtttcctacaaaggggaccccattgtacagcaccggccgatgctggaggagagaatcgtggagctgtttagaaacttaatgaaaagtgcctttgtggtggagcggcagccctgcatgcccatgcatcctgaccggcccctcgtcatcaagaccggcgtccagttcactactaaagtcaggttgctggtcaaattccctgagttgaattatcagcttaaaattaaagtgtgcattgacaaagactctggggacgttgcagctctcagaggatcccggaaatttaacattctgggcacaaacacaaaagtgatgaacatggaagaatccaacaacggcagcctctctgcagaattcaaacacttgaccctgagggagcagagatgtgggaatgggggccgagccaattgtgatgcttccctgattgtgactgaggagctgcacctgatcacctttgagaccgaggtgtatcaccaaggcctcaagattgacctagagacccactccttgccagttgtggtgatctccaacatctgtcagatgccaaatgcctgggcgtccatcctgtggtacaacatgctgaccaacaatcccaagaatgtaaacttttttaccaagcccccaattggaacctgggatcaagtggccgaggtcctgagctggcagttctcctccaccaccaagcgaggactgagcatcgagcagctgactacactggcagagaaactcttgggacctggtgtgaattattcagggtgtcagatcacatgggctaaattttgcaaagaaaacatggctggcaagggcttctccttctgggtctggctggacaatatcattgaccttgtgaaaaagtacatcctggccctttggaacgaagggtacatcatgggctttatcagtaaggagcgggagcgggccatcttgagcactaagcctccaggcaccttcctgctaagattcagtgaaagcagcaaagaaggaggcgtcactttcacttgggtggagaaggacatcagcggtaagacccagatccagtccgtggaaccatacacaaagcagcagctgaacaacatgtcatttgctgaaatcatcatgggctataagatcatggatgctaccaatatcctggtgtctccactggtctatctctatcctgacattcccaaggaggaggcattcggaaagtattgtcggccagagagccaggagcatcctgaagctgacccaggtagcgctgccccatacctgaagaccaagtttatctgtgtgacaccaacgacctgcagcaataccattgacctgccgatgtccccccgcactttagattcattgatgcagtttggaaataatggtgaaggtgctgaaccctcagcaggagggcagtttgagtccctcacctttgacatggagttgacctcggagtgcgctacctcccccatgtgaggagctgagaacggaagctgcagaaagatacgactgaggcgcctacctgcattctgccacccctcacacagccaaaccccagatcatctgaaactactaactttgtggttccagattttttttaatctcctacttctgctatctttgagcaatctgggcacttttaaaaatagagaaatgagtgaatgtgggtgatctgcttttatctaaatgcaaataaggatgtgttctctgagacccatgatcaggggatgtggcggggggtggctagagggag

SEQ ID NO: 3875 - DNA, 2633 bp, Homo sapiens
  source 1..2633: mol_type = genomic DNA
ggatcctggacaggcaccccggcttggcgctgtctctccccctcggctcggagaggcccttcggcctgagggagcctcgccgcccgtccccggcacacgcgcagccccggcctctcggcctctgccggagaaacaggatggcccaatggaatcagctacagcagcttgacacacggtacctggagcagctccatcagctctacagtgacagcttcccaatggagctgcggcagtttctggccccttggattgagagtcaagattgggcatatgcggccagcaaagaatcacatgccactttggtgtttcataatctcctgggagagattgaccagcagtatagccgcttcctgcaagagtcgaatgttctctatcagcacaatctacgaagaatcaagcagtttcttcagagcaggtatcttgagaagccaatggagattgcccggattgtggcccggtgcctgtgggaagaatcacgccttctacagactgcagccactgcggcccagcaagggggccaggccaaccaccccacagcagccgtggtgacggagaagcagcagatgctggagcagcaccttcaggatgtccggaagagagtgcaggatctagaacagaaaatgaaagtggtagagaatctccaggatgactttgatttcaactataaaaccctcaagagtcaaggagacatgcaagatctgaatggaaacaaccagtcagtgaccaggcagaagatgcagcagctggaacagatgctcactgcgctggaccagatgcggagaagcatcgtgagtgagctggcggggcttttgtcagcgatggagtacgtgcagaaaactctcacggacgaggagctggctgactggaagaggcggcaacagattgcctgcattggaggcccgcccaacatctgcctagatcggctagaaaactggataacgtcattagcagaatctcaacttcagacccgtcaacaaattaagaaactggaggagttgcagcaaaaagtttcctacaaaggggaccccattgtacagcaccggccgatgctggaggagagaatcgtggagctgtttagaaacttaatgaaaagtgcctttgtggtggagcggcagccctgcatgcccatgcatcctgaccggcccctcgtcatcaagaccggcgtccagttcactactaaagtcaggttgctggtcaaattccctgagttgaattatcagcttaaaattaaagtgtgcattgacaaagactctggggacgttgcagctctcagaggatcccggaaatttaacattctgggcacaaacacaaaagtgatgaacatggaagaatccaacaacggcagcctctctgcagaattcaaacacttgaccctgagggagcagagatgtgggaatgggggccgagccaattgtgatgcttccctgattgtgactgaggagctgcacctgatcacctttgagaccgaggtgtatcaccaaggcctcaagattgacctagagacccactccttgccagttgtggtgatctccaacatctgtcagatgccaaatgcctgggcgtccatcctgtggtacaacatgctgaccaacaatcccaagaatgtaaacttttttaccaagcccccaattggaacctgggatcaagtggccgaggtcctgagctggcagttctcctccaccaccaagcgaggactgagcatcgagcagctgactacactggcagagaaactcttgggacctggtgtgaattattcagggtgtcagatcacatgggctaaattttgcaaagaaaacatggctggcaagggcttctccttctgggtctggctggacaatatcattgaccttgtgaaaaagtacatcctggccctttggaacgaagggtacatcatgggctttatcagtaaggagcgggagcgggccatcttgagcactaagcctccaggcaccttcctgctaagattcagtgaaagcagcaaagaaggaggcgtcactttcacttgggtggagaaggacatcagcggtaagacccagatccagtccgtggaaccatacacaaagcagcagctgaacaacatgtcatttgctgaaatcatcatgggctataagatcatggatgctaccaatatcctggtgtctccactggtctatctctatcctgacattcccaaggaggaggcattcggaaagtattgtcggccagagagccaggagcatcctgaagctgacccaggcgctgccccatacctgaagaccaagtttatctgtgtgacaccaacgacctgcagcaataccattgacctgccgatgtccccccgcactttagattcattgatgcagtttggaaataatggtgaaggtgctgaaccctcagcaggagggcagtttgagtccctcacctttgacatggagttgacctcggagtgcgctacctcccccatgtgaggagctgagaacggaagctgcagaaagatacgactgaggcgcctacctgcattctgccacccctcacacagccaaaccccagatcatctgaaactactaactttgtggttccagattttttttaatctcctacttctgctatctttgagcaatctgggcacttttaaaaatagagaaatgagtgaa

SEQ ID NO: 3876 - DNA, 3319 bp, Homo sapiens
  source 1..3319: mol_type = genomic DNA
gcagccgagggaacaagccccaaccggatcctggacaggcaccccggcttggcgctgtctctccccctcggctcggagaggcccttcggcctgagggagcctcgccgcccgtccccggcacacgcgcagccccggcctctcggcctctgccggagaaacagcaggatggcccaatggaatcagctacagcagcttgacacacggtacctggagcagctccatcagctctacagtgacagcttcccaatggagctgcggcagtttctggccccttggattgagagtcaagattgggcatatgcggccagcaaagaatcacatgccactttggtgtttcataatctcctgggagagattgaccagcagtatagccgcttcctgcaagagtcgaatgttctctatcagcacaatctacgaagaatcaagcagtttcttcagagcaggtatcttgagaagccaatggagattgcccggattgtggcccggtgcctgtgggaagaatcacgccttctacagactgcagccactgcggcccagcaagggggccaggccaaccaccccacagcagccgtggtgacggagaagcagcagatgctggagcagcaccttcaggatgtccggaagagagtgcaggatctagaacagaaaatgaaagtggtagagaatctccaggatgactttgatttcaactataaaaccctcaagagtcaaggagacatgcaagatctgaatggaaacaaccagtcagtgaccaggcagaagatgcagcagctggaacagatgctcactgcgctggaccagatgcggagaagcatcgtgagtgagctggcggggcttttgtcagcgatggagtacgtgcagaaaactctcacggacgaggagctggctgactggaagaggcggcaacagattgcctgcattggaggcccgcccaacatctgcctagatcggctagaaaactggataacgtcattagcagaatctcaacttcagacccgtcaacaaattaagaaactggaggagttgcagcaaaaagtttcctacaaaggggaccccattgtacagcaccggccgatgctggaggagagaatcgtggagctgtttagaaacttaatgaaaagtgcctttgtggtggagcggcagccctgcatgcccatgcatcctgaccggcccctcgtcatcaagaccggcgtccagttcactactaaagtcaggttgctggtcaaattccctgagttgaattatcagcttaaaattaaagtgtgcattgacaaagactctggggacgttgcagctctcagaggatcccggaaatttaacattctgggcacaaacacaaaagtgatgaacatggaagaatccaacaacggcagcctctctgcagaattcaaacacttgaccctgagggagcagagatgtgggaatgggggccgagccaattgtgatgcttccctgattgtgactgaggagctgcacctgatcacctttgagaccgaggtgtatcaccaaggcctcaagattgacctagagacccactccttgccagttgtggtgatctccaacatctgtcagatgccaaatgcctgggcgtccatcctgtggtacaacatgctgaccaacaatcccaagaatgtaaacttttttaccaagcccccaattggaacctgggatcaagtggccgaggtcctgagctggcagttctcctccaccaccaagcgaggactgagcatcgagcagctgactacactggcagagaaactcttgggacctggtgtgaattattcagggtgtcagatcacatgggctaaattttgcaaagaaaacatggctggcaagggcttctccttctgggtctggctggacaatatcattgaccttgtgaaaaagtacatcctggccctttggaacgaagggtacatcatgggctttatcagtaaggagcgggagcgggccatcttgagcactaagcctccaggcaccttcctgctaagattcagtgaaagcagcaaagaaggaggcgtcactttcacttgggtggagaaggacatcagcggtaagacccagatccagtccgtggaaccatacacaaagcagcagctgaacaacatgtcatttgctgaaatcatcatgggctataagatcatggatgctaccaatatcctggtgtctccactggtctatctctatcctgacattcccaaggaggaggcattcggaaagtattgtcggccagagagccaggagcatcctgaagctgacccaggtagcgctgccccatacctgaagaccaagtttatctgtgtgacaccattcattgatgcagtttggaaataatggtgaaggtgctgaaccctcagcaggagggcagtttgagtccctcacctttgacatggagttgacctcggagtgcgctacctcccccatgtgaggagctgagaacggaagctgcagaaagatacgactgaggcgcctacctgcattctgccacccctcacacagccaaaccccagatcatctgaaactactaactttgtggttccagattttttttaatctcctacttctgctatctttgagcaatctgggcacttttaaaaatagagaaatgagtgaatgtgggtgatctgcttttatctaaatgcaaataaggatgtgttctctgagacccatgatcaggggatgtggcggggggtggctagagggagaaaaaggaaatgtcttgtgttgttttgttcccctgccctcctttctcagcagctttttgttattgttgttgttgttcttagacaagtgcctcctggtgcctgcggcatccttctgcctgtttctgtaagcaaatgccacaggccacctatagctacatactcctggcattgcactttttaaccttgctgacatccaaatagaagataggactatctaagccctaggtttctttttaaattaagaaataataacaattaaagggcaaaaaacactgtatcagcatagcctttctgtatttaagaaacttaagcagccgggcatggtggctcacgcctgtaatcccagcactttgggaggccgaggcggatcataaggtcaggagatcaagaccatcctggctaacacggtgaaaccccgtctctactaaaagtacaaaaaattagctgggtgtggtggtgggcgcctgtagtcccagctactcgggaggctgaggcaggagaatcgcttgaacctgagaggcggaggttgcagtgagccaaaattgcaccactgcacactgcactccatcctgggcgacagtctgagactctgtctcaaaaaaaaaaaaaaaaaa

SEQ ID NO: 3877 - DNA, 2769 bp, Homo sapiens
  source 1..2769: mol_type = genomic DNA
aaggctactcaaggagagtaggaggaggctaggtcaggaagggcaagcactggtggcctacccaggacttggcccaaccctctgggtcaggtcaccctcgtcggagtgagcggaccccgctggaattggagcccagtaaggtctatgagtttggtgttttgatcctggctacccatcccttccatcccaggggtggttcaccaggctgagtggagccttatactagggagagaggaagctgaagaactgggctccagcatgtctcagtggaatcaagtccaacagttagaaatcaagtttttggagcaggtggatcaattctatgatgacaactttcccatggaaattcggcatctgttggcccaatggattgaaaatcaagactgggaggcagcttctaacaatgaaaccatggcaacgattcttcttcaaaacttgttaatacaactggatgaacagttaggtcgtgtttccaaagagaaaaacctactcttgatacacaatctaaaaagaattaggaaggtccttcagggaaaatttcatggaaatccaatgcatgtagctgtggttatttcaaactgtttaagggaagagaggagaatattggctgcagccaacatgcctgtccaggggcctctagagaaatccttacaaagttcttcagtttcagaaagacagaggaatgtggagcacaaagtggctgccattaaaaacagtgtgcagatgacagaacaagataccaaatacttagaagatctgcaagacgaatttgactacaggtataaaacaattcagacaatggatcagagtgacaagaatagtgccatggtgaatcaggaagttttgacactgcaggaaatgcttaacagcctcgatttcaagagaaaggaggctctcagtaaaatgacccaaatcatccatgagacagacctgttaatgaacaccatgctcatagaagagctgcaagactggaagcggcggcagcaaatcgcctgcatcgggggtccactccacaatgggctcgaccagcttcagaactgctttacactattggcagaaagtcttttccaactgagaaggcaattggagaaactagaggagcaatctaccaaaatgacatatgaaggtgatcccattccaatgcaaagaactcacatgctagaaagagtcaccttcttgatctacaaccttttcaagaactcatttgtggttgagcgacagccatgtatgccaacccaccctcagaggccgttggtacttaaaaccctaattcagttcactgtaaaactaaggctactaataaaattgccagaactaaactatcaggtaaaggttaaggcatcaattgacaagaatgtttcaactctaagcaaccgaagatttgtactttgtggaactaatgtcaaagccatgtctattgaagaatcttccaatgggagtctctcagtagaatttcgacatttgcaaccaaaggaaatgaagtccagtgctggaggtaaaggaaatgagggctgtcacatggtgactgaagaacttcattccataacgtttgaaacacagatctgcctctatggcctgaccatagatttggagaccagctcattgcctgtggtgatgatttccaatgtcagtcagttacctaatgcttgggcatccatcatttggtacaacgtgtcaaccaacgattcccagaacttggttttctttaataatcctccacctgccacattgagtcaactactggaggtgatgagctggcagttttcatcgtacgttggtcgtggtcttaactcagatcaactccatatgctggcagagaagcttacagtccaatctagctacagtgatggtcacctcacctgggccaagttctgcaaggaacatttacctggtaaatcatttaccttttggacatggcttgaagcaatattggatctaattaagaaacacattcttcccctttggattgatgggtatgtcatgggctttgttagcaaagagaaggaacggctgttgctaaaggataaaatgcctggcacctttttattaagattcagtgaaagccatctcggaggaataactttcacctgggtggaccattctgaaagtggggaagtgagattccactctgtagaaccctacaataaaggccggttgtctgctctgccattcgctgacatcctgcgagactacaaagttattatggctgaaaacattcctgaaaaccctctgaagtacctatatcctgacattcccaaagacaaagccttcggtaaacactacagctctcagccttgcgaagtttcaagaccaacagaaaggggtgacaaaggttatgttccttctgtttttatccccatctcaacaatccgaagtgattcaacagagccacattctccatcagaccttcttcccatgtctccaagtgtgtatgcggtgttgagagaaaacctgagtcccacaacaattgaaactgcaatgaagtctccttattctgctgaatgacaggataaactctgacgcaccaagaaaggaagcaaatgaaaaagtttaaagactgttctttgcccaataaccacattttatttcttcagctttgtaaataccaggttctaggaaatgtttgacatctgaagctctcttcacactcccgtggcactcctcaattgggagtgttgtgactgaaatgcttgaaaccaaagcttcagataaacttgcaagataagacaactttaagaaaccagtgttaataacaatattaacagaaga

SEQ ID NO: 3878 - DNA, 2822 bp, Homo sapiens
  source 1..2822: mol_type = genomic DNA
tttttcctggcactgctgagccacctgcagttgcgagagccgctgggagggataagagggaagaggacgcccggtgaaggggctccagcctggcagtttctgcgtgttagcatttctagaatagagtgggtgggaactgacccaagtaaagtcccagagactcgaacactgacgcacaggaaagcctcaagtgggaggagaaatgcaaatcccctactgatgatggcgtcagcggctttctcctagggactgtgaggggcgcttctgactttggacttgagcactgcctgggacctgtgctgagagagcgctagcatgtctcagtggaatcaagtccaacagttagaaatcaagtttttggagcaggtggatcaattctatgatgacaactttcccatggaaattcggcatctgttggcccaatggattgaaaatcaagactgggaggcagcttctaacaatgaaaccatggcaacgattcttcttcaaaacttgttaatacaactggatgaacagttaggtcgtgtttccaaagagaaaaacctactcttgatacacaatctaaaaagaattaggaaggtccttcagggaaaatttcatggaaatccaatgcatgtagctgtggttatttcaaactgtttaagggaagagaggagaatattggctgcagccaacatgcctgtccaggggcctctagagaaatccttacaaagttcttcagtttcagaaagacagaggaatgtggagcacaaagtggctgccattaaaaacagtgtgcagatgacagaacaagataccaaatacttagaagatctgcaagacgaatttgactacaggtataaaacaattcagacaatggatcagagtgacaagaatagtgccatggtgaatcaggaagttttgacactgcaggaaatgcttaacagcctcgatttcaagagaaaggaggctctcagtaaaatgacccaaatcatccatgagacagacctgttaatgaacaccatgctcatagaagagctgcaagactggaagcggcggcagcaaatcgcctgcatcgggggtccactccacaatgggctcgaccagcttcagaactgctttacactattggcagaaagtcttttccaactgagaaggcaattggagaaactagaggagcaatctaccaaaatgacatatgaaggtgatcccattccaatgcaaagaactcacatgctagaaagagtcaccttcttgatctacaaccttttcaagaactcatttgtggttgagcgacagccatgtatgccaacccaccctcagaggccgttggtacttaaaaccctaattcagttcactgtaaaactaaggctactaataaaattgccagaactaaactatcaggtaaaggttaaggcatcaattgacaagaatgtttcaactctaagcaaccgaagatttgtactttgtggaactaatgtcaaagccatgtctattgaagaatcttccaatgggagtctctcagtagaatttcgacatttgcaaccaaaggaaatgaagtccagtgctggaggtaaaggaaatgagggctgtcacatggtgactgaagaacttcattccataacgtttgaaacacagatctgcctctatggcctgaccatagatttggagaccagctcattgcctgtggtgatgatttccaatgtcagtcagttacctaatgcttgggcatccatcatttggtacaacgtgtcaaccaacgattcccagaacttggttttctttaataatcctccacctgccacattgagtcaactactggaggtgatgagctggcagttttcatcgtacgttggtcgtggtcttaactcagatcaactccatatgctggcagagaagcttacagtccaatctagctacagtgatggtcacctcacctgggccaagttctgcaaggaacatttacctggtaaatcatttaccttttggacatggcttgaagcaatattggatctaattaagaaacacattcttcccctttggattgatgggtatgtcatgggctttgttagcaaagagaaggaacggctgttgctaaaggataaaatgcctggcacctttttattaagattcagtgaaagccatctcggaggaataactttcacctgggtggaccattctgaaagtggggaagtgagattccactctgtagaaccctacaataaaggccggttgtctgctctgccattcgctgacatcctgcgagactacaaagttattatggctgaaaacattcctgaaaaccctctgaagtacctatatcctgacattcccaaagacaaagccttcggtaaacactacagctctcagccttgcgaagtttcaagaccaacagaaaggggtgacaaaggttatgttccttctgtttttatccccatctcaacaatccgaagtgattcaacagagccacattctccatcagaccttcttcccatgtctccaagtgtgtatgcggtgttgagagaaaacctgagtcccacaacaattgaaactgcaatgaagtctccttattctgctgaatgacaggataaactctgacgcaccaagaaaggaagcaaatgaaaaagtttaaagactgttctttgcccaataaccacattttatttcttcagctttgtaaataccaggttctaggaaatgtttgacatctgaagctctcttcacactcccgtggcactcctcaattgggagtgttgtgactgaaatgcttgaaaccaaagcttcagataaacttgcaagataagacaactttaagaaaccagtgttaataacaatattaacag

SEQ ID NO: 3879 - DNA, 709 bp, Homo sapiens
  source 1..709: mol_type = genomic DNA
gggacctgtgctgagagagcgctagcatgtctcagtggaatcaagtccaacagttagaaatcaagtttttggagcaggtggatcaattctatgatgacaactttcccatggaaattcggcatctgttggcccaatggattgaaaatcaagactgggaggcagcttctaacaatgaaaccatggcaacgattcttcttcaaaacttgttaatacaactggatgaacagttaggtcgtgtttccaaagagaaaaacctactcttgatacacaatctaaaaagaattaggaaggtccttcagtccccagggttggctacagcacagctgcccttggatcgacatggagaaacctgcattcaaaggtccaaatcttgtccctaggacttagcttcttcacctgggacattcagatgatactaattgaggaaaccaagatacaggaatttagtacccatctattccttctaatacaaaacatcggagaattctggcttttgcaaactgttgttgacattttatacccagatgttaccattacctttgaagcctcttgtgcctcctccctgacaccactctgctctctttccgcctggagcaaccactgacccaaaatttgcatttgtcattttttttctttttgttgccattttaccacatacatttgcatccctaaacaataaagtgtctaggtttgaaagctgctaaatcca

SEQ ID NO: 3880 - DNA, 474 bp, Homo sapiens
  source 1..474: mol_type = genomic DNA
ggggcaaggctactcaaggagagtaggaggaggctaggtcaggaagggcaagcactggtggcctacccaggacttggcccaaccctctgggtcaggtcaccctcgtcggagtgagcggaccccgctggaattggagcccagtaaggtctatgagtttggtgttttgatcctggctacccatcccttccatcccaggggtggttcaccaggctgagtggagccttatactagggagagaggaagctgaagaactgggctccaggaaagcctcaagtgggaggagaaatgcaaatcccctactgatgatggcgtcagcggctttctcctagggactgtgaggggcgcttctgactttggacttgagcactgcctgggacctgtgctgagagagcgctagcatgtctcagtggaatcaagtccaacagttagaaatcaagtttttggagcaggtggatcaattctatgatgacaact

SEQ ID NO: 3881 - DNA, 569 bp, Homo sapiens
  source 1..569: mol_type = genomic DNA
aggggcaaggctactcaaggagagtaggaggaggctaggtcaggaagggcaagcactggtggcctacccaggacttggcccaaccctctgggtcaggtcaccctcgtcggagtgagcggaccccgctggaattggagcccagtaaggtctatgagtttggtgttttgatcctggctacccatcccttccatcccaggggtggttcaccaggctgagtggagccttatactagggagagaggaagctgaagaactgggctccagggactgtgaggggcgcttctgactttggacttgagcactgcctgggacctgtgctgagagagcgctagcatgtctcagtggaatcaagtccaacagttagaaatcaagtttttggagcaggtggatcaattctatgatgacaactttcccatggaaattcggcatctgttggcccaatggattgaaaatcaagactgggaggcagcttctaacaatgaaaccatggcaacgattcttcttcaaaacttgttaatacaactggatgaacagttaggtcgtgtttccaaagagaaaaacctactcttg

SEQ ID NO: 3882 - DNA, 4301 bp, Homo sapiens
  source 1..4301: mol_type = genomic DNA
agacaggatattcactgctgtggcaaggcctgtagagagtttcgaagttaggaggactcaagacggtccctccctggacttttctgaaggggctcaaaagatgacacgcgccagagctggaaggcgtcgccaattggtccacttttccctcctccctttttgcggatgagaaaactgaggcccaggtttgggatttccagagcccgggatttcccggcaacgcccgacaaccacattcccccggctattctgacccgccccggttccgggacgctccctgggagccgccgccgagggcctgctgggactcccgggggaccccgccgtcggggcagcccccacgcccggcgccgcccgccgggaacggccgccgctgttgcgcacttgcaggggagccggcgactgagggcgaggcagggagggagcaagcggggctgggagggctgctggcgcgggctcgcgcgctgtgtatggtctatcgcaggcagctgacctttgaggaggaaatcgctgctctccgctccttcctgtagtaacagccgccgctgccgccgccgccaggaaccccggccgggagcgagagccgcggggcgcagagccggcccggctgccggacggtgcggccccaccaggtgaacggccatggcgggctggatccaggcccagcagctgcagggagacgcgctgcgccagatgcaggtgctgtacggccagcacttccccatcgaggtccggcactacttggcccagtggattgagagccagccatgggatgccattgacttggacaatccccaggacagagcccaagccacccagctcctggagggcctggtgcaggagctgcagaagaaggcggagcaccaggtgggggaagatgggtttttactgaagatcaagctggggcactacgccacgcagctccagaaaacatatgaccgctgccccctggagctggtccgctgcatccggcacattctgtacaatgaacagaggctggtccgagaagccaacaattgcagctctccggctgggatcctggttgacgccatgtcccagaagcaccttcagatcaaccagacatttgaggagctgcgactggtcacgcaggacacagagaatgagctgaagaaactgcagcagactcaggagtacttcatcatccagtaccaggagagcctgaggatccaagctcagtttgcccagctggcccagctgagcccccaggagcgtctgagccgggagacggccctccagcagaagcaggtgtctctggaggcctggttgcagcgtgaggcacagacactgcagcagtaccgcgtggagctggccgagaagcaccagaagaccctgcagctgctgcggaagcagcagaccatcatcctggatgacgagctgatccagtggaagcggcggcagcagctggccgggaacggcgggccccccgagggcagcctggacgtgctacagtcctggtgtgagaagttggccgagatcatctggcagaaccggcagcagatccgcagggctgagcacctctgccagcagctgcccatccccggcccagtggaggagatgctggccgaggtcaacgccaccatcacggacattatctcagccctggtgaccagcacattcatcattgagaagcagcctcctcaggtcctgaagacccagaccaagtttgcagccaccgtacgcctgctggtgggcgggaagctgaacgtgcacatgaatcccccccaggtgaaggccaccatcatcagtgagcagcaggccaagtctctgcttaaaaatgagaacacccgcaacgagtgcagtggtgagatcctgaacaactgctgcgtgatggagtaccaccaagccacgggcaccctcagtgcccacttcaggaacatgtcactgaagaggatcaagcgtgctgaccggcggggtgcagagtccgtgacagaggagaagttcacagtcctgtttgagtctcagttcagtgttggcagcaatgagcttgtgttccaggtgaagactctgtccctacctgtggttgtcatcgtccacggcagccaggaccacaatgccacggctactgtgctgtgggacaatgcctttgctgagccgggcagggtgccatttgccgtgcctgacaaagtgctgtggccgcagctgtgtgaggcgctcaacatgaaattcaaggccgaagtgcagagcaaccggggcctgaccaaggagaacctcgtgttcctggcgcagaaactgttcaacaacagcagcagccacctggaggactacagtggcctgtccgtgtcctggtcccagttcaacagggagaacttgccgggctggaactacaccttctggcagtggtttgacggggtgatggaggtgttgaagaagcaccacaagccccactggaatgatggggccatcctaggttttgtgaataagcaacaggcccacgacctgctcatcaacaagcccgacgggaccttcttgttgcgctttagtgactcagaaatcgggggcatcaccatcgcctggaagtttgactccccggaacgcaacctgtggaacctgaaaccattcaccacgcgggatttctccatcaggtccctggctgaccggctgggggacctgagctatctcatctatgtgtttcctgaccgccccaaggatgaggtcttctccaagtactacactcctgtgctggctaaagctgttgatggatatgtgaaaccacagatcaagcaagtggtccctgagtttgtgaatgcatctgcagatgctgggggcagcagcgccacgtacatggaccaggccccctccccagctgtgtgcccccaggctccctataacatgtacccacagaaccctgaccatgtactcgatcaggatggagaattcgacctggatgagaccatggatgtggccaggcacgtggaggaactcttacgccgaccaatggacagtcttgactcccgcctctcgccccctgccggtcttttcacctctgccagaggctccctctcatgaatgtttgaatcccacgcttctctttggaaacaatatgcaatgtgaagcggtcgtgttgtgagtttagtaaggctgtgtacactgacacctttgcaggcatgcatgtgcttgtgtgtgtgtgtgtgtgtgtgtccttgtgcatgagctacgcctgcctcccctgtgcagtcctgggatgtggctgcagcagcggtggcctcttttcagatcatggcatccaagagtgcgccgagtctgtctctgtcatggtagagaccgagcctctgtcactgcaggcactcaatgcagccagacctattcctcctgggcccctcatctgctcagcagctatttgaatgagatgattcagaaggggaggggagacaggtaacgtctgtaagctgaagtttcactccggagtgagaagctttgccctcctaagagagagagacagagagacagagagagagaaagagagagtgtgtgggtctatgtaaatgcatctgtcctcatgtgttgatgtaaccgattcatctctcagaagggaggctggggttcattttcgagtagtattttatactttagtgaacgtggactccagactctctgtgaaccctatgagagcgcgtctgggcccggccatgtccttagcacaggggggccgccggtttgagtgagggtttctgagctgctctgaattagtccttgcttggctgcttggccttgggcttcattcaagtctatgatgctgttgcccacgtttcccgggatatatattctctcccctccgttgggccccagccttctttgcttgcctctctgtttgtaaccttgtcgacaaagaggtagaaaagattgggtctaggatatggtgggtggacaggggccccgggacttggagggttggtcctcttgcctcctggaaaaaacaaaaacaaaaaactgcagtgaaagacaagctgcaaatcagccatgtgctgcgtgcctgtggaatctggagtgaggggtaaaagctgatctggtttgactccgctggaggtggggcctggagcaggccttgcgctgttgcgtaactggctgtgttctggtgaggccttgctcccaaccccacacgctcctccctctgaggctgtaggactcgcagtcaggggcagctgaccatggaagattgagagcccaaggtttaaacttctctgaagggaggtggggatgagaagaggggtttttttgtactttgtacaaagaccacacatttgtgtaaacagtgttttggaataaaatatttttttcataaa

SEQ ID NO: 3883 - DNA, 515 bp, Homo sapiens
  source 1..515: mol_type = genomic DNA
aacagccgccgctgccgccgccgccaggaaccccggccgggagcgagagccgcggggcgcagagccggcccggctgccggacggtgcggccccaccagaggagagcgcttcagcgctcggctcgccctaggtgaacggccatggcgggctggatccaggcccagcagctgcagggagacgcgctgcgccagatgcaggtgctgtacggccagcacttccccatcgaggtccggcactacttggcccagtggattgagagccagccatgggatgccattgacttggacaatccccaggacagagcccaagccacccagctcctggagggcctggtgcaggagctgcagaagaaggcggagcaccaggtgggggaagatgggtttttactgaagatcaagctggggcactacgccacgcagctccagaaaacatatgaccgctgccccctggagctggtccgctgcatccggcacattctgtacaatgaacagaggctggtccgagaagccaacaat

SEQ ID NO: 3884 - DNA, 3755 bp, Homo sapiens
  source 1..3755: mol_type = genomic DNA
gtaacagccgccgctgccgccgccgccaggaaccccggccgggagcgagagccgcggggcgcagagccggcccggctgccggacggtgcggccccaccaggtgaacggccatggcgggctggatccaggcccagcagctgcagggagacgcgctgcgccagatgcaggtgctgtacggccagcacttccccatcgaggtccggcactacttggcccagtggattgagagccagccatgggatgccattgacttggacaatccccaggacagagcccaagccacccagctcctggagggcctggtgcaggagctgcagaagaaggcggagcaccaggtgggggaagatgggtttttactgaagatcaagctggggcactacgccacgcagctccagaaaacatatgaccgctgccccctggagctggtccgctgcatccggcacattctgtacaatgaacagaggctggtccgagaagccaacaattgcagctctccggctgggatcctggttgacgccatgtcccagaagcaccttcagatcaaccagacatttgaggagctgcgactggtcacgcaggacacagagaatgagctgaagaaactgcagcagactcaggagtacttcatcatccagtaccaggagagcctgaggatccaagctcagtttgcccagctggcccagctgagcccccaggagcgtctgagccgggagacggccctccagcagaagcaggtgtctctggaggcctggttgcagcgtgaggcacagacactgcagcagtaccgcgtggagctggccgagaagcaccagaagaccctgcagctgctgcggaagcagcagaccatcatcctggatgacgagctgatccagtggaagcggcggcagcagctggccgggaacggcgggccccccgagggcagcctggacgtgctacagtcctggtgtgagaagttggccgagatcatctggcagaaccggcagcagatccgcagggctgagcacctctgccagcagctgcccatccccggcccagtggaggagatgctggccgaggtcaacgccaccatcacggacattatctcagccctggtgaccagcacattcatcattgagaagcagcctcctcaggtcctgaagacccagaccaagtttgcagccaccgtacgcctgctggtgggcgggaagctgaacgtgcacatgaatcccccccaggtgaaggccaccatcatcagtgagcagcaggccaagtctctgcttaaaaatgagaacacccgcaacgagtgcagtggtgagatcctgaacaactgctgcgtgatggagtaccaccaagccacgggcaccctcagtgcccacttcaggaacatgtcactgaagaggatcaagcgtgctgaccggcggggtgcagagtccgtgacagaggagaagttcacagtcctgtttgagtctcagttcagtgttggcagcaatgagcttgtgttccaggtgaagactctgtccctacctgtggttgtcatcgtccacggcagccaggaccacaatgccacggctactgtgctgtgggacaatgcctttgctgagccgggcagggtgccatttgccgtgcctgacaaagtgctgtggccgcagctgtgtgaggcgctcaacatgaaattcaaggccgaagtgcagagcaaccggggcctgaccaaggagaacctcgtgttcctggcgcagaaactgttcaacaacagcagcagccacctggaggactacagtggcctgtccgtgtcctggtcccagttcaacagggagaacttgccgggctggaactacaccttctggcagtggtttgacggggtgatggaggtgttgaagaagcaccacaagccccactggaatgatggtggttttgtgaataagcaacaggcccacgacctgctcatcaacaagcccgacgggaccttcttgttgcgctttagtgactcagaaatcgggggcatcaccatcgcctggaagtttgactccccggaacgcaacctgtggaacctgaaaccattcaccacgcgggatttctccatcaggtccctggctgaccggctgggggacctgagctatctcatctatgtgtttcctgaccgccccaaggatgaggtcttctccaagtactacactcctgtgctggctaaagctgttgatggatatgtgaaaccacagatcaagcaagtggtccctgagtttgtgaatgcatctgcagatgctgggggcagcagcgccacgtacatggaccaggccccctccccagctgtgtgcccccaggctccctataacatgtacccacagaaccctgaccatgtactcgatcaggatggagaattcgacctggatgagaccatggatgtggccaggcacgtggaggaactcttacgccgaccaatggacagtcttgactcccgcctctcgccccctgccggtcttttcacctctgccagaggctccctctcatgaatgtttgaatcccacgcttctctttggaaacaatatgcaatgtgaagcggtcgtgttgtgagtttagtaaggctgtgtacactgacacctttgcaggcatgcatgtgcttgtgtgtgtgtgtgtgtgtgtgtccttgtgcatgagctacgcctgcctcccctgtgcagtcctgggatgtggctgcagcagcggtggcctcttttcagatcatggcatccaagagtgcgccgagtctgtctctgtcatggtagagaccgagcctctgtcactgcaggcactcaatgcagccagacctattcctcctgggcccctcatctgctcagcagctatttgaatgagatgattcagaaggggaggggagacaggtaacgtctgtaagctgaagtttcactccggagtgagaagctttgccctcctaagagagagagacagagagacagagagagagaaagagagagtgtgtgggtctatgtaaatgcatctgtcctcatgtgttgatgtaaccgattcatctctcagaagggaggctggggttcattttcgagtagtattttatactttagtgaacgtggactccagactctctgtgaaccctatgagagcgcgtctgggcccggccatgtccttagcacaggggggccgccggtttgagtgagggtttctgagctgctctgaattagtccttgcttggctgcttggccttgggcttcattcaagtctatgatgctgttgcccacgtttcccgggatatatattctctcccctccgttgggccccagccttctttgcttgcctctctgtttgtaaccttgtcgacaaagaggtagaaaagattgggtctaggatatggtgggtggacaggggccccgggacttggagggttggtcctcttgcctcctggaaaaaacaaaaacaaaaaactgcagtgaaagacaagctgcaaatcagccatgtgctgcgtgcctgtggaatctggagtgaggggtaaaagctgatctggtttgactccgctggaggtggggcctggagcaggccttgcgctgttgcgtaactggctgtgttctggtgaggccttgctcccaaccccacacgctcctccctctgaggctgtaggactcgcagtcaggggcagctgaccatggaagattgagagcccaaggtttaaacttctctgaagggaggtggggatgagaagaggggtttttttgtactttgtacaaagaccacacatttgtgtaaacagtgttttggaataaaatatttttttc

SEQ ID NO: 3885 - DNA, 3671 bp, Homo sapiens
  source 1..3671: mol_type = genomic DNA
gtaacagccgccgctgccgccgccgccaggaaccccggccgggagcgagagccgcggggcgcagagccggcccggctgccggacggtgcggccccaccaggtgaacggccatggcgggctggatccaggcccagcagctgcagggagacgcgctgcgccagatgcaggtgctgtacggccagcacttccccatcgaggtccggcactacttggcccagtggattgagagccagccatgggatgccattgacttggacaatccccaggacagagcccaagccacccagctcctggagggcctggtgcaggagctgcagaagaaggcggagcaccaggtgggggaagatgggtttttactgaagatcaagctggggcactacgccacgcagctccagaaaacatatgaccgctgccccctggagctggtccgctgcatccggcacattctgtacaatgaacagaggctggtccgagaagccaacaattgcagctctccggctgggatcctggttgacgccatgtcccagaagcaccttcagatcaaccagacatttgaggagctgcgactggtcacgcaggacacagagaatgagctgaagaaactgcagcagactcaggagtacttcatcatccagtaccaggagagcctgaggatccaagctcagtttgcccagctggcccagctgagcccccaggagcgtctgagccgggagacggccctccagcagaagcaggtgtctctggaggcctggttgcagcgtgaggcacagacactgcagcagtaccgcgtggagctggccgagaagcaccagaagaccctgcagctgctgcggaagcagcagaccatcatcctggatgacgagctgatccagtggaagcggcggcagcagctggccgggaacggcgggccccccgagggcagcctggacgtgctacagtcctggtgtgagaagttggccgagatcatctggcagaaccggcagcagatccgcagggctgagcacctctgccagcagctgcccatccccggcccagtggaggagatgctggccgaggtcaacgccaccatcacggacattatctcagccctggtgaccagcacattcatcattgagaagcagcctcctcaggtcctgaagacccagaccaagtttgcagccaccgtacgcctgctggtgggcgggaagctgaacgtgcacatgaatcccccccaggtgaaggccaccatcatcagtgagcagcaggccaagtctctgcttaaaaatgagaacacccgcaacgagtgcagtggtgagatcctgaacaactgctgcgtgatggagtaccaccaagccacgggcaccctcagtgcccacttcaggaacatgtcactgaagaggatcaagcgtgctgaccggcggggtgcagagtccgtgacagaggagaagttcacagtcctgtttgagtctcagttcagtgttggcagcaatgagcttgtgttccaggtgaagggcagggtgccatttgccgtgcctgacaaagtgctgtggccgcagctgtgtgaggcgctcaacatgaaattcaaggccgaagtgcagagcaaccggggcctgaccaaggagaacctcgtgttcctggcgcagaaactgttcaacaacagcagcagccacctggaggactacagtggcctgtccgtgtcctggtcccagttcaacagggagaacttgccgggctggaactacaccttctggcagtggtttgacggggtgatggaggtgttgaagaagcaccacaagccccactggaatgatggggccatcctaggttttgtgaataagcaacaggcccacgacctgctcatcaacaagcccgacgggaccttcttgttgcgctttagtgactcagaaatcgggggcatcaccatcgcctggaagtttgactccccggaacgcaacctgtggaacctgaaaccattcaccacgcgggatttctccatcaggtccctggctgaccggctgggggacctgagctatctcatctatgtgtttcctgaccgccccaaggatgaggtcttctccaagtactacactcctgtgctggctaaagctgttgatggatatgtgaaaccacagatcaagcaagtggtccctgagtttgtgaatgcatctgcagatgctgggggcagcagcgccacgtacatggaccaggccccctccccagctgtgtgcccccaggctccctataacatgtacccacagaaccctgaccatgtactcgatcaggatggagaattcgacctggatgagaccatggatgtggccaggcacgtggaggaactcttacgccgaccaatggacagtcttgactcccgcctctcgccccctgccggtcttttcacctctgccagaggctccctctcatgaatgtttgaatcccacgcttctctttggaaacaatatgcaatgtgaagcggtcgtgttgtgagtttagtaaggctgtgtacactgacacctttgcaggcatgcatgtgcttgtgtgtgtgtgtgtgtgtgtgtccttgtgcatgagctacgcctgcctcccctgtgcagtcctgggatgtggctgcagcagcggtggcctcttttcagatcatggcatccaagagtgcgccgagtctgtctctgtcatggtagagaccgagcctctgtcactgcaggcactcaatgcagccagacctattcctcctgggcccctcatctgctcagcagctatttgaatgagatgattcagaaggggaggggagacaggtaacgtctgtaagctgaagtttcactccggagtgagaagctttgccctcctaagagagagagacagagagacagagagagagaaagagagagtgtgtgggtctatgtaaatgcatctgtcctcatgtgttgatgtaaccgattcatctctcagaagggaggctggggttcattttcgagtagtattttatactttagtgaacgtggactccagactctctgtgaaccctatgagagcgcgtctgggcccggccatgtccttagcacaggggggccgccggtttgagtgagggtttctgagctgctctgaattagtccttgcttggctgcttggccttgggcttcattcaagtctatgatgctgttgcccacgtttcccgggatatatattctctcccctccgttgggccccagccttctttgcttgcctctctgtttgtaaccttgtcgacaaagaggtagaaaagattgggtctaggatatggtgggtggacaggggccccgggacttggagggttggtcctcttgcctcctggaaaaaacaaaaacaaaaaactgcagtgaaagacaagctgcaaatcagccatgtgctgcgtgcctgtggaatctggagtgaggggtaaaagctgatctggtttgactccgctggaggtggggcctggagcaggccttgcgctgttgcgtaactggctgtgttctggtgaggccttgctcccaaccccacacgctcctccctctgaggctgtaggactcgcagtcaggggcagctgaccatggaagattgagagcccaaggtttaaacttctctgaagggaggtggggatgagaagaggggtttttttgtactttgtacaaagaccacacatttgtgtaaacagtgttttggaataaaatatttttttc

SEQ ID NO: 3886 - DNA, 2653 bp, Homo sapiens
  source 1..2653: mol_type = genomic DNA
agtaacagccgccgctgccgccgccgccaggaaccccggccgggagcgagagccgcggggcgcagagccggcccggctgccggacggtgcggccccaccaggtgaacggccatggcgggctggatccaggcccagcagctgcagggagacgcgctgcgccagatgcaggtgctgtacggccagcacttccccatcgaggtccggcactacttggcccagtggattgagagccagccatgggatgccattgacttggacaatccccaggacagagcccaagccacccagctcctggagggcctggtgcaggagctgcagaagaaggcggagcaccaggtgggggaagatgggtttttactgaagatcaagctggggcactacgccacgcagctccagtgcagctctccggctgggatcctggttgacgccatgtcccagaagcaccttcagatcaaccagacatttgaggagctgcgactggtcacgcaggacacagagaatgagctgaagaaactgcagcagactcaggagtacttcatcatccagtaccaggagagcctgaggatccaagctcagtttgcccagctggcccagctgagcccccaggagcgtctgagccgggagacggccctccagcagaagcaggtgtctctggaggcctggttgcagcgtgaggcacagacactgcagcagtaccgcgtggagctggccgagaagcaccagaagaccctgcagctgctgcggaagcagcagaccatcatcctggatgacgagctgatccagtggaagcggcggcagcagctggccgggaacggcgggccccccgagggcagcctggacgtgctacagtcctggtgtgagaagttggccgagatcatctggcagaaccggcagcagatccgcagggctgagcacctctgccagcagctgcccatccccggcccagtggaggagatgctggccgaggtcaacgccaccatcacggacattatctcagccctggtgaccagcacattcatcattgagaagcagcctcctcaggtcctgaagacccagaccaagtttgcagccaccgtacgcctgctggtgggcgggaagctgaacgtgcacatgaatcccccccaggtgaaggccaccatcatcagtgagcagcaggccaagtctctgcttaaaaatgagaacacccgcaacgagtgcagtggtgagatcctgaacaactgctgcgtgatggagtaccaccaagccacgggcaccctcagtgcccacttcaggaacatgtcactgaagaggatcaagcgtgctgaccggcggggtgcagagtccgtgacagaggagaagttcacagtcctgtttgagtctcagttcagtgttggcagcaatgagcttgtgttccaggtgaagactctgtccctacctgtggttgtcatcgtccacggcagccaggaccacaatgccacggctactgtgctgtgggacaatgcctttgctgagccgggcagggtgccatttgccgtgcctgacaaagtgctgtggccgcagctgtgtgaggcgctcaacatgaaattcaaggccgaagtgcagagcaaccggggcctgaccaaggagaacctcgtgttcctggcgcagaaactgttcaacaacagcagcagccacctggaggactacagtggcctgtccgtgtcctggtcccagttcaacagggagaacttgccgggctggaactacaccttctggcagtggtttgacggggtgatggaggtgttgaagaagcaccacaagccccactggaatgatggggccatcctaggttttgtgaataagcaacaggcccacgacctgctcatcaacaagcccgacgggaccttcttgttgcgctttagtgactcagaaatcgggggcatcaccatcgcctggaagtttgactccccggaacgcaacctgtggaacctgaaaccattcaccacgcgggatttctccatcaggtccctggctgaccggctgggggacctgagctatctcatctatgtgtttcctgaccgccccaaggatgaggtcttctccaagtactacactcctgtgctggctaaagctgttgatggatatgtgaaaccacagatcaagcaagtggtccctgagtttgtgaatgcatctgcagatgctgggggcagcagcgccacgtacatggaccaggccccctccccagctgtgtgcccccaggctccctataacatgtacccacagaaccctgaccatgtactcgatcaggatggagaattcgacctggatgagaccatggatgtggccaggcacgtggaggaactcttacgccgaccaatggacagtcttgactcccgcctctcgccccctgccggtcttttcacctctgccagaggctccctctcatgaatgtttgaatcccacgcttctctttggaaacaatatgcaatgtgaagcggtcgtgttgtgagtttagtaaggctgtgtacactgacacctttgcaggcatgcatgtgcttgtgtgtgtgtgtgtgtgtgtgtccttgtgcatgagctacgcctgcctcccctgtgcagtcctgggatgtggctgcagcagcggtggcctcttttcagatcatggcatccaagagtgcgccgagtctgtctctgtcat

SEQ ID NO: 3887 - DNA, 2653 bp, Homo sapiens; identical to SEQ ID NO: 3886
  source 1..2653: mol_type = genomic DNA

SEQ ID NO: 3888 - DNA, 5103 bp, Homo sapiens
  source 1..5103: mol_type = genomic DNA
ggcgggaggagagtcggcggccggagccgtcaccccgggcggggacccagcgcaggcaactccgcgcggcggcccggccgagggagggagcgagcgggcgggcgggcaagccagacagctgggccggagcagccgcgggcgcccgaggggccgagcgagattgtaaaccatggctgtgtggatacaagctcagcagctccaaggagaagcccttcatcagatgcaagcgttatatggccagcattttcccattgaggtgcggcattatttatcccagtggattgaaagccaagcatgggactcagtagatcttgataatccacaggagaacattaaggccacccagctcctggagggcctggtgcaggagctgcagaagaaggcagagcaccaggtgggggaagatgggtttttactgaagatcaagctggggcactatgccacacagctccagaacacgtatgaccgctgccccatggagctggtccgctgcatccgccatatattgtacaatgaacagaggttggtccgagaagccaacaatggtagctctccagctggaagccttgctgatgccatgtcccagaaacacctccagatcaaccagacgtttgaggagctgcgactggtcacgcaggacacagagaatgagttaaaaaagctgcagcagactcaggagtacttcatcatccagtaccaggagagcctgaggatccaagctcagtttggcccgctggcccagctgagcccccaggagcgtctgagccgggagacggccctccagcagaagcaggtgtctctggaggcctggttgcagcgtgaggcacagacactgcagcagtaccgcgtggagctggccgagaagcaccagaagaccctgcagctgctgcggaagcagcagaccatcatcctggatgacgagctgatccagtggaagcggcggcagcagctggccgggaacggcgggccccccgagggcagcctggacgtgctacagtcctggtgtgagaagttggccgagatcatctggcagaaccggcagcagatccgcagggctgagcacctctgccagcagctgcccatccccggcccagtggaggagatgctggccgaggtcaacgccaccatcacggacattatctcagccctggtgaccagcacgttcatcattgagaagcagcctcctcaggtcctgaagacccagaccaagtttgcagccactgtgcgcctgctggtgggcgggaagctgaacgtgcacatgaaccccccccaggtgaaggccaccatcatcagtgagcagcaggccaagtctctgctcaagaacgagaacacccgcaatgattacagtggcgagatcttgaacaactgctgcgtcatggagtaccaccaagccacaggcacccttagtgcccacttcaggaatatgtccctgaaacgaattaagaggtcagaccgtcgtggggcagagtcggtgacagaagaaaaatttacaatcctgtttgaatcccagttcagtgttggtggaaatgagctggtttttcaagtcaagaccctgtccctgccagtggtggtgatcgttcatggcagccaggacaacaatgcgacggccactgttctctgggacaatgcttttgcagagcctggcagggtgccatttgccgtgcctgacaaagtgctgtggccacagctgtgtgaggcgctcaacatgaaattcaaggccgaagtgcagagcaaccggggcctgaccaaggagaacctcgtgttcctggcgcagaaactgttcaacaacagcagcagccacctggaggactacagtggcctgtctgtgtcctggtcccagttcaacagggagaatttaccaggacggaattacactttctggcaatggtttgacggtgtgatggaagtgttaaaaaaacatctcaagcctcattggaatgatggggccattttggggtttgtaaacaagcaacaggcccatgacctactcattaacaagccagatgggaccttcctcctgagattcagtgactcagaaattggcggcatcaccattgcttggaagtttgattctcaggaaagaatgttttggaatctgatgccttttaccaccagagacttctccattcggtccctagccgaccgcttgggagacttgaattaccttatctacgtgtttcctgatcggccaaaagatgaagtatactccaaatactacacaccagttccctgcgagtctgctactgctaaagctgttgatggatacgtgaagccacagatcaagcaagtggtccctgagtttgtgaacgcatctgcagatgccgggggcggcagcgccacgtacatggaccaggccccctccccagctgtgtgtccccaggctcactataacatgtacccacagaaccctgactcagtccttgacaccgatggggacttcgatctggaggacacaatggacgtagcgcggcgtgtggaggagctcctgggccggccaatggacagtcagtggatcccgcacgcacaatcgtgaccccgcgacctctccatcttcagcttcttcatcttcaccagaggaatcactcttgtggatgttttaattccatgaatcgcttctcttttgaaacaatactcataatgtgaagtgttaatactagttgtgaccttagtgtttctgtgcatggtggcaccagcgaagggagtgcgagtatgtgtttgtgtgtgtgtgtgtgtgtgtgtgtgtgtgcgtgtttgcacgttatggtgtttctccctctcactgtctgagagtttagttgtagcagaggggccacagacagaagctgtggtggtttttactttgtgcaaaaaggcagtgagtttcgtgaagcctggaagttggccatgtgtcttaagagtggctggactttgacatgtggctgtttgaataagagaaggacaaagggaggagaaagcacatgtgctccagtgagtcttcgtcactctgtctgccaagcaattgatatataaccgtgattgtctctgcttttcttctgaaatgtagataactgctttttgacaaagagagccttccctctcccccacccctgtgttcttgggtaggaatgggaaaaggggcaacctacaaagattgttggggcaagggaagtcacaagctttcggatgggcggtggcttttcacaaaacatttagctcatcttattctctctttgtcctctctcccctcctgcccgcccgcaccctggaattgccactcagttcctctgggtgtgcacatatgtttggagaaatagaggagagaaaagagggccacgtaactgagagcttacagtgccaatgccgtttgtgttctggccagagtggagtgcgcagccctgactcccaggcgctgagattgttgcctggttacccaggaagctgctgttccggctgcccagcctttctctgagccagcggatgcacagtccgtggccttcttcaggcttattgatgatgctttttgcaaatgttgaatcatggttctgtttctaagttggatcttttttgttttctccttgccaccctaatttgacatcaaaattctctcttgtgcattgggccctgggtcattcaaacccaggtcacctcattccccttctctgttcacacctaatgtcttgaagagtaggtagcagcagtgtgggctgaacctaggccagcttgcttagcgggtcaccctgctgtgaagtcctggcaggtgttggtaatgtgtggaaatgcagtcagcaagtttgctggggagtttgataaaagtataaaacaaaacaaaaaaagcctcggtataattttgttccacgacttcttctgtagctttacaccagaaggaaggaatgggctacagcaggtagtggaggaagaggggggtgagcaggtgtattaaaatagcttacgggtaaggcctaaaaggtcacccctcggccccctctccaaaagaagggcatgggcacccccaggagaggatggccccaaaaaccttatttttatacatgagagtaaataaacatattttttttacaaaaataacttctgaatttatcagtgttttgccgttaaaaatattcctctatagtaaattatttattggaagatgacttttttaaagctgccgtttgccttggcttggtttcatacactgatttatttttctatgccaggcagtagagtctctctgcctctgaggagcaggctacccgcatcccactcagcccctccctacccctcaagatttgatgaaaattccaaccatgaggatgggtgcatcggggaagggtgagaaggagagcctgcctgctcagggatccaggctcgtagagtcactccctgcccgtctcccagagatgcttcaccagcacctgcctctgagacctcgctctctgttccagcaaccctggttggggggtcagacttgatacactttcaggttgggagtggacccaccccagggcctgctgaggacagagcagccaggccgtcctggctcactttgcagttggcactgggttggggaggaagagagctgatgagtgtggcttccctgagctggggtttccctgcttgtccagttgtgagctgtcctcggtgttaccgaggctgtgcctagagagtggagatttttgatgaaaggtgtgctcgctctctgcgttctatcttctctctcctccttgttcctgcaaaccacaagataaaggtagtggtgtgtctcgaccccatcagcctctcacccactcccagacacacacaagtcctcaaaagtttcagctccgtgtgtgagatgtgcaggttttttctagggggtagggggagactaaaatcgaatataacttaaaatgaaagtatactttttataatttttctttttaaaacttggtgaaattatttcagatacatattttagtgtcaaggcagattagttatttagccaccaaaaaaaagtattgtgtacaatttggggcctcaaatttgactctgcctcaaaaaaaagaaatatatcctatgcagagttacagtcacaaagttgtgtattttatgttacaataaagccttcctctgaagggatggtattga

SEQ ID NO: 3889 - DNA, 559 bp, Homo sapiens
  source 1..559: mol_type = genomic DNA
aaacaaagcagcatgtgcttgcggtgcggcgtcggctagggagccgagccgggaagacaccccaccgccgcagaaaggggattgtaaaccatggctgtgtggatacaagctcagcagctccaaggagaagcccttcatcagatgcaagcgttatatggccagcattttcccattgaggtgcggcattatttatcccagtggattgaaagccaagcatgggactcagtagatcttgataatccacaggagaacattaaggccacccagctcctggagggcctggtgcaggagctgcagaagaaggcagagcaccaggtgggggaagatgggtttttactgaagatcaagctggggcactatgccacacagctccagaacacgtatgaccgctgccccatggagctggtccgctgcatccgccatatattgtacaatgaacagaggttggtccgagaagccaacaatggtagctctccagctggaagccttgctgatgccatgtcccagaaacacctccagatcaaccagacgtttgaggagctgcgactggtcacgcagg

SEQ ID NO: 3890 - DNA, 627 bp, Homo sapiens
  source 1..627: mol_type = genomic DNA
ggaaacgggatggggagctggaccaggtgacagcggcatggacatatgccccaggctttcctgctggggtccatccatgagcctgcaggtgccctcatggagccccagccctgccctggaagcttggctgagagcttcctggaggaggagcttcggctcaatgctgagctgagccagctgcagttttcggagcctgtgggcatcatctacaatcccgtggagtatgcatgggagccacatcgcaactacgtgactcgctactgccagggccccaaggaagtactcttcctgggcatgaaccctggaccttttggcatggcccagactggggtgccctttggggaagtaagcatggtccgggactggttgggcattgtggggcctgtgctgacccctccccaagagcatcctaaacgaccagtgctgggactggagtgcccacagtcagaaggaccaagacaaagcatgggacatgaaattaagagtgaacttcttatgggaggctgcagctggatcagaggaaaaatccagtgtgacagagtgcaagtcagaagacctggcttttcatcccagctttgaaacttggaactttttgattgacaaattaataaacctctctatgcctca

SEQ ID NO: 3891 - DNA, 1571 bp, Homo sapiens
  source 1..1571: mol_type = genomic DNA
aaacgggatggggagctggaccagcagattatgagcttacagaaagcctggcctacattttactctttttggatttcttcctcatcaagagactgctgcagtgcctgtcatgtgacagcggcatggacatatgccccaggctttcctgctggggtccatccatgagcctgcaggtgccctcatggagccccagccctgccctggaagcttggctgagagcttcctggaggaggagcttcggctcaatgctgagctgagccagctgcagttttcggagcctgtgggcatcatctacaatcccgtggagtatgcatgggagccacatcgcaactacgtgactcgctactgccagggccccaaggaagtactcttcctgggcatgaaccctggaccttttggcatggcccagactggggtgccctttggggaagtaagcatggtccgggactggttgggcattgtggggcctgtgctgacccctccccaagagcatcctaaacgaccagtgctgggactggagtgcccacagtcagaagtgagtggtgcccgattctggggctttttccggaacctctgtggacagcctgaggtcttcttccatcactgttttgtccacaatctatgccctctgcttttcctggctcccagcgggcgcaaccttactcctgctgagctgcctgccaagcagcgagaacagcttcttgggatctgtgatgcagccctctgccggcaggtgcagctgctgggggtgcggctggtggtgggagttgggcgactggcagagcagcgggcacgacgggctctggcaggcctgatgccagaggtccaggtggaagggctcctgcatccctctccccgtaacccacaggccaacaagggctgggaggcagtggccaaggaaagattgaatgagctggggctgctgccactgctgttgaaatgagtgcccttggggccttgcatgggacacattcaagacctcgaagtcattcttggccaagcagatgacaacacatctcctggactggagcaaaaggtccttctgtgcaccctggtcgctgggaaacgtattctttgatctgttgaactgtcttccaacctgccatggcagttttgacactactcctgtttgccctcctgattcctgctttctttaccttttaacattgcccctttcaggggaccccactttgtagggaatctgcagaaggtgtgcttttgcacttgcagactgctctacctcagtgtttccttgggagactttattcagctgagagtgccctagacagtaacttctaaggtcacgtttactatttcagaggaaatatcttgccaggatacctacccatccttatagaacagttacctttagctgacccctttcctcacagggaccaagacaaagcatgggacatgaaattaagagtgaacttcttatgggaggctgcagctggatcagaggaaaaatccagtgtgacagagtgcaagtcagaagacctggcttttcatcccagctttgaaacttggaactttttgattgacaaattaataaacctctctatgcctcaggc

SEQ ID NO: 3892 - DNA, 1082 bp, Homo sapiens
  source 1..1082: mol_type = genomic DNA
agacggaattttgctctgaattccaggctggagtgcaatggcgcgatctcagctcactgcagcctccgcctcccgggttcaagcgattcttctgcctcagcctcccgagtgacagcggcatggacatatgccccaggctttcctgctggggtccatccatgagcctgcaggtgccctcatggagccccagccctgccctggaagcttggctgagagcttcctggaggaggagcttcggctcaatgctgagctgagccagctgcagttttcggagcctgtgggcatcatctacaatcccgtggagtatgcatgggagccacatcgcaactacgtgactcgctactgccagggccccaaggaagtactcttcctgggcatgaaccctggaccttttggcatggcccagactggggtgccctttggggaagtaagcatggtccgggactggttgggcattgtggggcctgtgctgacccctccccaagagcatcctaaacgaccagtgctgggactggagtgcccacagtcagaagtgagtggtgcccgattctggggctttttccggaacctctgtggacagcctgaggtcttcttccatcactgttttgtccacaatctatgccctctgcttttcctggctcccagcgggcgcaaccttactcctgctgagctgcctgccaagcagcgagaacagcttcttgggatctgtgatgcagccctctgccggcaggtgcagctgctgggggtgcggctggtggtgggagttgggcgactggcagagcagcgggcacgacgggctctggcaggcctgatgccagaggtccaggtggaagggctcctgcatccctctccccgtaacccacaggccaacaagggctgggaggcagtggccaaggaaagattgaatgagctggggctgctgccactgctgttgaaatgagtgcccttggggccttgcatgggacacattcaagacctcgaagtcattcttggccaagcagatgacaacacatctcctggactggagcaaaaggtccttctgtgcaccctggtcgctgggaaacgtattctttgatctgttg

SEQ ID NO: 3893 - DNA, 541 bp, Homo sapiens
  source 1..541: mol_type = genomic DNA
aaacgggatggggagctggaccagcagattatgagcttacagaaagcctggcctacattttactctttttggatttcttcctcatcaagagactgctgcagtgcctgtcatatggggtctcattatgtcagccaggctggtcttgaactcctggcctcaagcaattcttctgccttggcctctcaaagtgctgggattacaggcatgagccactgtgcccagcacagaaggtagttttaaacaaaagtgaaaaagaagatggacattgctgagcaggtgacagcggcatggacatatgccccaggctttcctgctggggtccatccatgagcctgcaggtgccctcatggagccccagccctgccctggaagcttggctgagagcttcctggaggaggagcttcggctcaatgctgagctgagccagctgcagttttcggagcctgtgggcatcatctacaatcccgtggagtatgcatgggagccacatcgcaactacgtgactcgctactgccagggccccaaggaagtactcttcctg

SEQ ID NO: 3894 - DNA, 751 bp, Homo sapiens
  source 1..751: mol_type = genomic DNA
gggtggttagaatttctatattttggggtccctccctccgtatggggctggagtgcaatggcgcgatctcagctcactgcagcctccgcctcccgggttcaagcgattcttctgcctcagcctcccgacagattatgagcttacagaaagcctggcctacattttactctttttggatttcttcctcatcaagagactgctgcagtgcctgtcatgtgacagcggcatggacatatgccccaggctttcctgctggggtccatccatgagcctgcaggtgccctcatggagccccagccctgccctggaagcttggctgagagcttcctggaggaggagcttcggctcaatgctgagctgagccagctgcagttttcggagcctgtgggcatcatctacaatcccgtggagtatgcatgggagccacatcgcaactacgtgactcgctactgccagggccccaaggaagtactcttcctgggcatgaaccctggaccttttggcatggcccagactggggtgccctttggggaagtaagcatggtccgggactggttgggcattgtggggcctgtgctgacccctccccaagagcatcctaaacgaccagtgctgggactggagtgcccacagtcagaagtgagtggtgcccgattctggggctttttccggaacctctgtggacagcctgaggtcttcttccatcactgttttgtccacaatctatgccctctgcttttcctggctccca

SEQ ID NO: 3895 - DNA, 470 bp, Homo sapiens
  source 1..470: mol_type = genomic DNA
ggaagtagggggctgggaatccgggactgtgggggcaagttgacggctcccagggtcgtcggggctgagccgagagggtgattatgagcttacagaaagcctggcctacattttactctttttggatttcttcctcatcaagagactgctgcagtgcctgtcatgtgacagcggcatggacatatgccccaggctttcctgctggggtccatccatgagcctgcaggtgccctcatggagccccagccctgccctggaagcttggctgagagcttcctggaggaggagcttcggctcaatgctgagctgagccagctgcagttttcggagcctgtgggcatcatctacaatcccgtggagtatgcatgggagccacatcgcaactacgtgactcgctactgccagggccccaaggaagtactcttcctgggcatgaaccctggaccttttggcatggcccagactggggt

SEQ ID NO: 3896 - DNA, 572 bp, Homo sapiens
  source 1..572: mol_type = genomic DNA
aaaggaaccggaaacgggatggggagctggaccaggctggagtgcaatggcgcgatctcagctcactgcagcctccgcctcccgggttcaagcgattcttctgcctcagcctcccgaatggggtctcattatgtcagccaggctggtcttgaactcctggcctcaagcaattcttctgccttggcctctcaaagtgctgggattacaggcatgagccactgtgcccagcacagaaggtagttttaaacaaaagtgaaaaagaagatggacattgctgagcaggtgacagcggcatggacatatgccccaggctttcctgctggggtccatccatgagcctgcaggtgccctcatggagccccagccctgccctggaagcttggctgagagcttcctggaggaggagcttcggctcaatgctgagctgagccagctgcagttttcggagcctgtgggcatcatctacaatcccgtggagtatgcatgggagccacatcgcaactacgtgactcgctactgccagggccccaaggaagtactcttcctgggcatgaaccctggaccttttggca

SEQ ID NO: 3897 - DNA, 712 bp, Homo sapiens
  source 1..712: mol_type = genomic DNA
ctgaattccaggctggagtgcaatggcgcgatctcagctcactgcagcctccgcctcccgggttcaagcgattcttctgcctcagcctcccgagtgacagcggcatggacatatgccccaggctttcctgctggggtccatccatgagcctgcaggtgccctcatggagccccagccctgccctggaagcttggctgagagcttcctggaggaggagcttcggctcaatgctgagctgagccagctgcagttttcggagcctgtgggcatcatctacaatcccgtggagtatgcatgggagccacatcgcaactacgtgactcgctactgccagggccccaaggaagtactcttcctgggcatgaaccctggaccttttggcatggcccagactggggtgccctttggggaagtaagcatggtccgggactggttgggcattgtggggcctgtgctgacccctccccaagagcatcctaaacgaccagtgctgggactggagtgcccacagtcagaaggaccaagacaaagcatgggacatgaaattaagagtgaacttcttatgggaggctgcagctggatcagaggaaaaatccagtgtgacagagtgcaagtcagaagacctggcttttcatcccagctttgaaacttggaactttttgattgacaaattaataaacctctctatgcctcaggctcctcatctgtaaaa

SEQ ID NO: 3898 - DNA, 465 bp, Homo sapiens
  source 1..465: mol_type = genomic DNA
gggggaaaggaaccggaaacgggatggggagctggaccaggctggagtgcaatggcgcgatctcagctcactgcagcctccgcctcccgggttcaagcgattcttctgcctcagcctcccgagtgacagcggcatggacatatgccccaggctttcctgctggggtccatccatgagcctgcaggtgccctcatggagccccagccctgccctggaagcttggctgagagcttcctggaggaggagcttcggctcaatgctgagctgagccagctgcagttttcggagcctgtgggcatcatctacaatcccgtggagtatgcatgggagccacatcgcaactacgtgactcgctactgccagggccccaaggaagtactcttcctgggcatgaaccctggaccttttggcatggcccagactggggtgccctttggggaagtaagcatggtccgggactggttg

SEQ ID NO: 3899 - DNA, 1503 bp, Homo sapiens
  source 1..1503: mol_type = genomic DNA
gggtgggggaaaggaaccggaaacgggatggggagctggaccaggtgacagcggcatggacatatgccccaggctttcctgctggggtccatccatgagcctgcaggtgccctcatggagccccagccctgccctggaagcttggctgagagcttcctggaggaggagcttcggctcaatgctgagctgagccagctgcagttttcggagcctgtgggcatcatctacaatcccgtggagtatgcatgggagccacatcgcaactacgtgactcgctactgccagggccccaaggaagtactcttcctgggcatgaaccctggaccttttggcatggcccagactggggtgccctttggggaagtaagcatggtccgggactggttgggcattgtggggcctgtgctgacccctccccaagagcatcctaaacgaccagtgctgggactggagtgcccacagtcagaagtgagtggtgcccgattctggggctttttccggaacctctgtggacagcctgaggtcttcttccatcactgttttgtccacaatctatgccctctgcttttcctggctcccagcgggcgcaaccttactcctgctgagctgcctgccaagcagcgagaacagcttcttgggatctgtgatgcagccctctgccggcaggtgcagctgctgggggtgcggctggtggtgggagttgggcgactggcagagcagcgggcacgacgggctctggcaggcctgatgccagaggtccaggtggaagggctcctgcatccctctccccgtaacccacaggccaacaagggctgggaggcagtggccaaggaaagattgaatgagctggggctgctgccactgctgttgaaatgagtgcccttggggccttgcatgggacacattcaagacctcgaagtcattcttggccaagcagatgacaacacatctcctggactggagcaaaaggtccttctgtgcaccctggtcgctgggaaacgtattctttgatctgttgaactgtcttccaacctgccatggcagttttgacactactcctgtttgccctcctgattcctgctttctttaccttttaacattgcccctttcaggggaccccactttgtagggaatctgcagaaggtgtgcttttgcacttgcagactgctctacctcagtgtttccttgggagactttattcagctgagagtgccctagacagtaacttctaaggtcacgtttactatttcagaggaaatatcttgccaggatacctacccatccttatagaacagttacctttagctgacccctttcctcacagggaccaagacaaagcatgggacatgaaattaagagtgaacttcttatgggaggctgcagctggatcagaggaaaaatccagtgtgacagagtgcaagtcagaagacctggcttttcatcccagctttgaaacttggaactttttgattgacaaattaataaacctctctatgcctcagg

SEQ ID NO: 3900 - DNA, 1006 bp, Homo sapiens
  source 1..1006: mol_type = genomic DNA
ggaccaggtgaggaagtagggggctgggaatccgggactgtgggggcaagttgacggctcccagggtcgtcggggctgagccgagagggtggttagaatttctatattttggggtccctccctccgtatggggtaagactcagtgcagggagagcccagcctatgaaaccgcctgggaggtctgcaggatcaaggctttccagtcggccggagccagcgggcgcccccggaggctggagtgcaatggcgcgatctcagctcactgcagcctccgcctcccgggttcaagcgattcttctgcctcagcctcccgagtagcagattatgagcttacagaaagcctggcctacattttactctttttggatttcttcctcatcaagagactgctgcagtgcctgtcatgtgacagcggcatggacatatgccccaggctttcctgctggggtccatccatgagcctgcaggtgccctcatggagccccagccctgccctggaagcttggctgagagcttcctggaggaggagcttcggctcaatgctgagctgagccagctgcagttttcggagcctgtgggcatcatctacaatcccgtggagtatgcatgggagccacatcgcaactacgtgactcgctactgccagggccccaaggaagtactcttcctgggcatgaaccctggaccttttggcatggcccagactggggtgccctttggggaagtaagcatggtccgggactggttgggcattgtggggcctgtgctgacccctccccaagagcatcctaaacgaccagtgctgggactggagtgcccacagtcagaaggaccaagacaaagcatgggacatgaaattaagagtgaacttcttatgggaggctgcagctggatcagaggaaaaatccagtgtgacagagtgcaagtcagaagacctggcttttcatcccagctttgaaacttggaactttttgattgacaaattaataaacctctctatgcctca

SEQ ID NO: 3901 - DNA, 926 bp, Homo sapiens
  source 1..926: mol_type = genomic DNA
agggggctgggaatccgggactgtgggggcaagttgacggctcccagggtcgtcggggctgagccgagagggtggttagaatttctatattttggggtccctccctccgtatggggtaagactcagtgcagggagagcccagcctatgaaaccgcctgggaggtctgcaggatcaaggctttccagtcggccggagccagcgggcgcccccggaggttttcagattatgagcttacagaaagcctggcctacattttactctttttggatttcttcctcatcaagagactgctgcagtgcctgtcatgtgacagcggcatggacatatgccccaggctttcctgctggggtccatccatgagcctgcaggtgccctcatggagccccagccctgccctggaagcttggctgagagcttcctggaggaggagcttcggctcaatgctgagctgagccagctgcagttttcggagcctgtgggcatcatctacaatcccgtggagtatgcatgggagccacatcgcaactacgtgactcgctactgccagggccccaaggaagtactcttcctgggcatgaaccctggaccttttggcatggcccagactggggtgccctttggggaagtaagcatggtccgggactggttgggcattgtggggcctgtgctgacccctccccaagagcatcctaaacgaccagtgctgggactggagtgcccacagtcagaaggaccaagacaaagcatgggacatgaaattaagagtgaacttcttatgggaggctgcagctggatcagaggaaaaatccagtgtgacagagtgcaagtcagaagacctggcttttcatcccagctttgaaacttggaactttttgattgacaaattaataaacctctctatgcctcaggctcctcatctgtaaaa

SEQ ID NO: 3902 - DNA, 2070 bp, Homo sapiens
  source 1..2070: mol_type = genomic DNA
cattttccgggcgccctttaccaacatggctgctgacgccacgccttctgggactcgtagtccggtcctcgcgcgctttcttacctaactggggcgctctgggtgttgtacgaaagcgcgtctgcggccgcaatgtctgctgagagttgtagttctgtgccctatcacggccactcccatttctggtgccgtcacgggacagagcagtcggtgacaggacagagcagtcggtgacgggacacagtggttggtgacgggacagagcggtcggtgacagcctcaagggcttcagcaccgcgcccatggcagagccagacccctctcaccctctggagacccaggcagggaaggtgcaggaggctcaggactcagattcagactctgagggaggagccgctggtggagaagcagacatggacttcctgcggaacttattctcccagacgctcagcctgggcagccagaaggagcgtctgctggacgagctgaccttggaaggggtggcccggtacatgcagagcgaacgctgtcgcagagtcatctgtttggtgggagctggaatctccacatccgcaggcatccccgactttcgctctccatccaccggcctctatgacaacctagagaagtaccatcttccctacccagaggccatctttgagatcagctatttcaagaaacatccggaacccttcttcgccctcgccaaggaactctatcctgggcagttcaagccaaccatctgtcactacttcatgcgcctgctgaaggacaaggggctactcctgcgctgctacacgcagaacatagataccctggagcgaatagccgggctggaacaggaggacttggtggaggcgcacggcaccttctacacatcacactgcgtcagcgccagctgccggcacgaatacccgctaagctggatgaaagagaagatcttctctgaggtgacgcccaagtgtgaagactgtcagagcctggtgaagcctgatatcgtcttttttggtgagagcctcccagcgcgtttcttctcctgtatgcagtcagacttcctgaaggtggacctcctcctggtcatgggtacctccttgcaggtgcagccctttgcctccctcatcagcaaggcacccctctccacccctcgcctgctcatcaacaaggagaaagctggccagtcggaccctttcctggggatgattatgggcctcggaggaggcatggactttgactccaagaaggcctacagggacgtggcctggctgggtgaatgcgaccagggctgcctggcccttgctgagctccttggatggaagaaggagctggaggaccttgtccggagggagcacgccagcatagatgcccagtcgggggcgggggtccccaaccccagcacttcagcttcccccaagaagtccccgccacctgccaaggacgaggccaggacaacagagagggagaaaccccagtgacagctgcatctcccaggcgggatgccgagctcctcagggacagctgagccccaaccgggcctggccccctcttaaccagcagttcttgtctggggagctcagaacatcccccaatctcttacagctccctccccaaaactggggtcccagcaaccctggcccccaaccccagcaaatctctaacacctcctagaggccaaggcttaaacaggcatctctaccagccccactgtctctaaccactcctgggctaaggagtaacctccctcatctctaactgcccccacggggccagggctaccccagaacttttaactcttccaggacagggagcttcgggcccccactctgtctcctgcccccgggggcctgtggctaagtaaaccatacctaacctaccccagtgtgggtgtgggcctctgaatataacccacacccagcgtagggggagtctgagccgggagggctcccgagtctctgccttcagctcccaaagtgggtggtgggcccccttcacgtgggacccacttcccatgctggatgggcagaagacattgcttattggagacaaattaaaaacaaaaacaactaacaatcc

SEQ ID NO: 3903 - DNA, 1784 bp, Homo sapiens
  source 1..1784: mol_type = genomic DNA
cgaaagcgcgtctgcggccgcaatgtctgctgagagttgtagttctgtgccctatcacggccactcccatttctggtgccgtcacgggacagagcagtcggtgacaggacagagcagtcggtgacgggacacagtggttggtgacgggacagagcggtcggtgacagcctcaagggcttcagcaccgcgcccatggcagagccagacccctctcaccctctggagacccaggcagggaaggtgcaggaggctcaggactcagattcagactctgagggaggagccgctggtggagaagcagacatggacttcctgcggaacttattctcccagacgctcagcctgggcagccagaaggagcgtctgctggacgagctgaccttggaaggggtggcccggtacatgcagagcgaacgctgtcgcagagtcatctgtttggtgggagctggaatctccacatccgcaggcatccccgactttcgctctccatccaccggcctctatgacaacctagagaagtaccatcttccctacccagaggccatctttgagatcagctatttcaagaaacatccggaacccttcttcgccctcgccaaggaactctatcctgggcagttcaagccaaccatctgtcactacttcatgcgcctgctgaaggacaaggggctactcctgcgctgctacacgcagaacatagataccctggagcgaatagccgggctggaacaggaggacttggtggaggcgcacggcaccttctacacatcacactgcgtcagcgccagctgccggcacgaatacccgctaagctggatgaaagagaagatcttctctgaggtgacgcccaagtgtgaagactgtcagagcctggtgaagcctgatatcgtcttttttggtgagagcctcccagcgcgtttcttctcctgtatgcagtcagacttcctgaaggtggacctcctcctggtcatgggtacctccttgcagggacgtggcctggctgggtgaatgcgaccagggctgcctggcccttgctgagctccttggatggaagaaggagctggaggaccttgtccggagggagcacgccagcatagatgcccagtcgggggcgggggtccccaaccccagcacttcagcttcccccaagaagtccccgccacctgccaaggacgaggccaggacaacagagagggagaaaccccagtgacagctgcatctcccaggcgggatgccgagctcctcagggacagctgagccccaaccgggcctggccccctcttaaccagcagttcttgtctggggagctcagaacatcccccaatctcttacagctccctccccaaaactggggtcccagcaaccctggcccccaaccccagcaaatctctaacacctcctagaggccaaggcttaaacaggcatctctaccagccccactgtctctaaccactcctgggctaaggagtaacctccctcatctctaactgcccccacggggccagggctaccccagaacttttaactcttccaggacagggagcttcgggcccccactctgtctcctgcccccgggggcctgtggctaagtaaaccatacctaacctaccccagtgtgggtgtgggcctctgaatataacccacacccagcgtagggggagtctgagccgggagggctcccgagtctctgccttcagctcccaaagtgggtggtgggcccccttcacgtgggacccacttcccatgctggatgggcagaagacattgcttattggagacaaatt

SEQ ID NO: 3904 - DNA, 848 bp, Homo sapiens
  source 1..848: mol_type = genomic DNA
aaacaaacaaaaaatgagcctggcatggtggcacgtgcctgtggtcccagctacttgggaggctgaggtgggaggatcccttgagcttgggaggttgaggctgcagcaagctgtgactgcaccagtgcactccagcctgggcaacagagcgagacactgtctcaaaaaagaaaagcaaagcaaagccactcacatgaggtcttgctcctggggacgggcatggccaggactccaaccccggcagcctgtcccagagccctggagctagccccagtgcagtctctccaccaccccgcacttcctcaggccaccttcctgccacagccttttccccaaacctggtatcaccccctctcctccctccctaatcccacctctcgggcctggccactccaccccaccccttccaggactcagattcagactctgagggaggagccgctggtggagaagcagacatggacttcctgcggaacttattctcccagacgctcagcctgggcagccagaaggagcgtctgctggacgagctgaccttggaaggggtggcccggtacatgcagagcgaacgctgtcgcagagtcatctgtttggtgggagctggaatctccacatccgcaggcatccccgactttcgctctccatccaccggcctctatgacaacctagagaagtaccatcttccctacccagaggccatctttgagatcagctatttcaagaaacatccggaacccttcttcgccctcgccaaggaactctatcctgggcagttcaagccaaccatctgtcactacttcatgcgcctgctgaaggacaaggggctactcctgcgctgctacacgcag

SEQ ID NO: 3905 - DNA, 2062 bp, Homo sapiens
  source 1..2062: mol_type = genomic DNA
agagtattcgggaggactacaactctctagccgttcccacattttccgggcgccctttaccaacatggctgctgacgccacgccttctgggactcgtagtccggtcctcgcgcgctttcttacctaactggggcgctctgggtgttgtacgaaagcgcgtctgcggccgcaatgtctgctgagagttgtagttctgtgccctatcacggccactcccatttctggtgccgtcacgggacagagcagtcggtgacaggacagagcagtcggtgacgggacacagtggttggtgacgggacagagcggtcggtgacagcctcaagggcttcagcaccgcgcccatggcagagccagaccgactcagattcagactctgagggaggagccgctggtggagaagcagacatggacttcctgcggaacttattctcccagacgctcagcctgggcagccagaaggagcgtctgctggacgagctgaccttggaaggggtggcccggtacatgcagagcgaacgctgtcgcagagtcatctgtttggtgggagctggaatctccacatccgcaggcatccccgactttcgctctccatccaccggcctctatgacaacctagagaagtaccatcttccctacccagaggccatctttgagatcagctatttcaagaaacatccggaacccttcttcgccctcgccaaggaactctatcctgggcagttcaagccaaccatctgtcactacttcatgcgcctgctgaaggacaaggggctactcctgcgctgctacacgcagaacatagataccctggagcgaatagccgggctggaacaggaggacttggtggaggcgcacggcaccttctacacatcacactgcgtcagcgccagctgccggcacgaatacccgctaagctggatgaaagagaagatcttctctgaggtgacgcccaagtgtgaagactgtcagagcctggtgaagcctgatatcgtcttttttggtgagagcctcccagcgcgtttcttctcctgtatgcagtcagacttcctgaaggtggacctcctcctggtcatgggtacctccttgcaggtgcagccctttgcctccctcatcagcaaggcacccctctccacccctcgcctgctcatcaacaaggagaaagctggccagtcggaccctttcctggggatgattatgggcctcggaggaggcatggactttgactccaagaaggcctacagggacgtggcctggctgggtgaatgcgaccagggctgcctggcccttgctgagctccttggatggaagaaggagctggaggaccttgtccggagggagcacgccagcatagatgcccagtcgggggcgggggtccccaaccccagcacttcagcttcccccaagaagtccccgccacctgccaaggacgaggccaggacaacagagagggagaaaccccagtgacagctgcatctcccaggcgggatgccgagctcctcagggacagctgagccccaaccgggcctggccccctcttaaccagcagttcttgtctggggagctcagaacatcccccaatctcttacagctccctccccaaaactggggtcccagcaaccctggcccccaaccccagcaaatctctaacacctcctagaggccaaggcttaaacaggcatctctaccagccccactgtctctaaccactcctgggctaaggagtaacctccctcatctctaactgcccccacggggccagggctaccccagaacttttaactcttccaggacagggagcttcgggcccccactctgtctcctgcccccgggggcctgtggctaagtaaaccatacctaacctaccccagtgtgggtgtgggcctctgaatataacccacacccagcgtagggggagtctgagccgggagggctcccgagtctctgccttcagctcccaaagtgggtggtgggcccccttcacgtgggacccacttcccatgctggatgggcagaagacattgcttattggagacaaattaaaaacaaaaacaactaacaatcc

SEQ ID NO: 3906 - DNA, 890 bp, Homo sapiens
  source 1..890: mol_type = genomic DNA
acgaaagcgcgtctgcggccgcaatgtctgctgagagttgtagttctgtgccctatcacggccactcccatttctggtgccgtcacgggacagagcagtcggtgacaggacagagcagtcggtgacgggacacagtggttggtgacgggacagagcggtcggtgacagcctcaagggcttcagcaccgcgcccatggcagagccagaccgtaggaggaggaggatcgcttgagcccaggaatttgaggctgcagtgagctatgatcgcactattgcactccaacctgggtgacatgagcgagaccctttctctaaaaagtaaaaaagaaagaaagactcagattcagactctgagggaggagccgctggtggagaagcagacatggacttcctgcggaacttattctcccagacgctcagcctgggcagccagaaggagcgtctgctggacgagctgaccttggaaggggtggcccggtacatgcagagcgaacgctgtcgcagagtcatctgtttggtgggagctggaatctccacatccgcaggcatccccgactttcgctctccatccaccggcctctatgacaacctagagaagtaccatcttccctacccagaggccatctttgagatcagctatttcaagaaacatccggaacccttcttcgccctcgccaaggaactctatcctgggcagttcaagccaaccatctgtcactacttcatgcgcctgctgaaggacaaggggctactcctgcgctgctacacgcagaacatagataccctggagcgaatagccgggctggaacaggaggacttggtggaggcgcacggcaccttctacacatcacactgcgtcagcgccagctgccggcacgaatacccgctaa

SEQ ID NO: 3907 - DNA, 1251 bp, Homo sapiens
  source 1..1251: mol_type = genomic DNA
cattttccgggcgccctttaccaacatggctgctgacgccacgccttctgggactcgtagtccggtcctcgcgcgctttcttacctaactggggcgctctgggtgttgtacgaaagcgcgtctgcggccgcaatgtctgctgagagttgtagttctgtgccctatcacggccactcccatttctggtgccgtcacgggacagagcagtcggtgacaggacagagcagtcggtgacgggacacagtggttggtgacgggacagagcggtcggtgacagcctcaagggcttcagcaccgcgcccatggcagagccagaccgtaggaggaggaggatcgcttgagcccaggaatttgaggctgcagtgagctatgatcgcactattgcactccaacctgggtgacatgagcgagaccctttctctaaaaagtaaaaaagaaagaaacctctcaccctctggagacccaggcagggaaggtgcaggaggctcaggactcagattcagactctgagggaggagccgctggtggagaagcagacatggacttcctgcggaacttattctcccagacgctcagcctgggcagccagaaggagcgtctgctggacgagctgaccttggaaggggtggcccggtacatgcagagcgaacgctgtcgcagagtcatctgtttggtgggagctggaatctccacatccgcaggcatccccgactttcgctctccatccaccggcctctatgacaacctagagaagtaccatcttccctacccagaggccatctttgagatcagctatttcaagaaacatccggaacccttcttcgccctcgccaaggaactctatcctgggcagttcaagccaaccatctgtcactacttcatgcgcctgctgaaggacaaggggctactcctgcgctgctacacgcagaacatagataccctggagcgaatagccgggctggaacaggaggacttggtggaggcgcacggcaccttctacacatcacactgcgtcagcgccagctgccggcacgaatacccgctaagctggatgaaagagaagatcttctctgaggtgacgcccaagtgtgaagactgtcagagcctggtgaagcctgatatcgtcttttttggtgagagcctcccagcgcgtttcttctcctgtatgcagtcagacttcctgaaggtggacctcctcctggtcatgggtacctccttgcaggtgcagccctttgcctccctcatcagcaa

SEQ ID NO: 3908 - DNA, 555 bp, Homo sapiens
  source 1..555: mol_type = genomic DNA
atttctggtgccgtcacgggacagagcagtcggtgacaggacagagcagtcggtgacgggacacagtggttggtgacgggacagagcggtcggtgacagcctcaagggcttcagcaccgcgcccatggcagagccagacctctctccaccaccccgcacttcctcaggccaccttcctgccacagccttttccccaaacctggtatcaccccctctcctccctccctaatcccacctctcgggcctggccactccaccccaccccttccaggactcagattcagactctgagggaggagccgctggtggagaagcagacatggacttcctgcggaacttattctcccagacgctcagcctgggcagccagaaggagcgtctgctggacgagctgaccttggaaggggtggcccggtacatgcagagcgaacgctgtcgcagagtcatctgtttggtgggagctggaatctccacatccgcaggcatccccgactttcgctctccatccaccggcctctatgacaacctagagaagtaccatcttccctacccaga

SEQ ID NO: 3909 - DNA, 578 bp, Homo sapiens
  source 1..578: mol_type = genomic DNA
aaagcgcgtctgcggccgcaatgtctgctgagagttgtagttctgtgccctatcacggccactcccatttctggtgccgtcacgggacagagcagtcggtgacaggacagagcagtcggtgacgggacacagtggttggtgacgggacagagcggtcggtgacagcctcaagggcttcagcaccgcgcccatggcagagccagaccgccaccttcctgccacagccttttccccaaacctggtatcaccccctctcctccctccctaatcccacctctcgggcctggccactccaccccaccccttccaggactcagattcagactctgagggaggagccgctggtggagaagcagacatggacttcctgcggaacttattctcccagacgctcagcctgggcagccagaaggagcgtctgctggacgagctgaccttggaaggggtggcccggtacatgcagagcgaacgctgtcgcagagtcatctgtttggtgggagctggaatctccacatccgcaggcatccccgactttcgctctccatccaccggcctctatgacaacctagagaagtacc

SEQ ID NO: 3910 - DNA, 1170 bp, Homo sapiens
  source 1..1170: mol_type = genomic DNA
atgagtgacgaggcagaggactcagattcagactctgagggaggagccgctggtggagaagcagacatggacttcctgcggaacttattctcccagacgctcagcctgggcagccagaaggagcgtctgctggacgagctgaccttggaaggggtggcccggtacatgcagagcgaacgctgtcgcagagtcatctgtttggtgggagctggaatctccacatccgcaggcatccccgactttcgctctccatccaccggcctctatgacaacctagagaagtaccatcttccctacccagaggccatctttgagatcagctatttcaagaaacatccggaacccttcttcgccctcgccaaggaactctatcctgggcagttcaagccaaccatctgtcactacttcatgcgcctgctgaaggacaaggggctactcctgcgctgctacacgcagaacatagataccctggagcgaatagccgggctggaacaggaggacttggtggaggcgcacggcaccttctacacatcacactgcgtcagcgccagctgccggcacgaatacccgctaagctggatgaaagagaagatcttctctgaggtgacgcccaagtgtgaagactgtcagagcctggtgaagcctgatatcgtcttttttggtgagagcctcccagcgcgtttcttctcctgtatgcagtcagacttcctgaaggtggacctcctcctggtcatgggtacctccttgcaggtgcagccctttgcctccctcatcagcaaggcacccctctccacccctcgcctgctcatcaacaaggagaaagctggccagtcggaccctttcctggggatgattatgggcctcggaggaggcatggactttgactccaagaaggcctacagggacgtggcctggctgggtgaatgcgaccagggctgcctggcccttgctgagctccttggatggaagaaggagctggaggaccttgtccggagggagcacgccagcatagatgcccaggggggcgggggtccccaaccccagcacttcagcttcccccaagaagtccccgccacctgccaaggacgaggccaggacaacagagagggagaaaccccagtgacagctgcatctcccaggcgggatgccgagctcctcagggacagctga

SEQ ID NO: 3911 - DNA, 1709 bp, Homo sapiens
  source 1..1709: mol_type = genomic DNA
gctccacctcgtccgtggccctgcccacccaggccgcaagagctgccgggacggtccccatcttcttggagcgctttaggctggccggcggcgctgggaggtggagtcgttgctgttgctgtttgtgagcctgtggcgcggcttctgtgggccggaaccttaaagatagccgcaatggctgaaaatggtgataatgaaaagatggctgccctggaggccaaaatctgtcatcaaattgagtattattttggcgacttcaatttgccacgggacaagtttctaaaggaacagataaaactggatgaaggctgggtacctttggagataatgataaaattcaacaggttgaaccgtctaacaacagactttaatgtaattgtggaagcattgagcaaatccaaggcagaactcatggaaatcagtgaagataaaactaaaatcagaaggtctccaagcaaacccctacctgaagtgactgatgagtataaaaatgatgtaaaaaacagatctgtttatattaaaggcttcccaactgatgcaactcttgatgacataaaagaatggttagaagataaaggtcaagtactaaatattcagatgagaagaacattgcataaagcatttaagggatcaatttttgttgtgtttgatagcattgaatctgctaagaaatttgtagagacccctggccagaagtacaaagaaacagacctgctaatacttttcaaggacgattactttgccaaaaaaaatgaagaaagaaaacaaaataaagtggaagctaaattaagagctaaacaggagcaagaagcaaaacaaaagttagaagaagatgctgaaatgaaatctctagaagaaaagattggatgcttgctgaaattttcgggtgatttagatgatcagacctgtagagaagatttacacatacttttctcaaatcatggtgaaataaaatggatagacttcgtcagaggagcaaaagaggggataattctatttaaagaaaaagccaaggaagcattgggtaaagccaaagatgcaaataatggtaacctacaattaaggaacaaagaagtgacttgggaagtactagaaggagaggtggaaaaagaagcactgaagaaaataatagaagaccaacaagaatccctaaacaaatggaagtcaaaaggtcgtagatttaaaggaaaaggaaagggtaataaagctgcccagcctgggtctggtaaaggaaaagtacagtttcagggcaagaaaacgaaatttgctagtgatgatgaacatgatgaacatgatgaaaatggtgcaactggacctgtgaaaagagcaagagaagaaacagacaaagaagaacctgcatccaaacaacagaaaacagaaaatggtgctggagaccagtagtttagtaaaccaattttttattcattttaaataggttttaaacgacttttgtttgcggggcttttaaaaggaaaaccgaattaggtccacttcaatgtccacctgtgagaaaggaaaaatttttttgttgtttaacttgtctttttgttatgcaaatgagatttctttgaatgtattgttctgtttgtgttatttcagatgattcaaatatcaaaaggaagattcttccattaaattgcctttgtaatatgagaatgtattagtacaaactaactaataaaatatatactatatgaaaagagcaaaaa

SEQ ID NO: 3912 - DNA, 1457 bp, Homo sapiens
  source 1..1457: mol_type = genomic DNA
atcttcttggagcgctttaggctggccggcggcgctgggaggtggagtcgttgctgttgctgtttgtgagcctgtggcgcggcttctgtgggccggaaccttaaagatagccgcaatggctgaaaatggtgataatgaaaagatggctgccctggaggccaaaatctgtcatcaaattgagtattattttggcgacttcaatttgccacgggacaagtttctaaaggaacagataaaactggatgaaggctgggtacctttggagataatgataaaattcaacaggttgaaccgtctaacaacagactttaatgtaattgtggaagcattgagcaaatccaaggcagaactcatggaaatcagtgaagataaaactaaaatcagaaggtctccaagcaaacccctacctgaagtgactgatgagtataaaaatgatgtaaaaaacagatctgtttatattaaaggcttcccaactgatgcaactcttgatgacataaaagaatggttagaagataaaggtcaagtactaaatattcagatgagaagaacattgcataaagcatttaagggatcaatttttgttgtgtttgatagcattgaatctgctaagaaatttgtagagacccctggccagaagtacaaagaaacagacctgctaatacttttcaaggacgattactttgccaaaaaaaatgaagaaagaaaacaaaataaagtggaagctaaattaagagctaaacaggagcaagaagcaaaacaaaagttagaagaagatgctgaaatgaaatctctagaagaaaagattggatgcttgctgaaattttcgggtgatttagatgatcagacctgtagagaagatttacacatacttttctcaaatcatggtgaaataaaatggatagacttcgtcagaggagcaaaagaggggataattctatttaaagaaaaagccaaggaagcattgggtaaagccaaagatgcaaataatggtaacctacaattaaggaacaaagaagtgacttgggaagtactagaaggagaggtggaaaaagaagcactgaagaaaataatagaagaccaacaagaatccctaaacaaatggaagtcaaaaggacctgtgaaaagagcaagagaagaaacagacaaagaagaacctgcatccaaacaacagaaaacagaaaatggtgctggagaccagtagtttagtaaaccaattttttattcattttaaataggttttaaacgacttttgtttgcggggcttttaaaaggaaaaccgaattaggtccacttcaatgtccacctgtgagaaaggaaaaatttttttgttgtttaacttgtctttttgttatgcaaatgagatttctttgaatgtattgttctgtttgtgttatttcagatgattcaaatatcaaaaggaagattcttccattaaattgcctttgtaatatgagaat

SEQ ID NO: 3913 - DNA, 1782 bp, Homo sapiens
  source 1..1782: mol_type = genomic DNA
ttttttttttttttttttttttacctccaccgccttctagtctcaccgaaggcttgtggccatctctgtaaagtttctggggaggtgggcacggggtaaacgccggagggttctgtggagcctatgggactgactggaggccaaagaactttgggccgcagatgtacaccagcgtcactcttttggtctgttagggccttcatcgctcacatcaggtttcagtgtgaaacgggaaaacatagccgcaatggctgaaaatggtgataatgaaaagatggctgccctggaggccaaaatctgtcatcaaattgagtattattttggcgacttcaatttgccacgggacaagtttctaaaggaacagataaaactggatgaaggctgggtacctttggagataatgataaaattcaacaggttgaaccgtctaacaacagactttaatgtaattgtggaagcattgagcaaatccaaggcagaactcatggaaatcagtgaagataaaactaaaatcagaaggtctccaagcaaacccctacctgaagtgactgatgagtataaaaatgatgtaaaaaacagatctgtttatattaaaggcttcccaactgatgcaactcttgatgacataaaagaatggttagaagataaaggtcaagtactaaatattcagatgagaagaacattgcataaagcatttaagggatcaatttttgttgtgtttgatagcattgaatctgctaagaaatttgtagagacccctggccagaagtacaaagaaacagacctgctaatacttttcaaggacgattactttgccaaaaaaaatgaagaaagaaaacaaaataaagtggaagctaaattaagagctaaacaggagcaagaagcaaaacaaaagttagaagaagatgctgaaatgaaatctctagaagaaaagattggatgcttgctgaaattttcgggtgatttagatgatcagacctgtagagaagatttacacatacttttctcaaatcatggtgaaataaaatggatagacttcgtcagaggagcaaaagaggggataattctatttaaagaaaaagccaaggaagcattgggtaaagccaaagatgcaaataatggtaacctacaattaaggaacaaagaagtgacttgggaagtactagaaggagaggtggaaaaagaagcactgaagaaaataatagaagaccaacaagaatccctaaacaaatggaagtcaaaaggtcgtagatttaaaggaaaaggaaagggtaataaagctgcccagcctgggtctggtaaaggaaaagtacagtttcagggcaagaaaacgaaatttgctagtgatgatgaacatgatgaacatgatgaaaatggtgcaactggacctgtgaaaagagcaagagaagaaacagacaaagaagaacctgcatccaaacaacagaaaacagaaaatggtgctggagaccagtagtttagtaaaccaattttttattcattttaaataggttttaaacgacttttgtttgcggggcttttaaaaggaaaaccgaattaggtccacttcaatgtccacctgtgagaaaggaaaaatttttttgttgtttaacttgtctttttgttatgcaaatgagatttctttgaatgtattgttctgtttgtgttatttcagatgattcaaatatcaaaaggaagattcttccattaaattgcctttgtaatatgagaatgtattagtacaaactaactaataaaatatatactatatgaaaagagcaaaaa

SEQ ID NO: 3914 - DNA, 674 bp, Homo sapiens
  source 1..674: mol_type = genomic DNA
ggagcgctttaggctggccggcggcgctgggaggtggagtcgttgctgttgctgtttgtgagcctgtggcgcggcttctgtgggccggaaccttaaagatagccgcaatggctgaaaatggtgataatgaaaagatggctgccctggaggccaaaatctgtcatcaaattgagtattattttggcgacttcaatttgccacgggacaagtttctaaaggaacagataaaactggatgaaggctgggtacctttggagataatgataaaattcaacaggttgaaccgtctaacaacagactttaatgtaattgtggaagcattgagcaaatccaaggcagaactcatggaaatcagtgaagataaaactaaaatcagaaggtctccaagcaaacccctacctgaagtgactgatgagtataaaaatgatgtaaaaaacagatctgtttatatttctcatcctgttgctcacgttggagtgcagtggtgtgatcatggcccactgcagtcttgacctcctgggctcaagtgatcctcccacctcagcctcctgagtagctgggactacagaaaggcttcccaactgatgcaactcttgatgacataaaagaatggttagaagataaaggtcaagtactaaatattcagatgagaagaacattgcataaagcattta

SEQ ID NO: 3915 - DNA, 545 bp, Homo sapiens
  source 1..545: mol_type = genomic DNA
ggagcgctttaggctggccggcggcgctgggaggtggagtcgttgctgttgctgtttgtgagcctgtggcgcggcttctgtgggccggaaccttaaagtattattttggcgacttcaatttgccacgggacaagtttctaaaggaacagataaaactggatgaaggctgggtacctttggagataatgataaaattcaacaggttgaaccgtctaacaacagactttaatgtaattgtggaagcattgagcaaatccaaggcagaactcatggaaatcagtgaagataaaactaaaatcagaaggtctccaagcaaacccctacctgaagtgactgatgagtataaaaatgatgtaaaaaacagatctgtttatattaaaggcttcccaactgatgcaactcttgatgacataaaagaatggttagaagataaaggtcaagtactaaatattcagatgagaagaacattgcataaagcatttaagggatcaatttttgttgtgtttgatagcattgaatctgctaagaaatttgtagagacccct

SEQ ID NO: 3916 - DNA, 2463 bp, Homo sapiens
  source 1..2463: mol_type = genomic DNA
aacagaaatgagtgcagaagacatggagaagaacgttcagaatagctttattcataacagcaaaaaactagaaacaacaaaatggtcagaaacagaagaatgggccagacgtcgtggctcactcctgtaatcccagcactttgggaggccaaggtggatggatcccttgaggtcagaagtttgaaacaagcctggccaacatggcaaaaccctgtctctacttaaaacagtacaaaaattagccatgcatggtggcaggcacctataatcccagctacttgggatattgaggcacgagaatcacttgaacccaggggggtagaggttgcggtgagccgagattgcgccactgcactctagcctgtgcaacagagtgagcctctgtctcaaaaaaaggaaaagaaatggaagaatggataaatcagttgtggtatgtgcgtataccacatgttgtggactgtttgtagttccccaaaattcatacattgacatcctaacctccagtgggatggtattaggaagtggggcctttgggaggtaataagatcatgatggtagaattctacctcatgaatgggatttagtgccttgtaagaagagactggagagtttacttcctttctgcttttcaccatgtaaggatacatgaagaagatggccatctgcaaaccaggaagcaggtcatcatgagacaccagatctaacagcatcttgatcttggacttctcagccttcaaaactgcgagcaataaatttctgttgtttaagacacccagtctatgatattttgttatagctgtccaaactgagacccagatatatacatactacatgacctagaacaggcaaagctaatcaatggtagttacttttaaggagggtattgactgagagaggagcccaaaggaactttctggagtgctgaaatgttctatatctcaatctggatggtaattacaaggtggtgttcacttgtgaaacttcattgagcacttaaaattcatgcaccttatagtttgtgtgatataattcaattaaaaaaatgtttagcccccaaaggcccttcttttctctttatctgtcacagttattttattttacatgaagtcttggtaaagaatctgtgctgttttatcaacttccatgtactgtcttctatagaagatctacttatcattttatgcatgctgatctcgtccacttgccaaatatagcaaattgacccaagtaaatttggctgttcacaattattagataatttagaggatagtggaggtcaccaattgttagacataggggtgggctctaggtctccccttaataacctcactttcatatgacttattacaatgaaggaagtttttgtagacaagattcaccttcaaacatctattagcaagaaaacacaaaagtagtcctacaatctattcccaaaattcagggagaccctagatttctggcttttaggcaatctgatattcatcttgcgcgcgcgcgtgcgcgcgcacacacacacacacacacacacacagaaatagaaaaacttagcaagcctagcagccttcagagtggtactcttggcctggagttttgatttagttgagttttctgccccttagtgatgaattctctcaattgccctaaccaaaagtctaaaatattataatcatctgccttgaataatttttcatggatttttttccccctcgcatttaaagtccaggttagaatgataagtccattctacgaagccatcagagttggtatggaactacaggatgttgggacttggcttccttctatcttgctgctttgccacacctatggtgtttccttcatttgcttggtccagttttgctcatcatccacatctagctagttgaagaaaagagaaagtgagatagccgcaatggctgaaaatggtgataatgaaaagatggctgccctggaggccaaaatctgtcatcaaattgagtattattttggcgacttcaatttgccacgggacaagtttctaaaggaacagataaaactggatgaaggctgggtacctttggagataatgataaaattcaacaggttgaaccgtctaacaacagactttaatgtaattgtggaagcattgagcaaatccaaggcagaactcatggaaatcagtgaagataaaactaaaatcagaaggtctccaagcaaacccctacctgaagtgactgatgagtataaaaatgatgtaaaaaacagatctgtttatattaaaggcttcccaactgatgcaactcttgatgacataaaagaatggttagaagataaaggtcaagtactaaatattcagatgagaagaacattgcataaagcatttaagggatcaatttttgttgtgtttgatagcattgaatctgctaagaaatttgtagagacccctggccagaagtacaaagaaacagacctgctaatacttttcaa

SEQ ID NO: 3917 - DNA, 672 bp, Homo sapiens
  source 1..672: mol_type = genomic DNA
atggctgaaaatggtgataatgaaaagatggctgccctggaggccaaaatctgtcatcaaattgagtattattttggcgacttcaatttgccacgggacaagtttctaaaggaacagataaaactggatgaaggctgggtacctttggagataatgataaaattcaacaggttgaaccgtctaacaacagactttaatgtaattgtggaagcattgagcaaatccaaggcagaactcatggaaatcagtgaagataaaactaaaatcagaaggtctccaagcaaacccctacctgaagtgactgatgagtataaaaatgatgtaaaaaacagatctgtttatattaaaggcttcccaactgatgcaactcttgatgacataaaagaatggttagaagataaaggtcaagtactaaatattcagatgagaagaacattgcataaagcatttaagggatcaatttttgttgtgtttgatagcattgaatctgctaagaaatttgtagagacccctggccagaagtacaaagaaacagacctgctaatacttttcaaggacgattactttgccaaaaaaaatgaagaaagaaaacaaaataaagtggaagctaaattaagagctaaacaggagcaagaagcaaaacaaaagttagaagaagatgctgaaatgaaa

SEQ ID NO: 3918 - DNA, 7307 bp, Homo sapiens
  source 1..7307: mol_type = genomic DNA
gcgagtctccgttaagaaggtgccgcggcggcgccggagatgtgtaattaagtgaaccatatatgtttcatcatcatggagatcttggagaattatctgagcaccaggttcatatgtattcgatctcagaggcatctattggacaacaaaacactctttcagttgtgaactttatttatttattattattattttttgagacagagttttgctcttgttgcccaggttagagtgcagtggcacgatctcggctcactgcaatctccgcctcccaggttcaagcgattctcttgcctctgcctcccgagtagctgggattacaggcatctgctaccacgcctggccaattttttgtattttcagttgaaacgaggtttcaccatattggccaggctggtctcgaacttctgacctcaggtgatccaccccccgcctcgtcctccaaaagagctgggattacaagtgtgagccaccgcgcccggcccagttgtggactttaacagagggaagctttaaacatgtttaaccacaggcccaatttgaacaaagatacttcaatcattatagagaggaaaacagtactttttgttcaattgtgcaaactctccaagtatctaatggagaagtagagaagaaccctaatgaaactgagtgtgaatgaggctcagctaggcttctacttgggttcactttctcatctgtctgcctgtcctgggattgaccctcgctcctctgaagaccagcctgaaagccttaaaactggtcagatgatggatgagtctgatgaggactttaaagaactctgcgctagctttttccaaagggtgaaaaaacatggaatcaaggaagtgtcaggagaaaggaagacacaaaaggctgcctcaaacggcactcagataagaagcaaattgaaaaggaccaaacaaactgctaccaagaccaaaacccttcaaggccctgcagagaagaaacctccgtctggcagccaggcccctaggactaaaaagcaaagggtaaccaaatggcaagcaagtgaaccggcccactctgtgaatggggaggggggtgtgcttgcctctgctccagatccacctgtgctccgggaaacagcacaaaacacccagacgggtaaccagcaagaaccatcgccaaacctttccagagagaaaaccagagagaatgtgcccaacagcgactcccagcctcctccttcctgtttgacaacagcagtgccaagtccctccaaaccccgcacagcacaattggtcctacagcgaatgcagcagttcaagagagcagaccccgagcgtttgagacacgcttcagaagagtgctccctcgaggctgcgcgggaagaaaatgtcccaaaggatcctcaagaggagatgatggcggggaatgtgtatgggcttgggccccctgccccagagagcgacgctgcggtggccttgaccctgcagcaggagtttgcacgggtaggagcatcggcacatgatgatagcctggaggaaaagggtttgttcttctgccagatttgtcaaaagaacctctcagccatgaacgtgacccgaagggaacagcatgtgaacaggtgcttggatgaagctgaaaagacactaagaccttctgtgcctcagatccctgagtgcccgatttgtgggaaaccgtttcttaccttaaagagcagaaccagtcacttgaagcagtgtgctgtgaagatggaggttggcccccagctcctgcttcaggctgtgcggctgcagacagcacagcctgagggtagcagcagcccacccatgttcagcttcagtgatcacagtagaggtctgaaacggagaggacccaccagcaagaaggagccacggaagaggcggaaggtggacgaggcaccgtccgaggacctgctggtggccatggctctgtcccggtcggagatggagccgggtgcggctgtaccagcgctcaggctggaaagtgccttttctgagaggataagaccagaagcagagaataaaagtcgcaagaagaaacccccggtatcccccccattgttgttagtccaggactctgaaaccacaggccgacagatagaggaccgtgtggccctgctcctctctgaggaagtggaattgtctagcacgccaccacttcctgccagcaggattttaaaggaagggtgggaaagagcgggccagtgtcctcctccacctgaacgcaagcagagctttctgtgggagggcagcgcactgactggggcctgggccatggaggacttctacacggccaggctggtccctcctctcgtgccccagcggcctgcccagggccttatgcaggagcccgtgccgcctctggtgccacctgagcactcagagctgagcgagcgaaggtcacccgctctccacggcacccccactgcaggctgtggctccaggggcccgtcgccttcggccagccagagggagcaccaggccctgcaggacctcgtggacctggcgagggagggactgagcgccagcccgtggcccggcagtgggggcctggctggctcggaagggactgcagggttggacgtggtgcccggcggccttcctctgactgggtttgtggtgccatcgcaggacaagcacccggacaggggcggccgcaccttgctctccctcgggctgctggttgctgactttggcgccatggtcaataacccacacctgagtgatgtccagtttcagacggacagcggggaggtgctttacgcccacaagttcgtgctttatgcccgatgcccgctcctcatccagtatgtgaacaatgaaggcttctccgctgtagaggacggggttctgacccagcgtgtcctgctgggtgacgtgagcaccgaggccgcccgcacgttcctgcactatctctacactgcggacactggccttcctcctggccttagctctgagctgagctccctggcccacaggtttggcgtgagtgagctcgttcacctgtgcgaacaggtgcctattgccactgactcagagggcaaaccatgggaggagaaggaagcagagaattgcgaaagcagggccgagaatttccaggaactcttgaggtcaatgtgggcagatgaagaggaggaagcggagactttgttgaaatccaaggaccacgaagaagatcaagaaaacgtgaatgaagcagaaatggaagaaatttatgaatttgcagctactcagcgaaagcttctccaggaagaaagggcagcgggtgccggcgaggacgctgactggctggagggtggcagtccggtttctgggcaactcctagcaggtgtccaggtgcagaaacagtgggacaaggtggaggagatggagccgttggagccaggaagagatgaggccgccaccacctgggagaagatgggacagtgcgctctcccgccaccccagggccagcactcaggggcacggggagcagaggcccctgagcaggaggcgccagaggaggcgcttggccattccagctgctccagcccttccagggactgccaggcagagagaaaagaaggctctcttccgcactcagatgatgccggggattacgaacagctcttctcatcaactcagggagagatctcagagccgtcccaaataacaagtgagcccgaggaacaaagtggcgctgtcagggaaagggggctggaggtttctcatcgcctggctccctggcaggcatctccaccgcacccgtgccgcttcctattggggcctccccagggcgggagtccccgcgggtctcatcacacaagtgggtcgtccctgtcaacaccccggtcccgtggcggaacttcccaggtgggctccccaaccttgctgtctccagctgtgccatcaaagcagaaaagggacaggagcatcctcacgctgtctaaagagccagggcaccagaaaggcaaagagcgtcggtccgtgctggagtgcagaaataagggggtcctgatgttcccagaaaaatctccgtctattgacctaacccagtcaaatcctgaccattcgagctccagatctcagaaatcttcatccaaactgaacgaagaagatgaggtcatcctcttactggactcggatgaggagctggagctagaacaaaccaaaatgaagtccatttctagtgatcctctggaagaaaagaaagctctagaaattagccctaggtcctgtgagctgttttccatcattgatgttgatgcagatcaggaaccttcccagagcccaccaagaagcgaagctgtgctgcagcaggaggatgagggggcgctgccggagaatcggggctctttgggcaggagaggggctccctggctgttctgtgaccgtgagagcagccccagcgaggccagcaccacagacacctcgtggctggtgcccgccaccccgctggccagcagaagccgtgactgttcttcccagacccaaatcagcagcctcaggagcgggctggccgtgcaggcggtgactcagcacacgcccagggcctcagtaggaaacagggaagggaacgaagtcgcacagaagttttctgtcatcaggccccagacaccaccgccccagacaccgtcctcatgcctcactcccgtctctccaggaacttctgacggcagaaggcaaggccacagaagcccttcccgtccccaccccgggggccacccgcactcctctccgctggctccacatcccatctcaggggaccgcgcccacttcagcaggcggttcctgaaacactcgccgcctgggccaagcttcctgaaccagaccccagcgggtgaagtggtggaagtcggagacagtgacgatgagcaggaggtggcctcccatcaggccaacagaagccccccactggacagtgaccccccaattccaattgacgactgctgctggcacatggagcccctctcgccaattcccattgaccactggaacctggagcggaccggccccctgagcaccagcagccccagccgcaggatgaacgaggccgccgacagccgtgactgtcgctccccgggactcctggacaccacccccatccgaggaagctgcactacccagaggaaattgcaagagaagtcctcgggcgcgggctccctggggaatagcaggccgagctttctgaattcggctctgtgggacgtttgggacggggaagagcagaggcctccagagacccctcctccggcccagatgccaagcgctggtggagctcagaagcccgaagggttagagacacccaaaggtgctaatcggaagaagaacttgccccccaaagtgcccataacgccgatgccacagtattccattatggagacgccggtgctgaagaaggaactggataggtttggagtccgccctctgcctaaacgccagatggttctgaagctgaaggagatattccagtacactcaccagaccctggactcagactccgaggacgagagccagtcctcacagccgctgttgcaggcgcctcactgccagaccctcgcctcccagacctacaagccttcaagggcaggggtccatgcccagcaggaggccaccacaggacctggggcccataggcccaagggacctgctaagaccaagggcccccgacatcaaaggaagcatcatgaaagcatcacacccccaagcaggtcgcccaccaaggaggcacctccaggcctcaatgatgacgcccagatcccagcctctcaagaatccgtggccacctctgtggatggcagtgacagctccttgagctcacagagttcttcctcctgtgagtttggagcggcatttgagtctgcaggtgaagaggagggcgagggggaggtcagtgcctcgcaggcagccgtgcaggcggcggacacagacgaggcgctgaggtgctacatccgctccaagccggccctgtaccagaaggtgctgctgtaccagccctttgagctgcgggagctgcaggcagagctgaggcagaacggcctccgtgtgtcctcgcgcaggctgttggacttcctggacacccactgtatcaccttcaccactgccgccacccgcagggagaagctccagggcaggaggcggcagcctcggggcaagaagaaggtggagcggaactgatggggccatcccgaccccaccccaacctgccatcagcagcccccacccccgccatttgcagggaggacctgggacacccagcgtgggtcaggcctccacaggcatttctgggcctggggaccacatcagctctgcgctgtgatgatgaccacagcccaatccagggcttcctcctctgggctctgctttctagggtggcatttggagcatgtcacccactggatttacagactccagccccttcctctgtccgtgctcacagtgtgtctccctttttggttttctttttttttttctttttgagacagtcgtgctgtgtcacctaggctggagtgcagtggcacaatctcggctcactgcaacctccgcctcccgggttcaagcaattctcctgcctcagcctcccagatagctgggactacaggcacacgctgccacgcccagctgattttttatattttagtagaaacggggtttcaccatgttgctcaggctggtcacaaactccagagctcaggcaatccgcctgctgcggcctcccaaagtgctgggatcacaggcgccagccactgcgcccggcccagtgtgtctcccttaacccaagagggccctcagctgtcccagggggcagtgggccatcaccagctggccagggcatggcctattctgccacatttgccaccctctgagcccaccagtcctgggcacagctgccctacatgtctgtcctgagatggacgtcaggtccagcctgccccggcagcccgggcccgtcctcctcagcactcaggccaaccccagccaccgccagcctgagaccaggtgtcctgaggctccctgcactgccacagcccagatgcagttctcctgacccagccgtgctacccggacacttgtcattgttaccagcagtctccaaactggacagtgcacaagggcccagaacaactctgatgccaccacaaaacaaacatgttcactagcggattccattctttgggttaaagctgcctccagcctcaggagcagtgtggaggaagatgagggccaggaaagaaggaaaccttggtttctccatccttgtgaatgtcctcgtctgtttcaaatacagtgcagtcagttttatatgatgtgcaataaaccaaaaaggctttattaaaa

SEQ ID NO: 3919 - DNA, 11932 bp, Homo sapiens
  source 1..11932: mol_type = genomic DNA
ccgcgcgcccgggccgccggccgggcccgggcctgggggcggggcgggaagacggcggccgggagtgttttcagttccgcctccaatcgcccattcccctcttcccctcccagccccctccatcccatcggaagaggaaggaacaaaaggtcccggaccccccggatctgacggggcgggacctggcgccaccttgcaggttcgatacaagaggctgttttcctagcgtggcttgctgcctttggtaagaacatgtcgtccatcttgccattcacgccgccagttgtgaagagactgctgggatggaagaagtcagctggtgggtctggaggagcaggcggaggagagcagaatgggcaggaagaaaagtggtgtgagaaagcagtgaaaagtctggtgaagaagctaaagaaaacaggacgattagatgagcttgagaaagccatcaccactcaaaactgtaatactaaatgtgttaccataccaagcacttgctctgaaatttggggactgagtacaccaaatacgatagatcagtgggatacaacaggcctttacagcttctctgaacaaaccaggtctcttgatggtcgtctccaggtatcccatcgaaaaggattgccacatgttatatattgccgattatggcgctggcctgatcttcacagtcatcatgaactcaaggcaattgaaaactgcgaatatgcttttaatcttaaaaaggatgaagtatgtgtaaacccttaccactatcagagagttgagacaccagttttgcctccagtattagtgccccgacacaccgagatcctaacagaacttccgcctctggatgactatactcactccattccagaaaacactaacttcccagcaggaattgagccacagagtaattatattccagaaacgccacctcctggatatatcagtgaagatggagaaacaagtgaccaacagttgaatcaaagtatggacacaggctctccagcagaactatctcctactactctttcccctgttaatcatagcttggatttacagccagttacttactcagaacctgcattttggtgttcgatagcatattatgaattaaatcagagggttggagaaaccttccatgcatcacagccctcactcactgtagatggctttacagacccatcaaattcagagaggttctgcttaggtttactctccaatgttaaccgaaatgccacggtagaaatgacaagaaggcatataggaagaggagtgcgcttatactacataggtggggaagtttttgctgagtgcctaagtgatagtgcaatctttgtgcagagccccaattgtaatcagagatatggctggcaccctgcaacagtgtgtaaaattccaccaggctgtaatctgaagatcttcaacaaccaggaatttgctgctcttctggctcagtctgttaatcagggttttgaagccgtctatcagctaactagaatgtgcaccataagaatgagttttgtgaaagggtggggagcagaataccgaaggcagacggtaacaagtactccttgctggattgaacttcatctgaatggacctctacagtggttggacaaagtattaactcagatgggatccccttcagtgcgttgctcaagcatgtcataaagcttcaccaatcaagtcccatgaaaagacttaatgtaacaactcttctgtcatagcattgtgtgtggtccctatggactgtttactatccaaaagttcaagagagaaaacagcacttgaggtctcatcaattaaagcaccttgtggaatctgtttcctatatttgaatattagatgggaaaattagtgtctagaaatactctcccattaaagaggaagagaagattttaaagacttaatgatgtcttattgggcataaaactgagtgtcccaaaggtttattaataacagtagtagttatgtgtacaggtaatgtatcatgatccagtatcacagtattgtgctgtttatatacatttttagtttgcatagatgaggtgtgtgtgtgcgctgcttcttgatctaggcaaacctttataaagttgcagtacctaatctgttattcccacttctctgttatttttgtgtgtcttttttaatatataatatatatcaagattttcaaattatttagaagcagattttcctgtagaaaaactaatttttctgccttttaccaaaaataaactcttgggggaagaaaagtggattaacttttgaaatccttgaccttaatgtgttcagtggggcttaaacagtcattctttttgtggttttttgtttttttttgtttttttttttaactgctaaatcttattataaggaaaccatactgaaaacctttccaagcctcttttttccattcccatttttgtcctcataatcaaaacagcataacatgacatcatcaccagtaatagttgcattgatactgctggcaccagttaattctgggatacagtaagaattcatatggagaaagtccctttgtcttatgcccaaatttcaacaggaataattggcttgtataatctagcagtctgttgatttatccttccacctcataaaaaatgcataggtggcagtataattattttcagggatatgctagaattacttccacatatttatccctttttaaaaaagctaatctataaataccgtttttccaaaggtattttacaatatttcaacagcagaccttctgctcttcgagtagtttgatttggtttagtaaccagattgcattatgaaatgggccttttgtaaatgtaattgtttctgcaaaatacctagaaaagtgatgctgaggtaggatcagcagatatgggccatctgtttttaaagtatgttgtattcagtttataaattgattgttattctacacataattatgaattcagaattttaaaaattgggggaaaagccatttatttagcaagttttttagcttataagttacctgcagtctgagctgttcttaactgatcctggttttgtgattgacaatatttcatgctctgtagtgagaggagatttccgaaactctgttgctagttcattctgcagcaaataattattatgtctgatgttgactcattgcagtttaaacatttcttcttgtttgcatcttagtagaaatggaaaataaccactcctggtcgtcttttcataaattttcatatttttgaagctgtctttggtacttgttctttgaaatcatatccacctgtctctataggtatcattttcaatactttcaacatttggtggttttctattgggtactccccattttcctatatttgtgtgtatatgtatgtgttcatgtaaatttggtatagtaattttttattcattcaacaaatatttattgttcacctgtttgtaccaggaacttttcttagtctttgggtaaaggtgaacaagacaactacagttcctgcctttgctgagacagcagttacactaacccttaattatcttacttgtctatgaaggagataaacagggtactgtactggagaataacagatgggatgcttcaggtaggacatcaaggaaagcctctaaggaaaggatgcatgagctaacacctgacattaaagaagcaagccaagtgaggagccaggggagataagcattcctggcaaagagaatagcatcaaatgcaaaaaggttcacactaaaggaaactcctgattaggtattaatgctttatacagaaacctctatacaaatccaaacttgaagatcagaatggttctacagttcataacattttgaaggtggccttattttgtgatagtctgcttcatgtgattctcactaacatatctccttcctcaacctttgctgtaaaaatttcatttgcaccacatcagtactacttaatttaacaagcttttgttgtgtaagctctcactgttttagtgccctgctgcttgcttccagactttgtgctgtccagtaattatgtcttccactacccatcttgtgagcagagtaaatgtcctaggtaataccactatcaggcctgtaggagatactcagtggagcctctgcccttctttttcttacttgagaacttgtaatggtgttagggaacagttgtaggggcagaaaacaactctgaaagtggtagaaggtcctgatcttggtggttactcttgcattactgtgttaggtcaagcagtgcctactatgctgtttcagtagtggagcgcatctctacagttctgatgcgatttttctgtacagtatgaaattgggactcaactctttgaaaacacctattgagcagttatacctgttgagcagtttacttcctggttgtaattacatttgtgtgaatgtgtttgatgctttttaacgagatgatgttttttgtattttatctactgtggcctgattttttttttgttttctgcccctccccccatttataggtgtggttttcatttttctaagtgatagaatcccctctttgttgaatttttgtctttatttaaattagcaacattacttaggatttattcttcacaatactgttaattttctaggaatgatgacctgagaaccgaatggccatgctttctatcacatttctaagatgagtaatattttttccagtaggttccacagagacaccttgggggctggcttaggggaggctgttggagttctcactgacttagtggcatatttattctgtactgaagaactgcatggggtttcttttggaaagagtttcattgctttaaaaagaagctcagaaagtctttataaccactggtcaacgattagaaaaatataactggatttaggcctaccttctggaataccgctgattgtgctctttttatcctactttaaagaagctttcatgattagatttgagctatatcagttataccgattataccttataatacacattcagttagtaaacatttattgatgcctgttgtttgcccagccactgtgatggatattgaataataaaaagatgactaggacggggccctgacccttgagctgtgcttggtcttgtagaggttgtgttttttttcctcaggacctgtcactttggcagaaggaaatctgcctaatttttcttgaaagctaaattttctttgtaagtttttacaaattgtttaatacctagttgtattttttaccttaagccacattgagttttgcttgatttgtctgtcttttaaacactgtcaaatgctttcccttttgttaaaattattttaatttcactttttttgtgcccttgtcaatttaagactaagactttgaaggtaaaacaaacaaacaaacatcagtcttagtctcttgctagttgaaatcaaataaaagaaaatatatacccagttggtttctctacctcttaaaagcttcccatatatacctttaagatccttctcttttttctttaactactaaataggttcagcatttattcagtgttagataccctcttcgtctgagggtggcgtaggtttatgttgggatataaagtaacacaagacaatcttcactgtacataaaatatgtcttcatgtacagtctttactttaaaagctgaacattccaatttgcgccttccctcccaagcccctgcccaccaagtatctctttagatatctagtctgtggacatgaacaatgaatacttttttcttactctgatcgaaggcattgatacttagacatatcaaacatttcttcctttcatatgctttactttgctaaatctattatattcattgcctgaattttattcttcctttctacctgacaacacacatccaggtggtacttgctggttatcctctttcttgttagccttgttttttgttttttttttttttttttgagagggagtctcgctctgttgcccaacctggagtgcagtggtgcgatcttggttcactgcaagctccgcctcccgggttcacgccatgcttctgcctcagcctcccaagtagctgggactacaggcgcccaccaccacactcggctaattttttgtatttttagtagagacggggtttcaccgtgttggccaggatggtctcgatctcctgacctcgtgatctgtccacctcggcttcccaaagtgctgggattacaggcatgagccaccgcgcccagcctagccatatttttatctgcatatatcagaatgtttctctcctttgaacttattaacaaaaaaggaacatgcttttcatacctagagtcctaatttcttcatcatgaaggttgctattcaaattgatcaatcattttaattttacaaatggctcaaaaattctgttcagtaaatgtctttgtgactggcaaatggcataaattatgtttaagattatgaacttttctgacagttgcagccaatgttttccctacgataccagatttccatcttggggcatattggattgttgtatttaagacagtcagaataatgatagtgtgtggtctccagaggtagtcagaatcctgctattgagttctttttatatcttccttttcaattttttattaccattttgtttgtttagactacactttgtagggattgaggggcaaattatctcttggagtggaattcctgtgttttgagccttacaaccaggaaatatgagctatactagatagcctcatgatagcatttacgataagaacttatctcgtgtgttcatgtaattttttgagtaggaactgttttatcttgaatattgtagctaactatatatagcagaactgcctcagtctttttaagaaggaaataaataatatatgtgtatgaatttatatatacatatacactcatagacaaacttaacagttggggtcattctaacagttaaaacaattgttccattgtttaaatctcagatcctggtaaaatgttcttaatttgtctgtgtacattttcctttcatggacagaccattggagtacattaattttcttaatctgccatttggcagttcatttaatataccattttttggcaacttggtaactaagaatcacagccaaaatttgttaacatcaaagaaagctctgccatataccccgttactaaattattatacatccagcagattctgggatgtactaacttagggttaactttgttgttgttgataatactagattgctccctctttaattcttcttctggtgcaaggttgctgcttaagttaccctgggaaatactactacaaggtcaaattttctagtatcttacagcctgattgaaggtgattcagatctttgctcaatataaatggattttccaagattctctgggccatccttgacccacaggtgatctcgctggagtatattaacttaacttcagtgccagttggtttggtgccatgagatccataatgaatccagaacttcaccattgcttagatataagagtcccttggaagaataatgccactgatgatgggggtcagaaggtgtattaactcaacatagagggcttttagatttttcttcaaaaaaatttcgagaaaagtattcttttaccctccaaacagttaacagctcttagtttctccaaatatgctctttgatttacttatttttaattaaagatggtaatttattgaacaatgaaatccgtaatatattgatttaaggacaaaagtgaagttttagaattataaaagtacttaaatattatatattttccatttcataattgttttcctttctctgtggctttaaagtttttgactattttacaatgttaatcactaggtaacttgccatatttctggttctatattaagttctatcctttataatgctgttattataaagctggtttttagcatttgtctgtagcaatagaaattttactaagtctctgttctcccagtaagttttttcttttctcagtaagtccctaagaaaacatttgtttgccactcttactattcccaatcttggattgttcgagctgaaaaaaaatttgatgagaaacaggaggatccttttctggtgaatataggttcctgctttaagaatgtggaaatccattgctttatataactaatatacacacagattaattaaaattgtgagaaataattcacacatgacaagtaggtaacatgcatgagttttgaatttttttaaaaacccaactgtttgacaaaatatagaacccaaattggtactttcttagaccagtgtaacctcacacctcagttttgcttttccaaccctgacttgaaaggcatatttgtatctttttattagtgatagtgaagctgtgacactaaccttttatacaaaagagtaaagaaagaaaaactacagcgattaagatgagaacagttctgcagttgttgaactagatcacagcattgtaggcagaataaaaaatgttcatatctgagaatattcctttcgccatcttttcccaaggccagacctcctggtggagcacagttaaaagtaacattctgggcctttgtaatcggagggctgtgtctccagctggcagcctttgttttaatatataatgcaggactgtggaaaacagttggcatagaatattttcacctaaaaaagaaagaaaagacatacaaaactggattaattgcaaaaagagaatacagtaaaataccatataactggacaaagctagaagaacctttagaagatttgtctgaaaacagatttcaagagtgagcttttatacactgctcactaatttgcttgattactaccaactcttcttaaagttaacacgtttaaggtatttctggacttcctagccttttagcaagcttagaggaactagccattagctagtgatgtaaaaatattttggggactgatgcccttaaaggttatgcccttgaaagttcttaccttttctctagtgatattaaggaacgagtgggtagtgttctcagggtgaccagctgccctaaagtgcctgggattgagggtttccctggatgcgggactttccctggatacaaaacttttagcagagttttgtatatatgtggatttttctgataagtagcacatcagaggccttaaccactgcccaaaagcgattctccattgagagtacatatcttgaacttaagaaattcatttgctctgatttttaatcttgtaaagtttttgctaaactcaaaacaagtcccaggcacaccagaaggagctgaccaccttaggtgttcttgtgatttatccttacttccctatgttgtcatagttgcttctaaactcagctgcactatggctgtcaacatttctgatacttattgggatatgtgccatccagtcatttagtactttgaatggaacatgagatttataacacaggtaatagctgaaggtaccagtatggtggtgagactcacacttagtgatccagctaaggtaactgatgttataatggaacagagaagaggccaactagatagctaagttcttctgaacctatgtgtatatgtaagtacaaatcatgcgtccttatggggttaaacttaatctgaaatttacatttttcatagtaaaaggaaaccaattgttgcagatttcttttcttgtgaggaaatacatggcctttgatgctctggcgtctactgcatttcccagtctgttctgctcgagaagccagaatgtgttgttaacatttttccgtgaatgttgtgttaaaatgattaaatgcatcagccaatggcaagtgaaggaattgggtgtcctgatgcagactgagcagtttctctcaattgtagcctcatactcataaggtgcttaccagctagaacattgagcacgtgaggtgagattttttttctctgatggcattaactttgtaatgcaatatgatggatgcagaccctgttcttgtttccctctggaagtccttagtggctgcatccttggtgcactgtgatggagatattaaatgtgttctttgtgagctttcgttctatgattgtcaaaagtacgatgtggttccttttttatttttattaaacaatgagctgaggctttattacagctggttttcaagttaaaattgttgaatactgatgtctttctcccacctacaccaaatattttagtctatttaaagtacaaaaaaagttctgcttaagaaaacattgcttacatgtcctgtgatttctggtcaatttttatatatatttgtgtgcatcatctgtatgtgctttcactttttaccttgtttgctcttacctgtgttaacagccctgtcaccgttgaaaggtggacagttttcctagcattaaaagaaagccatttgagttgtttaccatgttactatgggactaatttttaattgttttaatttttatttaaactgatctttttttatatgggattacattttggtgttcactccctaaattatatggaaaccaaaaaaagtgattgtatttcacatatggacatatgattttaagagtacatgtttttgtttttttaatttggtgttacataaaagattatcctatccccccgggagataaatttatactacttaatataaccccacaacaggcgcacaccacacactgcacagtgctatttatacatttttatttatttcagagtttgcctatgctacattagcgctctaatacataagatctatgctgtaaacaaaaacatcttcaaagttgaaatttgctgaaatatacttttaacaaaataacatttttaaggctccattgaaaaatactagataagatataatctcatataatcagtatgaataattttaaaaatgagaaatatttaggtcagccacacttcctttgtgccttgcaagaattcagttctgtggatgaatcagtactggttagcagactgttttctgcaaaccattttaaacatgctttagtatgcaacaaaaagggacctcaaatgctaaaatacactattttacgtggcattgaatagccttgggactggtgtagttttatcaacacttttttattaggaagaaacccaagaaaatttactgtaattgctaccacctgccactgtataaataatctaaaagggacttcccaacattgaacaacaacattgagggctgactcgagatccttctacattgtcacctcagcctggctttgcctgtcactgcttagcttgaagtagtgacactgttctgtatcaggagatttttataatggccctagcatccataattccacatgttcatcaaatggctgaagagtatgagagaagtattaaggtctatgtttgggctgtctccccacttggcatattctgtttttccctcttcaaaatagattgaaagcctcttagtgcaggaagcaggcatcagtatcaaactgatgtcatccaatgtaattattttaagctccaggtttgtctaagtttgggtgaagaatgttcaggaacatgtttgcaacatacagttatccagcttaccctttgacagattcacccttctcatcaaaatagtaagcccaacctaaaaattataagtttacaaataaaggaatagaaaaacccaaaaagctaatttacacataaaaattatcttttgctgcaataaataggtatggaaatatttgtagaattggtttaactgattttgtaaaacaaatgtcatgctattttgccatagtgagacatgcagtaattcttaaaatcacattaatagaaggcaagaacattgaatcagacttagcagataacagattcagtgataaatgaacaatagactaagcatacttaggaagctacatgagaacagaatgtattactgtgctcccgtccaaactgcatgactttattggttatagaataaatggaatttgagatgggga

SEQ ID NO: 3920 - DNA, 10444 bp, Homo sapiens
  source 1..10444: mol_type = genomic DNA
gccgggaggcggggcgggccgtaggcaaagggaggtggggaggcggtggccggcgactccccgcgccccgctcgccccccggcccttcccgcggtgctcggcctcgttcctttcctcctccgctccctccgtcttccatacccgccccgcgcggctttcggccggcgtgcctcgcgccctaacgggcggctggaggcgccaatcagcgggcggcagggtgccagccccggggctgcgccggcgaatcggcggggcccgcggcccagggtggcaggcgggtctacccgcgcggccgcggcggcggagaagcagctcgccagccagcagcccgccagccgccgggaggttcgatacaagaggctgttttcctagcgtggcttgctgcctttggtaagaacatgtcgtccatcttgccattcacgccgccagttgtgaagagactgctgggatggaagaagtcagctggtgggtctggaggagcaggcggaggagagcagaatgggcaggaagaaaagtggtgtgagaaagcagtgaaaagtctggtgaagaagctaaagaaaacaggacgattagatgagcttgagaaagccatcaccactcaaaactgtaatactaaatgtgttaccataccaaggtctcttgatggtcgtctccaggtatcccatcgaaaaggattgccacatgttatatattgccgattatggcgctggcctgatcttcacagtcatcatgaactcaaggcaattgaaaactgcgaatatgcttttaatcttaaaaaggatgaagtatgtgtaaacccttaccactatcagagagttgagacaccagttttgcctccagtattagtgccccgacacaccgagatcctaacagaacttccgcctctggatgactatactcactccattccagaaaacactaacttcccagcaggaattgagccacagagtaattatattccagaaacgccacctcctggatatatcagtgaagatggagaaacaagtgaccaacagttgaatcaaagtatggacacaggctctccagcagaactatctcctactactctttcccctgttaatcatagcttggatttacagccagttacttactcagaacctgcattttggtgttcgatagcatattatgaattaaatcagagggttggagaaaccttccatgcatcacagccctcactcactgtagatggctttacagacccatcaaattcagagaggttctgcttaggtttactctccaatgttaaccgaaatgccacggtagaaatgacaagaaggcatataggaagaggagtgcgcttatactacataggtggggaagtttttgctgagtgcctaagtgatagtgcaatctttgtgcagagccccaattgtaatcagagatatggctggcaccctgcaacagtgtgtaaaattccaccaggctgtaatctgaagatcttcaacaaccaggaatttgctgctcttctggctcagtctgttaatcagggttttgaagccgtctatcagctaactagaatgtgcaccataagaatgagttttgtgaaagggtggggagcagaataccgaaggcagacggtaacaagtactccttgctggattgaacttcatctgaatggacctctacagtggttggacaaagtattaactcagatgggatccccttcagtgcgttgctcaagcatgtcataaagcttcaccaatcaagtcccatgaaaagacttaatgtaacaactcttctgtcatagcattgtgtgtggtccctatggactgtttactatccaaaagttcaagagagaaaacagcacttgaggtctcatcaattaaagcaccttgtggaatctgtttcctatatttgaatattagatgggaaaattagtgtctagaaatactctcccattaaagaggaagagaagattttaaagacttaatgatgtcttattgggcataaaactgagtgtcccaaaggtttattaataacagtagtagttatgtgtacaggtaatgtatcatgatccagtatcacagtattgtgctgtttatatacatttttagtttgcatagatgaggtgtgtgtgtgcgctgcttcttgatctaggcaaacctttataaagttgcagtacctaatctgttattcccacttctctgttatttttgtgtgtcttttttaatatataatatatatcaagattttcaaattatttagaagcagattttcctgtagaaaaactaatttttctgccttttaccaaaaataaactcttgggggaagaaaagtggattaacttttgaaatccttgaccttaatgtgttcagtggggcttaaacagtcattctttttgtggttttttgtttttttttgtttttttttttaactgctaaatcttattataaggaaaccatactgaaaacctttccaagcctcttttttccattcccatttttgtcctcataatcaaaacagcataacatgacatcatcaccagtaatagttgcattgatactgctggcaccagttaattctgggatacagtaagaattcatatggagaaagtccctttgtcttatgcccaaatttcaacaggaataattggcttgtataatctagcagtctgttgatttatccttccacctcataaaaaatgcataggtggcagtataattattttcagggatatgctagaattacttccacatatttatccctttttaaaaaagctaatctataaataccgtttttccaaaggtattttacaatatttcaacagcagaccttctgctcttcgagtagtttgatttggtttagtaaccagattgcattatgaaatgggccttttgtaaatgtaattgtttctgcaaaatacctagaaaagtgatgctgaggtaggatcagcagatatgggccatctgtttttaaagtatgttgtattcagtttataaattgattgttattctacacataattatgaattcagaattttaaaaattgggggaaaagccatttatttagcaagttttttagcttataagttacctgcagtctgagctgttcttaactgatcctggttttgtgattgacaatatttcatgctctgtagtgagaggagatttccgaaactctgttgctagttcattctgcagcaaataattattatgtctgatgttgactcattgcagtttaaacatttcttcttgtttgcatcttagtagaaatggaaaataaccactcctggtcgtcttttcataaattttcatatttttgaagctgtctttggtacttgttctttgaaatcatatccacctgtctctataggtatcattttcaatactttcaacatttggtggttttctattgggtactccccattttcctatatttgtgtgtatatgtatgtgttcatgtaaatttggtatagtaattttttattcattcaacaaatatttattgttcacctgtttgtaccaggaacttttcttagtctttgggtaaaggtgaacaagacaactacagttcctgcctttgctgagacagcagttacactaacccttaattatcttacttgtctatgaaggagataaacagggtactgtactggagaataacagatgggatgcttcaggtaggacatcaaggaaagcctctaaggaaaggatgcatgagctaacacctgacattaaagaagcaagccaagtgaggagccaggggagataagcattcctggcaaagagaatagcatcaaatgcaaaaaggttcacactaaaggaaactcctgattaggtattaatgctttatacagaaacctctatacaaatccaaacttgaagatcagaatggttctacagttcataacattttgaaggtggccttattttgtgatagtctgcttcatgtgattctcactaacatatctccttcctcaacctttgctgtaaaaatttcatttgcaccacatcagtactacttaatttaacaagcttttgttgtgtaagctctcactgttttagtgccctgctgcttgcttccagactttgtgctgtccagtaattatgtcttccactacccatcttgtgagcagagtaaatgtcctaggtaataccactatcaggcctgtaggagatactcagtggagcctctgcccttctttttcttacttgagaacttgtaatggtgttagggaacagttgtaggggcagaaaacaactctgaaagtggtagaaggtcctgatcttggtggttactcttgcattactgtgttaggtcaagcagtgcctactatgctgtttcagtagtggagcgcatctctacagttctgatgcgatttttctgtacagtatgaaattgggactcaactctttgaaaacacctattgagcagttatacctgttgagcagtttacttcctggttgtaattacatttgtgtgaatgtgtttgatgctttttaacgagatgatgttttttgtattttatctactgtggcctgattttttttttgttttctgcccctccccccatttataggtgtggttttcatttttctaagtgatagaatcccctctttgttgaatttttgtctttatttaaattagcaacattacttaggatttattcttcacaatactgttaattttctaggaatgatgacctgagaaccgaatggccatgctttctatcacatttctaagatgagtaatattttttccagtaggttccacagagacaccttgggggctggcttaggggaggctgttggagttctcactgacttagtggcatatttattctgtactgaagaactgcatggggtttcttttggaaagagtttcattgctttaaaaagaagctcagaaagtctttataaccactggtcaacgattagaaaaatataactggatttaggcctaccttctggaataccgctgattgtgctctttttatcctactttaaagaagctttcatgattagatttgagctatatcagttataccgattataccttataatacacattcagttagtaaacatttattgatgcctgttgtttgcccagccactgtgatggatattgaataataaaaagatgactaggacggggccctgacccttgagctgtgcttggtcttgtagaggttgtgttttttttcctcaggacctgtcactttggcagaaggaaatctgcctaatttttcttgaaagctaaattttctttgtaagtttttacaaattgtttaatacctagttgtattttttaccttaagccacattgagttttgcttgatttgtctgtcttttaaacactgtcaaatgctttcccttttgttaaaattattttaatttcactttttttgtgcccttgtcaatttaagactaagactttgaaggtaaaacaaacaaacaaacatcagtcttagtctcttgctagttgaaatcaaataaaagaaaatatatacccagttggtttctctacctcttaaaagcttcccatatatacctttaagatccttctcttttttctttaactactaaataggttcagcatttattcagtgttagataccctcttcgtctgagggtggcgtaggtttatgttgggatataaagtaacacaagacaatcttcactgtacataaaatatgtcttcatgtacagtctttactttaaaagctgaacattccaatttgcgccttccctcccaagcccctgcccaccaagtatctctttagatatctagtctgtggacatgaacaatgaatacttttttcttactctgatcgaaggcattgatacttagacatatcaaacatttcttcctttcatatgctttactttgctaaatctattatattcattgcctgaattttattcttcctttctacctgacaacacacatccaggtggtacttgctggttatcctctttcttgttagccttgttttttgttttttttttttttttttgagagggagtctcgctctgttgcccaacctggagtgcagtggtgcgatcttggttcactgcaagctccgcctcccgggttcacgccatgcttctgcctcagcctcccaagtagctgggactacaggcgcccaccaccacactcggctaattttttgtatttttagtagagacggggtttcaccgtgttggccaggatggtctcgatctcctgacctcgtgatctgtccacctcggcttcccaaagtgctgggattacaggcatgagccaccgcgcccagcctagccatatttttatctgcatatatcagaatgtttctctcctttgaacttattaacaaaaaaggaacatgcttttcatacctagagtcctaatttcttcatcatgaaggttgctattcaaattgatcaatcattttaattttacaaatggctcaaaaattctgttcagtaaatgtctttgtgactggcaaatggcataaattatgtttaagattatgaacttttctgacagttgcagccaatgttttccctacgataccagatttccatcttggggcatattggattgttgtatttaagacagtcagaataatgatagtgtgtggtctccagaggtagtcagaatcctgctattgagttctttttatatcttccttttcaattttttattaccattttgtttgtttagactacactttgtagggattgaggggcaaattatctcttggagtggaattcctgtgttttgagccttacaaccaggaaatatgagctatactagatagcctcatgatagcatttacgataagaacttatctcgtgtgttcatgtaattttttgagtaggaactgttttatcttgaatattgtagctaactatatatagcagaactgcctcagtctttttaagaaggaaataaataatatatgtgtatgaatttatatatacatatacactcatagacaaacttaacagttggggtcattctaacagttaaaacaattgttccattgtttaaatctcagatcctggtaaaatgttcttaatttgtctgtgtacattttcctttcatggacagaccattggagtacattaattttcttaatctgccatttggcagttcatttaatataccattttttggcaacttggtaactaagaatcacagccaaaatttgttaacatcaaagaaagctctgccatataccccgttactaaattattatacatccagcagattctgggatgtactaacttagggttaactttgttgttgttgataatactagattgctccctctttaattcttcttctggtgcaaggttgctgcttaagttaccctgggaaatactactacaaggtcaaattttctagtatcttacagcctgattgaaggtgattcagatctttgctcaatataaatggattttccaagattctctgggccatccttgacccacaggtgatctcgctggagtatattaacttaacttcagtgccagttggtttggtgccatgagatccataatgaatccagaacttcaccattgcttagatataagagtcccttggaagaataatgccactgatgatgggggtcagaaggtgtattaactcaacatagagggcttttagatttttcttcaaaaaaatttcgagaaaagtattcttttaccctccaaacagttaacagctcttagtttctccaaatatgctctttgatttacttatttttaattaaagatggtaatttattgaacaatgaaatccgtaatatattgatttaaggacaaaagtgaagttttagaattataaaagtacttaaatattatatattttccatttcataattgttttcctttctctgtggctttaaagtttttgactattttacaatgttaatcactaggtaacttgccatatttctggttctatattaagttctatcctttataatgctgttattataaagctggtttttagcatttgtctgtagcaatagaaattttactaagtctctgttctcccagtaagttttttcttttctcagtaagtccctaagaaaacatttgtttgccactcttactattcccaatcttggattgttcgagctgaaaaaaaatttgatgagaaacaggaggatccttttctggtgaatataggttcctgctttaagaatgtggaaatccattgctttatataactaatatacacacagattaattaaaattgtgagaaataattcacacatgacaagtaggtaacatgcatgagttttgaatttttttaaaaacccaactgtttgacaaaatatagaacccaaattggtactttcttagaccagtgtaacctcacacctcagttttgcttttccaaccctgacttgaaaggcatatttgtatctttttattagtgatagtgaagctgtgacactaaccttttatacaaaagagtaaagaaagaaaaactacagcgattaagatgagaacagttctgcagttgttgaactagatcacagcattgtaggcagaataaaaaatgttcatatctgagaatattcctttcgccatcttttcccaaggccagacctcctggtggagcacagttaaaagtaacattctgggcctttgtaatcggagggctgtgtctccagctggcagcctttgttttaatatataatgcaggactgtggaaaacagttggcatagaatattttcacctaaaaaagaaagaaaagacatacaaaactggattaattgcaaaaagagaatacagtaaaataccatataactggacaaagctagaagaacctttagaagatttgtctgaaaacagatttcaagagtgagcttttatacactgctcactaatttgcttgattactaccaactcttcttaaagttaacacgtttaaggtatttctggacttcctagccttttagcaagcttagaggaactagccattagctagtgatgtaaaaatattttggggactgatgcccttaaaggttatgcccttgaaagttcttaccttttctctagtgatattaaggaacgagtgggtagtgttctcagggtgaccagctgccctaaagtgcctgggattgagggtttccctggatgcgggactttccctggatacaaaacttttagcagagttttgtatatatgtggatttttctgataagtagcacatcagaggccttaaccactgcccaaaagcgattctccattgagagtacatatcttgaacttaagaaattcatttgctctgatttttaatcttgtaaagtttttgctaaactcaaaacaagtcccaggcacaccagaaggagctgaccaccttaggtgttcttgtgatttatccttacttccctatgttgtcatagttgcttctaaactcagctgcactatggctgtcaacatttctgatacttattgggatatgtgccatccagtcatttagtactttgaatggaacatgagatttataacacaggtaatagctgaaggtaccagtatggtggtgagactcacacttagtgatccagctaaggtaactgatgttataatggaacagagaagaggccaactagatagctaagttcttctgaacctatgtgtatatgtaagtacaaatcatgcgtccttatggggttaaacttaatctgaaatttacatttttcatagtaaaaggaaaccaattgttgcagatttcttttcttgtgaggaaatacatggcctttgatgctctggcgtctactgcatttcccagtctgttctgctcgagaagccagaatgtgttgttaacatttttccgtgaatgttgtgttaaaatgattaaatgcatcagccaatggcaagtgaaggaattgggtgtcctgatgcagactgagcagtttctctcaattgtagcctcatactcataaggtgcttaccagctagaacattgagcacgtgaggtgagattttttttctctgatggcattaactttgtaatgcaatatgatggatgcagaccctgttcttgtttccctctggaagtccttagtggctgcatccttggtgcactgtgatggagatattaaatgtgttctttgtgagctttcgttctatgattgtcaaaagtacgatgtggttccttttttatttttattaaacaatgagctgaggctttattacagctggttttcaagttaaaattgttgaatactgatgtctttctcccacctacaccaaatattttagtctatttaaagtacaaaaaaagttctgcttaagaaaacattgcttacatgtcctgtgatttctggtcaatttttatatatatttgtgtgcatcatctgtatgtgctttcactttttaccttgtttgctcttacctgtgttaacagccctgtcaccgttgaaaggtggacagttttcctagcattaaaagaaagccatttgagttgtttaccatgtta

SEQ ID NO: 3921 - DNA, 10531 bp, Homo sapiens
  source 1..10531: mol_type = genomic DNA
gggaggcggggcgggccgtaggcaaagggaggtggggaggcggtggccggcgactccccgcgccccgctcgccccccggcccttcccgcggtgctcggcctcgttcctttcctcctccgctccctccgtcttccatacccgccccgcgcggctttcggccggcgtgcctcgcgccctaacgggcggctggaggcgccaatcagcgggcggcagggtgccagccccggggctgcgccggcgaatcggcggggcccgcggcccagggtggcaggcgggtctacccgcgcggccgcggcggcggagaagcagctcgccagccagcagcccgccagccgccgggaggttcgatacaagaggctgttttcctagcgtggcttgctgcctttggtaagaacatgtcgtccatcttgccattcacgccgccagttgtgaagagactgctgggatggaagaagtcagctggtgggtctggaggagcaggcggaggagagcagaatgggcaggaagaaaagtggtgtgagaaagcagtgaaaagtctggtgaagaagctaaagaaaacaggacgattagatgagcttgagaaagccatcaccactcaaaactgtaatactaaatgtgttaccataccaagcacttgctctgaaatttggggactgagtacaccaaatacgatagatcagtgggatacaacaggcctttacagcttctctgaacaaaccaggtctcttgatggtcgtctccaggtatcccatcgaaaaggattgccacatgttatatattgccgattatggcgctggcctgatcttcacagtcatcatgaactcaaggcaattgaaaactgcgaatatgcttttaatcttaaaaaggatgaagtatgtgtaaacccttaccactatcagagagttgagacaccagttttgcctccagtattagtgccccgacacaccgagatcctaacagaacttccgcctctggatgactatactcactccattccagaaaacactaacttcccagcaggaattgagccacagagtaattatattccagaaacgccacctcctggatatatcagtgaagatggagaaacaagtgaccaacagttgaatcaaagtatggacacaggctctccagcagaactatctcctactactctttcccctgttaatcatagcttggatttacagccagttacttactcagaacctgcattttggtgttcgatagcatattatgaattaaatcagagggttggagaaaccttccatgcatcacagccctcactcactgtagatggctttacagacccatcaaattcagagaggttctgcttaggtttactctccaatgttaaccgaaatgccacggtagaaatgacaagaaggcatataggaagaggagtgcgcttatactacataggtggggaagtttttgctgagtgcctaagtgatagtgcaatctttgtgcagagccccaattgtaatcagagatatggctggcaccctgcaacagtgtgtaaaattccaccaggctgtaatctgaagatcttcaacaaccaggaatttgctgctcttctggctcagtctgttaatcagggttttgaagccgtctatcagctaactagaatgtgcaccataagaatgagttttgtgaaagggtggggagcagaataccgaaggcagacggtaacaagtactccttgctggattgaacttcatctgaatggacctctacagtggttggacaaagtattaactcagatgggatccccttcagtgcgttgctcaagcatgtcataaagcttcaccaatcaagtcccatgaaaagacttaatgtaacaactcttctgtcatagcattgtgtgtggtccctatggactgtttactatccaaaagttcaagagagaaaacagcacttgaggtctcatcaattaaagcaccttgtggaatctgtttcctatatttgaatattagatgggaaaattagtgtctagaaatactctcccattaaagaggaagagaagattttaaagacttaatgatgtcttattgggcataaaactgagtgtcccaaaggtttattaataacagtagtagttatgtgtacaggtaatgtatcatgatccagtatcacagtattgtgctgtttatatacatttttagtttgcatagatgaggtgtgtgtgtgcgctgcttcttgatctaggcaaacctttataaagttgcagtacctaatctgttattcccacttctctgttatttttgtgtgtcttttttaatatataatatatatcaagattttcaaattatttagaagcagattttcctgtagaaaaactaatttttctgccttttaccaaaaataaactcttgggggaagaaaagtggattaacttttgaaatccttgaccttaatgtgttcagtggggcttaaacagtcattctttttgtggttttttgtttttttttgtttttttttttaactgctaaatcttattataaggaaaccatactgaaaacctttccaagcctcttttttccattcccatttttgtcctcataatcaaaacagcataacatgacatcatcaccagtaatagttgcattgatactgctggcaccagttaattctgggatacagtaagaattcatatggagaaagtccctttgtcttatgcccaaatttcaacaggaataattggcttgtataatctagcagtctgttgatttatccttccacctcataaaaaatgcataggtggcagtataattattttcagggatatgctagaattacttccacatatttatccctttttaaaaaagctaatctataaataccgtttttccaaaggtattttacaatatttcaacagcagaccttctgctcttcgagtagtttgatttggtttagtaaccagattgcattatgaaatgggccttttgtaaatgtaattgtttctgcaaaatacctagaaaagtgatgctgaggtaggatcagcagatatgggccatctgtttttaaagtatgttgtattcagtttataaattgattgttattctacacataattatgaattcagaattttaaaaattgggggaaaagccatttatttagcaagttttttagcttataagttacctgcagtctgagctgttcttaactgatcctggttttgtgattgacaatatttcatgctctgtagtgagaggagatttccgaaactctgttgctagttcattctgcagcaaataattattatgtctgatgttgactcattgcagtttaaacatttcttcttgtttgcatcttagtagaaatggaaaataaccactcctggtcgtcttttcataaattttcatatttttgaagctgtctttggtacttgttctttgaaatcatatccacctgtctctataggtatcattttcaatactttcaacatttggtggttttctattgggtactccccattttcctatatttgtgtgtatatgtatgtgttcatgtaaatttggtatagtaattttttattcattcaacaaatatttattgttcacctgtttgtaccaggaacttttcttagtctttgggtaaaggtgaacaagacaactacagttcctgcctttgctgagacagcagttacactaacccttaattatcttacttgtctatgaaggagataaacagggtactgtactggagaataacagatgggatgcttcaggtaggacatcaaggaaagcctctaaggaaaggatgcatgagctaacacctgacattaaagaagcaagccaagtgaggagccaggggagataagcattcctggcaaagagaatagcatcaaatgcaaaaaggttcacactaaaggaaactcctgattaggtattaatgctttatacagaaacctctatacaaatccaaacttgaagatcagaatggttctacagttcataacattttgaaggtggccttattttgtgatagtctgcttcatgtgattctcactaacatatctccttcctcaacctttgctgtaaaaatttcatttgcaccacatcagtactacttaatttaacaagcttttgttgtgtaagctctcactgttttagtgccctgctgcttgcttccagactttgtgctgtccagtaattatgtcttccactacccatcttgtgagcagagtaaatgtcctaggtaataccactatcaggcctgtaggagatactcagtggagcctctgcccttctttttcttacttgagaacttgtaatggtgttagggaacagttgtaggggcagaaaacaactctgaaagtggtagaaggtcctgatcttggtggttactcttgcattactgtgttaggtcaagcagtgcctactatgctgtttcagtagtggagcgcatctctacagttctgatgcgatttttctgtacagtatgaaattgggactcaactctttgaaaacacctattgagcagttatacctgttgagcagtttacttcctggttgtaattacatttgtgtgaatgtgtttgatgctttttaacgagatgatgttttttgtattttatctactgtggcctgattttttttttgttttctgcccctccccccatttataggtgtggttttcatttttctaagtgatagaatcccctctttgttgaatttttgtctttatttaaattagcaacattacttaggatttattcttcacaatactgttaattttctaggaatgatgacctgagaaccgaatggccatgctttctatcacatttctaagatgagtaatattttttccagtaggttccacagagacaccttgggggctggcttaggggaggctgttggagttctcactgacttagtggcatatttattctgtactgaagaactgcatggggtttcttttggaaagagtttcattgctttaaaaagaagctcagaaagtctttataaccactggtcaacgattagaaaaatataactggatttaggcctaccttctggaataccgctgattgtgctctttttatcctactttaaagaagctttcatgattagatttgagctatatcagttataccgattataccttataatacacattcagttagtaaacatttattgatgcctgttgtttgcccagccactgtgatggatattgaataataaaaagatgactaggacggggccctgacccttgagctgtgcttggtcttgtagaggttgtgttttttttcctcaggacctgtcactttggcagaaggaaatctgcctaatttttcttgaaagctaaattttctttgtaagtttttacaaattgtttaatacctagttgtattttttaccttaagccacattgagttttgcttgatttgtctgtcttttaaacactgtcaaatgctttcccttttgttaaaattattttaatttcactttttttgtgcccttgtcaatttaagactaagactttgaaggtaaaacaaacaaacaaacatcagtcttagtctcttgctagttgaaatcaaataaaagaaaatatatacccagttggtttctctacctcttaaaagcttcccatatatacctttaagatccttctcttttttctttaactactaaataggttcagcatttattcagtgttagataccctcttcgtctgagggtggcgtaggtttatgttgggatataaagtaacacaagacaatcttcactgtacataaaatatgtcttcatgtacagtctttactttaaaagctgaacattccaatttgcgccttccctcccaagcccctgcccaccaagtatctctttagatatctagtctgtggacatgaacaatgaatacttttttcttactctgatcgaaggcattgatacttagacatatcaaacatttcttcctttcatatgctttactttgctaaatctattatattcattgcctgaattttattcttcctttctacctgacaacacacatccaggtggtacttgctggttatcctctttcttgttagccttgttttttgttttttttttttttttttgagagggagtctcgctctgttgcccaacctggagtgcagtggtgcgatcttggttcactgcaagctccgcctcccgggttcacgccatgcttctgcctcagcctcccaagtagctgggactacaggcgcccaccaccacactcggctaattttttgtatttttagtagagacggggtttcaccgtgttggccaggatggtctcgatctcctgacctcgtgatctgtccacctcggcttcccaaagtgctgggattacaggcatgagccaccgcgcccagcctagccatatttttatctgcatatatcagaatgtttctctcctttgaacttattaacaaaaaaggaacatgcttttcatacctagagtcctaatttcttcatcatgaaggttgctattcaaattgatcaatcattttaattttacaaatggctcaaaaattctgttcagtaaatgtctttgtgactggcaaatggcataaattatgtttaagattatgaacttttctgacagttgcagccaatgttttccctacgataccagatttccatcttggggcatattggattgttgtatttaagacagtcagaataatgatagtgtgtggtctccagaggtagtcagaatcctgctattgagttctttttatatcttccttttcaattttttattaccattttgtttgtttagactacactttgtagggattgaggggcaaattatctcttggagtggaattcctgtgttttgagccttacaaccaggaaatatgagctatactagatagcctcatgatagcatttacgataagaacttatctcgtgtgttcatgtaattttttgagtaggaactgttttatcttgaatattgtagctaactatatatagcagaactgcctcagtctttttaagaaggaaataaataatatatgtgtatgaatttatatatacatatacactcatagacaaacttaacagttggggtcattctaacagttaaaacaattgttccattgtttaaatctcagatcctggtaaaatgttcttaatttgtctgtgtacattttcctttcatggacagaccattggagtacattaattttcttaatctgccatttggcagttcatttaatataccattttttggcaacttggtaactaagaatcacagccaaaatttgttaacatcaaagaaagctctgccatataccccgttactaaattattatacatccagcagattctgggatgtactaacttagggttaactttgttgttgttgataatactagattgctccctctttaattcttcttctggtgcaaggttgctgcttaagttaccctgggaaatactactacaaggtcaaattttctagtatcttacagcctgattgaaggtgattcagatctttgctcaatataaatggattttccaagattctctgggccatccttgacccacaggtgatctcgctggagtatattaacttaacttcagtgccagttggtttggtgccatgagatccataatgaatccagaacttcaccattgcttagatataagagtcccttggaagaataatgccactgatgatgggggtcagaaggtgtattaactcaacatagagggcttttagatttttcttcaaaaaaatttcgagaaaagtattcttttaccctccaaacagttaacagctcttagtttctccaaatatgctctttgatttacttatttttaattaaagatggtaatttattgaacaatgaaatccgtaatatattgatttaaggacaaaagtgaagttttagaattataaaagtacttaaatattatatattttccatttcataattgttttcctttctctgtggctttaaagtttttgactattttacaatgttaatcactaggtaacttgccatatttctggttctatattaagttctatcctttataatgctgttattataaagctggtttttagcatttgtctgtagcaatagaaattttactaagtctctgttctcccagtaagttttttcttttctcagtaagtccctaagaaaacatttgtttgccactcttactattcccaatcttggattgttcgagctgaaaaaaaatttgatgagaaacaggaggatccttttctggtgaatataggttcctgctttaagaatgtggaaatccattgctttatataactaatatacacacagattaattaaaattgtgagaaataattcacacatgacaagtaggtaacatgcatgagttttgaatttttttaaaaacccaactgtttgacaaaatatagaacccaaattggtactttcttagaccagtgtaacctcacacctcagttttgcttttccaaccctgacttgaaaggcatatttgtatctttttattagtgatagtgaagctgtgacactaaccttttatacaaaagagtaaagaaagaaaaactacagcgattaagatgagaacagttctgcagttgttgaactagatcacagcattgtaggcagaataaaaaatgttcatatctgagaatattcctttcgccatcttttcccaaggccagacctcctggtggagcacagttaaaagtaacattctgggcctttgtaatcggagggctgtgtctccagctggcagcctttgttttaatatataatgcaggactgtggaaaacagttggcatagaatattttcacctaaaaaagaaagaaaagacatacaaaactggattaattgcaaaaagagaatacagtaaaataccatataactggacaaagctagaagaacctttagaagatttgtctgaaaacagatttcaagagtgagcttttatacactgctcactaatttgcttgattactaccaactcttcttaaagttaacacgtttaaggtatttctggacttcctagccttttagcaagcttagaggaactagccattagctagtgatgtaaaaatattttggggactgatgcccttaaaggttatgcccttgaaagttcttaccttttctctagtgatattaaggaacgagtgggtagtgttctcagggtgaccagctgccctaaagtgcctgggattgagggtttccctggatgcgggactttccctggatacaaaacttttagcagagttttgtatatatgtggatttttctgataagtagcacatcagaggccttaaccactgcccaaaagcgattctccattgagagtacatatcttgaacttaagaaattcatttgctctgatttttaatcttgtaaagtttttgctaaactcaaaacaagtcccaggcacaccagaaggagctgaccaccttaggtgttcttgtgatttatccttacttccctatgttgtcatagttgcttctaaactcagctgcactatggctgtcaacatttctgatacttattgggatatgtgccatccagtcatttagtactttgaatggaacatgagatttataacacaggtaatagctgaaggtaccagtatggtggtgagactcacacttagtgatccagctaaggtaactgatgttataatggaacagagaagaggccaactagatagctaagttcttctgaacctatgtgtatatgtaagtacaaatcatgcgtccttatggggttaaacttaatctgaaatttacatttttcatagtaaaaggaaaccaattgttgcagatttcttttcttgtgaggaaatacatggcctttgatgctctggcgtctactgcatttcccagtctgttctgctcgagaagccagaatgtgttgttaacatttttccgtgaatgttgtgttaaaatgattaaatgcatcagccaatggcaagtgaaggaattgggtgtcctgatgcagactgagcagtttctctcaattgtagcctcatactcataaggtgcttaccagctagaacattgagcacgtgaggtgagattttttttctctgatggcattaactttgtaatgcaatatgatggatgcagaccctgttcttgtttccctctggaagtccttagtggctgcatccttggtgcactgtgatggagatattaaatgtgttctttgtgagctttcgttctatgattgtcaaaagtacgatgtggttccttttttatttttattaaacaatgagctgaggctttattacagctggttttcaagttaaaattgttgaatactgatgtctttctcccacctacaccaaatattttagtctatttaaagtacaaaaaaagttctgcttaagaaaacattgcttacatgtcctgtgatttctggtcaatttttatatatatttgtgtgcatcatctgtatgtgctttcactttttaccttgtttgctcttacctgtgttaacagccctgtcaccgttgaaaggtggacagttttcctagcattaaaagaaagccatttgagttgtttaccatgtta

SEQ ID NO: 3922 - DNA, 6247 bp, Homo sapiens
  source 1..6247: mol_type = genomic DNA
acttggagtctcgcggccgccgcctccgccccgcgttcggggccttcccgaccctgcactgctgccgtccgcccgcccggccgctcttctcttcgccgtgggagccgctccgggcgcagggccgcgcgccgagccccgcaggctgcagcgccgcggcccggcccggcgccccggcaacttcgccgagagttgaggcgaagtttgggcgaccgcggcaggccccggccgagctcccctctgcgcccccggcgtcccgtcgagcccagccccgccgggggcgctcctcgccgcccgcgcgccctccccagccatgtcgtccatcctgcctttcactcccccgatcgtgaagcgcctgctgggctggaagaagggcgagcagaacgggcaggaggagaaatggtgcgagaaggcggtcaagagcctggtcaagaaactcaagaagacggggcagctggacgagctggagaaggccatcaccacgcagaacgtcaacaccaagtgcatcaccatccccaggtccctggatggccggttgcaggtgtcccatcggaaggggctccctcatgtcatctactgccgcctgtggcgatggccagacctgcacagccaccacgagctacgggccatggagctgtgtgagttcgccttcaatatgaagaaggacgaggtctgcgtgaatccctaccactaccagagagtagagacaccagttctacctcctgtgttggtgccacgccacacagagatcccggccgagttccccccactggacgactacagccattccatccccgaaaacactaacttccccgcaggcatcgagccccagagcaatattccagagaccccaccccctggctacctgagtgaagatggagaaaccagtgaccaccagatgaaccacagcatggacgcaggttctccaaacctatccccgaatccgatgtccccagcacataataacttggacctgcagccagttacctactgcgagccggccttctggtgctccatctcctactacgagctgaaccagcgcgtcggggagacattccacgcctcgcagccatccatgactgtggatggcttcaccgacccctccaattcggagcgcttctgcctagggctgctctccaatgtcaacaggaatgcagcagtggagctgacacggagacacatcggaagaggcgtgcggctctactacatcggaggggaggtcttcgcagagtgcctcagtgacagcgctatttttgtccagtctcccaactgtaaccagcgctatggctggcacccggccaccgtctgcaagatcccaccaggatgcaacctgaagatcttcaacaaccaggagttcgctgccctcctggcccagtcggtcaaccagggctttgaggctgtctaccagttgacccgaatgtgcaccatccgcatgagcttcgtcaaaggctggggagcggagtacaggagacagactgtgaccagtaccccctgctggattgagctgcacctgaatgggcctttgcagtggcttgacaaggtcctcacccagatgggctccccaagcatccgctgttccagtgtgtcttagagacatcaagtatggtaggggagggcaggcttggggaaaatggccatgcaggaggtggagaaaattggaactctactcaacccattgttgtcaaggaagaagaaatctttctccctcaactgaaggggtgcacccacctgttttctgaaacacacgagcaaacccagaggtggatgttatgaacagctgtgtctgccaaacacatttaccctttggccccactttgaagggcaagaaatggcgtctgctctggtggcttaagtgagcagaacaggtagtattacaccaccggccccctccccccagactctttttttgagtgacagctttctgggatgtcacagtccaaccagaaacacccctctgtctaggactgcagtgtggagttcaccttggaagggcgttctaggtaggaagagcccgcagggccatgcagacctcatgcccagctctctgacgcttgtgacagtgcctcttccagtgaacattcccagcccagccccgccccgccccgccccaccactccagcagaccttgccccttgtgagctggatagacttgggatggggagggagggagttttgtctgtctccctcccctctcagaacatactgattgggaggtgcgtgttcagcagaacctgcacacaggacagcgggaaaaatcgatgagcgccacctctttaaaaactcacttacgtttgtcctttttcactttgaaaagttggaaggatctgctgaggcccagtgcatatgcaatgtatagtgtctattatcacattaatctcaaagagattcgaatgacggtaagtgttctcatgaagcaggaggcccttgtcgtgggatggcatttggtctcaggcagcaccacactgggtgcgtctccagtcatctgtaagagcttgctccagattctgatgcatacggctatattggtttatgtagtcagttgcattcattaaatcaactttatcatatgctcttttaaatgtttggtttatatattttctttaaaaatcctgggctggcacattgactgggaaacctgagtgagacccagcaactgcttctctcccttctctctcctgaggtgaagcttttccaggttttgttgaagagatacctgccagcacttctgcaagctgaaatttacagaagcaaattcaccagaagggaaacatctcaggccaacataggcaaatgaaaagggctattaaaatatttttacacctttgaaaattgcaggcttggtacaaagaggtctgtcatcttccccctgggatataagatgatctagctcccggtagaggatcaccggtgacaactatagcagttgtattgtgtaacaagtactgctcccagcagcaattagggagaaaactagtctaaattatttcaactggaaaaaagaaaaaagagtcctcttcttttcccagccttttgcagaacacagtagacagaactgccaccttcaattggtactttattctttgctgctgtttttgtataaaatgacctatcccacgtttttgcatgaatttatagcaggaaaaatcaagggatttcctatggaagtcctgctttattccaggtgaagggaaggaagtgtatatacttttggcaagtcatacagctcaaatgtgatgagatttctgatgttagagggagatggagaggcttcctgatgcctcatctgcagggtcctgtgcctctgaagttctagccatgaggtttccaggtaggacagctgctccccaagcctcctgaggacacaggaagagacggaaggagcaccttgacagacttgtgtgagtcttctcgaaggagggttgactcagaacccagagacaatacaaaacccctcacttcctctgagagggccaaatgctgtgagtctgaagtatgtgcctggtgtgaaatgatctatggcctgtttcttacacaggaagccccctgaacctcctgtacatgtgttcatgttcccagccagctctgagacccaggaaccaaatattccattttggcttctgctagagcagtcatggttcctctcctaaaagccatgggcagcagtttccgagggcctgcatgatccacctgctgcacgatcctatgagggcttcctgtggcacacagccctctgggtgcttgggaactagcttcaggcacagcctgattctggtgatccagtgatctatggaagtcgtgtcttactccaggtgaagggggaaaaaaaaagcctatactttggcaggttatgaactttgaatgtgatgaaatgacacgtttggctgcatttggatggtgtcttagaaccctcattgctcagacctgaaggctacttctaggagcatgaagtttgagttttgtgtttttccaaaggatacttccttggccctttttctttattgactagaccaccagaggaggatgtgtgggattgtaggcaaacccacctgtggcatcactgaaaataaatttgatcatacctaagaggttaggaaatggtgccattcccaccttagagtgctacataggtgctttgggcgtatgtaacattagtgtccttccttgaagccacaagctagttttcttagttttaaaatcctgttgtatgaatggcatttgtatattaaaacacttttttaaaggacagttgaaaagggcaagaggaaaccagggcagttctagaggagtgctggtgactggatagcagttttaagtggcgttcacctagtcaacacgaccgcgtgtgttgcccctgccctgggctccccgccatgacatcttcaccttgcagcttgtgctgagactgacccaagtgcagctagcactgggacacagatccttgtcttcagcaccttccaaggagccaacttttattccctttcctctctcccctccccacctcgcttcttcccaatttagtaacttagatgcttccagcacatacgtaggtagctaccccagccggtttggattacaggcctgtgctggaacatcatctcagttggccaccttcctggcaggctgtagacctgacattttgagacaagcctagaggagtcaggagcagggactttgactcttaggaagagcacacatgagggcaaggctgctggcagacgtctccattgtccttatgttgtctgtgttgtatttttttttttttattgaccatggtgattatttttttaaaccatcgttaatatactgaagtgagctatagcacatatcatgtgcttagtttgtttatttttctccatctccccttggcttcctagagtttggacatattccaggctaaatgcttttactcaagactacagaaaggtttgaagtagtgtgtgcatggcatgcacgtatgtaagtaatctggggaagaagcaaagatctgtttcattcttagcctcaggcctcatgagggtctccacagggccggagctcaggttacaccactccttcgtccttacaggagatgtagggagaagaatctgcaggctgcttgtaggactgttcaccaagggggataccagcagcaagagagtgcacccgtttagccctggaccctgtttcttactgtgtgacttggctagagttgggagttcccccaaaataaacgtgtccccattttaccagaaccaaacctcaacacagcgaagctgtactgtctttgtgtggcaaagatgttcccttgtaggcccctttcaggtaaccgtcttcacaatgtattttcatcacagtttaaggagcatcagccgcttctcaagtgggtagggaaagcagaaaaacgtacgcaagaggacatggatccaaaatgatgatgaagcatctcccatggggaggtgatggtggggagatgatgggctaaacaggcaacttttcaaaaacacagctatcatagaaaagaaacttgcctcatgtaaactggattgagaaattctcagtgattctgcaatggatttttttttaatgcagaagtaatgtatactctagtattctggtgtttttatatttatgtaataatttcttaaaaccattcagacagataactatttaattttttttaagaaagttggaaaggtctctcctcccaaggacagtggctggaagagttggggcacagccagttctgaatgttggtggagggtgtagtggctttttggctcagcatccagaaacaccaaaccaggctggctaaacaagtggccgcgtgtaaaaacagacagctctgagtcaaatctgggcccttccacaagggtcctctgaaccaagccccactcccttgctaggggtgaaagcattacagagagatggagccatctatccaagaagccttcactcaccttcactgctgctgttgcaactcggctgttctggactctgatgtgtgtggagggatggggaatagaacattgactgtgttgattaccttcactattcggccagcctgaccttttaataactttgtaaaaagcatgtatgtatttatagtgttttagatttttctaacttttatatcttaaaagcagagcacctgtttaagcattgtacccctattgttaaagatttgtgtcctctcattccctctcttcctcttgtaagtgcccttctaataaacttttcatggaaaagctcctgtgccaggagctcagtctga

SEQ ID NO: 3923 - DNA, 1530 bp, Homo sapiens
  source 1..1530: mol_type = genomic DNA
ccctgtgacctcccaacttcacaaacatgtcttgcctgcaccctaggcaaacgtggaaaggcgcagctctggtacaccggaaagcatggtggatggggaggtccctggatggccggttgcaggtgtcccatcggaaggggctccctcatgtcatctactgccgcctgtggcgatggccagacctgcacagccaccacgagctacgggccatggagctgtgtgagttcgccttcaatatgaagaaggacgaggtctgcgtgaatccctaccactaccagagagtagagacaccagttctacctcctgtgttggtgccacgccacacagagatcccggccgagttccccccactggacgactacagccattccatccccgaaaacactaacttccccgcaggcatcgagccccagagcaatattccagagaccccaccccctggctacctgagtgaagatggagaaaccagtgaccaccagatgaaccacagcatggacgcaggttctccaaacctatccccgaatccgatgtccccagcacataataacttggacctgcagccagttacctactgcgagccggccttctggtgctccatctcctactacgagctgaaccagcgcgtcggggagacattccacgcctcgcagccatccatgactgtggatggcttcaccgacccctccaattcggagcgcttctgcctagggctgctctccaatgtcaacaggaatgcagcagtggagctgacacggagacacatcggaagaggcgtgcggctctactacatcggaggggaggtcttcgcagagtgcctcagtgacagcgctatttttgtccagtctcccaactgtaaccagcgctatggctggcacccggccaccgtctgcaagatcccaccaggatgcaacctgaagatcttcaacaaccaggagttcgctgccctcctggcccagtcggtcaaccagggctttgaggctgtctaccagttgacccgaatgtgcaccatccgcatgagcttcgtcaaaggctggggagcggagtacaggagacagactgtgaccagtaccccctgctggattgagctgcacctgaatgggcctttgcagtggcttgacaaggtcctcacccagatgggctccccaagcatccgctgttccagtgtgtcttagagacatcaagtatggtaggggagggcaggcttggggaaaatggccatgcaggaggtggagaaaattggaactctactcaacccattgttgtcaaggaagaagaaatctttctccctcaactgaaggggtgcacccacctgttttctgaaacacacgagcaaacccagaggtggatgttatgaacagctgtgtctgccaaacacatttaccctttggccccactttgaagggcaagaaatggcgtctgctctggtggcttaagtgagcagaacaggtagtattacaccaccggccccctccccccagactctttttttgagtgacagctttctgggatgtcacagtccaaccagaaaca

SEQ ID NO: 3924 - DNA, 1518 bp, Homo sapiens
  source 1..1518: mol_type = genomic DNA
acttggagtctcgcggccgccgcctccgccccgcgttcggggccttcccgaccctgcactgctgccgtccgcccgcccggccgctcttctcttcgccgagagttgaggcgaagtttgggcgaccgcggcaggccccggccgagctcccctctgcgcccccggcgtcccgtcgagcccagccccgccgggggcgctcctcgccgcccgcgcgccctccccagccatgtcgtccatcctgcctttcactcccccgatcgtgaagcgcctgctgggctggaagaagggcgagcagaacgggcaggaggagaaatggtgcgagaaggcggtcaagagcctggtcaagaaactcaagaagacggggcagctggacgagctggagaaggccatcaccacgcagaacgtcaacaccaagtgcatcaccatccccaggtccctggatggccggttgcaggtgtcccatcggaaggggctccctcatgtcatctactgccgcctgtggcgatggccagacctgcacagccaccacgagctacgggccatggagctgtgtgagttcgccttcaatatgaagaaggacgaggtctgcgtgaatccctaccactaccagagagtagagacaccagttctacctcctgtgttggtgccacgccacacagagatcccggccgagttccccccactggacgactacagccattccatccccgaaaacactaacttccccgcaggcatcgagccccagagcaatattccagagaccccaccccctggctacctgagtgaagatggagaaaccagtgaccaccagatgaaccacagcatggacgcaggttctccaaacctatccccgaatccgatgtccccagcacataataacttggacctgcagccagttacctactgcgagccggccttctggtgctccatctcctactacgagctgaaccagcgcgtcggggagacattccacgcctcgcagccatccatgactgtggatggcttcaccgacccctccaattcggagcgcttctgcctagggctgctctccaatgtcaacaggaatgcagcagtggagctgacacggagacacatcggaagaggcgtgcggctctactacatcggaggggaggtcttcgcagagtgcctcagtgacagcgctatttttgtccagtctcccaactgtaaccagcgctatggctggcacccggccaccgtctgcaagatcccaccaggatgcaacctgaagatcttcaacaaccaggagttcgctgccctcctggcccagtcggtcaaccagggctttgaggctgtctaccagttgacccgaatgtgcaccatccgcatgagcttcgtcaaaggctggggagcggagtacaggagacagactgtgaccagtaccccctgctggattgagctgcacctgaatgggcctttgcagtggcttgacaaggtcctcacccagatgggctccccaagcatccgctgttccagtgtgtcttagagacatcaagtatggta

SEQ ID NO: 3925 - DNA, 1147 bp, Homo sapiens
  source 1..1147: mol_type = genomic DNA
agtaatcctgctgcgttcctcttagagcattctaatttggacgtgacgttcatcctgggttagtttactgggctgagattggctacaggcctgtgtgcttgggtcagagtgttaaggaggagacccactgtccaaccttctcagatcctttgcgggtagccctggcgtcccgcggagaccccaccccctggctacctgagtgaagatggagaaaccagtgaccaccagatgaaccacagcatggacgcaggttctccaaacctatccccgaatccgatgtccccagcacataataacttggacctgcagccagttacctactgcgagccggccttctggtgctccatctcctactacgagctgaaccagcgcgtcggggagacattccacgcctcgcagccatccatgactgtggatggcttcaccgacccctccaattcggagcgcttctgcctagggctgctctccaatgtcaacaggaatgcagcagtggagctgacacggagacacatcggaagaggcgtgcggctctactacatcggaggggaggtcttcgcagagtgcctcagtgacagcgctatttttgtccagtctcccaactgtaaccagcgctatggctggcacccggccaccgtctgcaagatcccaccaggatgcaacctgaagatcttcaacaaccaggagttcgctgccctcctggcccagtcggtcaaccagggctttgaggctgtctaccagttgacccgaatgtgcaccatccgcatgagcttcgtcaaaggctggggagcggagtacaggagacagactgtgaccagtaccccctgctggattgagctgcacctgaatgggcctttgcagtggcttgacaaggtcctcacccagatgggctccccaagcatccgctgttccagtgtgtcttagagacatcaagtatggtaggggagggcaggcttggggaaaatggccatgcaggaggtggagaaaattggaactctactcaacccattgttgtcaaggaagaagaaatctttctccctcaactgaaggggtgcacccacctgttttctgaaacacacgagcaaacccagaggtggatgttatgaacagctgtgtctgccaaacacatttaccctttggccccactttg

SEQ ID NO: 3926 - DNA, 1567 bp, Homo sapiens
  source 1..1567: mol_type = genomic DNA
aaatatgagcttgtgcttgctggaggaggatgacagaggagcctgctgctgagttcactggtgctggggttaggtcactgctgggctgaagcgcactgaccataagagcaacatgtgggcaagagccgcggcactggggtaatttattgccgccgctcgcttcaccaggaaccccacacgctgggttcccacaggatgcgacattcccacaggatgggacaactgcatggaaacccacactcgggcctgtgttgagcaaccacgtttgagtccctggatggccggttgcaggtgtcccatcggaaggggctccctcatgtcatctactgccgcctgtggcgatggccagacctgcacagccaccacgagctacgggccatggagctgtgtgagttcgccttcaatatgaagaaggacgaggtctgcgtgaatccctaccactaccagagagtagagacaccagttctacctcctgtgttggtgccacgccacacagagatcccggccgagttccccccactggacgactacagccattccatccccgaaaacactaacttccccgcaggcatcgagccccagagcaatattccagagaccccaccccctggctacctgagtgaagatggagaaaccagtgaccaccagatgaaccacagcatggacgcaggttctccaaacctatccccgaatccgatgtccccagcacataataacttggacctgcagccagttacctactgcgagccggccttctggtgctccatctcctactacgagctgaaccagcgcgtcggggagacattccacgcctcgcagccatccatgactgtggatggcttcaccgacccctccaattcggagcgcttctgcctagggctgctctccaatgtcaacaggaatgcagcagtggagctgacacggagacacatcggaagaggcgtgcggctctactacatcggaggggaggtcttcgcagagtgcctcagtgacagcgctatttttgtccagtctcccaactgtaaccagcgctatggctggcacccggccaccgtctgcaagatcccaccaggatgcaacctgaagatcttcaacaaccaggagttcgctgccctcctggcccagtcggtcaaccagggctttgaggctgtctaccagttgacccgaatgtgcaccatccgcatgagcttcgtcaaaggctggggagcggagtacaggagacagactgtgaccagtaccccctgctggattgagctgcacctgaatgggcctttgcagtggcttgacaaggtcctcacccagatgggctccccaagcatccgctgttccagtgtgtcttagagacatcaagtatggtaggggagggcaggcttggggaaaatggccatgcaggaggtggagaaaattggaactctactcaacccattgttgtcaaggaagaagaaatctttctccctcaactgaaggggtgcacccacctgttttctgaaacacacgagcaaacccagaggtggatgttatgaacagctgtgtctgccaaacacatttaccctttggccccactttg

SEQ ID NO: 3927 - DNA, 3087 bp, Homo sapiens
  source 1..3087: mol_type = genomic DNA
cggagagccgcgcagggcgcgggccgcgcggggtggggcagccggagcgcaggcccccgatccccggcgggcgcccccgggcccccgcgcgcgccccggcctccgggagactggcgcatgccacggagcgcccctcgggccgccgccgctcctgcccgggcccctgctgctgctgctgtcgcctgcgcctgctgccccaactcggcgcccgacttcttcatggtgtgcggaggtcatgttcgctccttagcaggcaaacgacttttctcctcgcctcctcgccccgcatgttcaggaccaaacgatctgcgctcgtccggcgtctctggaggagccgtgcgcccggcggcgaggacgaggaggagggcgcagggggaggtggaggaggaggcgagctgcggggagaaggggcgacggacagccgagcgcatggggccggtggcggcggcccgggcagggctggatgctgcctgggcaaggcggtgcgaggtgccaaaggtcaccaccatccccacccgccagccgcgggcgccggcgcggccgggggcgccgaggcggatctgaaggcgctcacgcactcggtgctcaagaaactgaaggagcggcagctggagctgctgctccaggccgtggagtcccgcggcgggacgcgcaccgcgtgcctcctgctgcccggccgcctggactgcaggctgggcccgggggcgcccgccggcgcgcagcctgcgcagccgccctcgtcctactcgctccccctcctgctgtgcaaagtgttcaggtggccggatctcaggcattcctcggaagtcaagaggctgtgttgctgtgaatcttacgggaagatcaaccccgagctggtgtgctgcaacccccatcaccttagccgactctgcgaactagagtctcccccccctccttactccagatacccgatggattttctcaaaccaactgcagactgtccagatgctgtgccttcctccgctgaaacagggggaacgaattatctggcccctggggggctttcagattcccaacttcttctggagcctggggatcggtcacactggtgcgtggtggcatactgggaggagaagacgagagtggggaggctctactgtgtccaggagccctctctggatatcttctatgatctacctcaggggaatggcttttgcctcggacagctcaattcggacaacaagagtcagctggtgcagaaggtgcggagcaaaatcggctgcggcatccagctgacgcgggaggtggatggtgtgtgggtgtacaaccgcagcagttaccccatcttcatcaagtccgccacactggacaacccggactccaggacgctgttggtacacaaggtgttccccggtttctccatcaaggctttcgactacgagaaggcgtacagcctgcagcggcccaatgaccacgagtttatgcagcagccgtggacgggctttaccgtgcagatcagctttgtgaagggctggggccagtgctacacccgccagttcatcagcagctgcccgtgctggctagaggtcatcttcaacagccggtagccgcgtgcggaggggacagagcgtgagctgagcaggccacacttcaaactactttgctgctaatattttcctcctgagtgcttgcttttcatgcaaactctttggtcgttttttttttgtttgttggttggttttcttcttctcgtcctcgtttgtgttctgttttgtttcgctctttgagaaatagcttatgaaaagaattgttgggggtttttttggaagaaggggcaggtatgatcggcaggacaccctgataggaagaggggaagcagaaatccaagcaccaccaaacacagtgtatgaaggggggcggtcatcatttcacttgtcaggagtgtgtgtgagtgtgagtgtgcggctgtgtgtgcacgcgtgtgcaggagcggcagatggggagacaacgtgctctttgttttgtgtctcttatggatgtccccagcagagaggtttgcagtcccaagcggtgtctctcctgccccttggacacgctcagtggggcagaggcagtacctgggcaagctggcggctggggtcccagcagctgccaggagcacggctctgtccccagcctgggaaagcccctgcccctcctctccctcatcaaggacacgggcctgtccacaggcttctgagcagcgagcctgctagtggccgaaccagaaccaattattttcatccttgtcttattcccttcctgccagcccctgccattgtagcgtctttcttttttggccatctgctcctggatctccctgagatgggcttcccaagggctgccggggcagccccctcacagtattgctcacccagtgccctctcccctcagcctctcccctgcctgccctggtgacatcaggtttttcccggacttagaaaaccagctcagcactgcctgctcccatcctgtgtgttaagctctgctattaggccagcaagcggggatgtccctgggagggacatgcttagcagtccccttccctccaagaaggatttggtccgtcataacccaaggtaccatcctaggctgacacctaactcttctttcatttcttctacaactcatacactcgtatgatacttcgacactgttcttagctcaatgagcatgtttagactttaacataagctatttttctaactacaaaggtttaaatgaacaagagaagcattctcattggaaatttagcattgtagtgctttgagagagaaaggactcctgaaaaaaaacctgagatttattaaagaaaaaaatgtattttatgttatatataaatatattattacttgtaaatataaagacgttttataagcatcattatttatgtattgtgcaatgtgtataaacaagaaaaataaagaaaagatgcactttgctttaatataaatgcaaataacaaatgccaaattaaaaaagataaacacaagattggtgtttttttctatgggtgttatcacctagctgaatgtttttctaaaggagtttatgttccattaaacgatttttaaaatgtacacttga

SEQ ID NO: 3928 - DNA, 2292 bp, Homo sapiens
  source 1..2292: mol_type = genomic DNA
agtaaatacggagaatcacgtcgaacaccagtggcccagatactgtcgtggccgcgcacctttggagttttggggcaaagagagttggatggaaggccgaactggagtctcccccccctccttactccagatacccgatggattttctcaaaccaactgcagactgtccagatgctgtgccttcctccgctgaaacagggggaacgaattatctggcccctggggggctttcagattcccaacttcttctggagcctggggatcggtcacactggtgcgtggtggcatactgggaggagaagacgagagtggggaggctctactgtgtccaggagccctctctggatatcttctatgatctacctcaggggaatggcttttgcctcggacagctcaattcggacaacaagagtcagctggtgcagaaggtgcggagcaaaatcggctgcggcatccagctgacgcgggaggtggatggtgtgtgggtgtacaaccgcagcagttaccccatcttcatcaagtccgccacactggacaacccggactccaggacgctgttggtacacaaggtgttccccggtttctccatcaaggctttcgactacgagaaggcgtacagcctgcagcggcccaatgaccacgagtttatgcagcagccgtggacgggctttaccgtgcagatcagctttgtgaagggctggggccagtgctacacccgccagttcatcagcagctgcccgtgctggctagaggtcatcttcaacagccggtagccgcgtgcggaggggacagagcgtgagctgagcaggccacacttcaaactactttgctgctaatattttcctcctgagtgcttgcttttcatgcaaactctttggtcgttttttttttgtttgttggttggttttcttcttctcgtcctcgtttgtgttctgttttgtttcgctctttgagaaatagcttatgaaaagaattgttgggggtttttttggaagaaggggcaggtatgatcggcaggacaccctgataggaagaggggaagcagaaatccaagcaccaccaaacacagtgtatgaaggggggcggtcatcatttcacttgtcaggagtgtgtgtgagtgtgagtgtgcggctgtgtgtgcacgcgtgtgcaggagcggcagatggggagacaacgtgctctttgttttgtgtctcttatggatgtccccagcagagaggtttgcagtcccaagcggtgtctctcctgccccttggacacgctcagtggggcagaggcagtacctgggcaagctggcggctggggtcccagcagctgccaggagcacggctctgtccccagcctgggaaagcccctgcccctcctctccctcatcaaggacacgggcctgtccacaggcttctgagcagcgagcctgctagtggccgaaccagaaccaattattttcatccttgtcttattcccttcctgccagcccctgccattgtagcgtctttcttttttggccatctgctcctggatctccctgagatgggcttcccaagggctgccggggcagccccctcacagtattgctcacccagtgccctctcccctcagcctctcccctgcctgccctggtgacatcaggtttttcccggacttagaaaaccagctcagcactgcctgctcccatcctgtgtgttaagctctgctattaggccagcaagcggggatgtccctgggagggacatgcttagcagtccccttccctccaagaaggatttggtccgtcataacccaaggtaccatcctaggctgacacctaactcttctttcatttcttctacaactcatacactcgtatgatacttcgacactgttcttagctcaatgagcatgtttagactttaacataagctatttttctaactacaaaggtttaaatgaacaagagaagcattctcattggaaatttagcattgtagtgctttgagagagaaaggactcctgaaaaaaaacctgagatttattaaagaaaaaaatgtattttatgttatatataaatatattattacttgtaaatataaagacgttttataagcatcattatttatgtattgtgcaatgtgtataaacaagaaaaataaagaaaagatgcactttgctttaatataaatgcaaataacaaatgccaaattaaaaaagataaacacaagattggtgtttttttctatgggtgttatcacctagctgaatgtttttctaaaggagtttatgttccattaaacgatttttaaaatgtacacttga

SEQ ID NO: 3929 - DNA, 1152 bp, Homo sapiens
  source 1..1152: mol_type = genomic DNA
agtaaatacggagaatcacgtcgaacaccagtggcccagatactgtcgtggccgcgcacctttggagttttggggcaaagagagttggatggaaggccgaactggagtctcccccccctccttactccagatacccgatggattttctcaaaccaactgcagactgtccagatgctgtgccttcctccgctgaaacagggggaacgaattatctggcccctggggggctttcagattcccaacttcttctggagcctggggatcggtcacactggtgcgtggtggcatactgggaggagaagacgagagtggggaggctctactgtgtccaggagccctctctggatatcttctatgatctacctcaggggaatggcttttgcctcggacagctcaattcggacaacaagagtcagctggtgcagaaggtgcggagcaaaatcggctgcggcatccagctgacgcgggaggtggatggtgtgtgggtgtacaaccgcagcagttaccccatcttcatcaagtccgccacactggacaacccggactccaggacgctgttggtacacaaggtgttccccggtttctccatcaaggctttcgactacgagaaggcgtacagcctgcagcggcccaatgaccacgagtttatgcagcagccgtggacgggctttaccgtgcagatcagctttgtgaagggctggggccagtgctacacccgccagttcatcagcagctgcccgtgctggctagaggtcatcttcaacagccggtagccgcgtgcggaggggacagagcgtgagctgagcaggccacacttcaaactactttgctgctaatattttcctcctgagtgcttgcttttcatgcaaactctttggtcgttttttttttgtttgttggttggttttcttcttctcgtcctcgtttgtgttctgttttgtttcgctctttgagaaatagcttatgaaaagaattgttgggggtttttttggaagaaggggcaggtatgatcggcaggacaccctgataggaagaggggaagcagaaatccaagcaccaccaaacacagtgtatgaaggggggcggtcatcatttcacttgtcaggagtgtgtgtgagtgtgagtgtgcggctgtgtgtgcacgcgtgtgca

SEQ ID NO: 3930 - DNA, 647 bp, Homo sapiens
  source 1..647: mol_type = genomic DNA
accaaacccaagggaccacacagcccattctgctccgtataccagaaaaaaacacatttgaagcatgaattctcagcagcagaagcagccttgcaccccaccccctcagcctcagcagcagcaggtgaaacaaccttgccagcctccaccccaggaaccatgcatccccaaaaccaaggagccctgccaccccaaggtgcctgagccctgccaccccaaagtgcctgagccctgccagcccaaggttccagagccctgccagcccaaggtgcctgagccctgcccttcaacggtcactccagcaccagcccagcagaagaccaagcagaagtaatgtggtccacagccatgcccttgaggagctggccactggatactgaacaccctactccattctgcttatgaatcccatttgcctattgaccctgcagttagcatgctgtcaccctgaatcataatcgctcctttgcacctctaaaaagatgtcccttaccctcattctggagggctcctgagcctctgcgtaaggctgaacgtctcactgactgagctagtcttcttgttgctcgggtgcatttgaggatggatttggggaaggatcaagtgaaccatccctagtcttccttcaataaataacttttaactcc

SEQ ID NO: 3931 - DNA, 270 bp, Homo sapiens
  source 1..270: mol_type = genomic DNA
atgaattctcagcagcagaagcagccttgcaccccaccccctcagcctcagcagcagcaggtgaaacaaccttgccagcctccaccccaggaaccatgcatccccaaaaccaaggagccctgccaccccaaggtgcctgagccctgccaccccaaagtgcctgagccctgccagcccaaggttccagagccctgccagcccaaggtgcctgagccctgcccttcaacggtcactccagcaccagcccagcagaagaccaagcagaagtaa

SEQ ID NO: 3932 - DNA, 5968 bp, Homo sapiens
  source 1..5968: mol_type = genomic DNA
cctggctgcgcgcggcggtggcggagccgctacggctgtagcagcagccgcgaagatggcggaagggctggagcgtgtgcggatctccgcgtcggagctgcgcgggatcctggctactctggccccgcaggccgggagcagagaaaacatgaaggaattaaaggaggccaggccgcgcaaagataacaggcgtccagatctggaaatctataagcctggcctttctcggctaaggaacaagcccaaaatcaaggaaccccctgggagtgaggaattcaaagatgaaattgttaatgaccgagattgctctgctgttgaaaatggtacacagcccgttaaagatgtctgcaaggaactgaacaaccaagagcagaatggtcctatagacccagaaaataatcggggacaagaatcctttcctaggactgctggacaagaggatcgtagtctaaaaattatcaaaagaacaaagaaacccgacctgcagatctatcagcctggacgacgtttgcagactgttagcaaagaatccgccagtcgggtggaggaggaagaagtcctcaaccaggtagaacaactgagagtagaggaagatgagtgtaggggaaatgttgcgaaggaggaagttgcgaataaaccagacagggctgagatagaaaagagcccaggtggtgggagagtaggggctgcaaaaggagaaaaaggaaagaggatgggaaaaggggagggggtgagggaaacccacgacgacccagcccgcgggaggccgggctccgcaaagcgctactcccgctcagacaaacgaaggaatcgctaccgcacgcgcagcaccagctcagctggcagcaacaacagcgctgagggagctggcctgacggataatggatgtcgccgccgccgacaggataggaccaaggagaggccacgactgaagaagcaagtgtctgtgtcctcaaccgattccttagacgaggacagaattgatgagcctgatggattaggacccaggagaagttcagaaaggaagagacatttagaaagaaactggtctggccgtggggagggtgagcagaaaaacagtgctaaagaatatcgaggcactcttcgtgtcactttcgatgcagaagccatgaacaaagagtctcccatggtgaggtcagccagggatgatatggatagaggaaagcctgacaaaggcttgagcagtgggggcaaaggctctgagaagcaggagtccaaaaacccgaaacaagaacttcggggtcgtggtcgtggcattctgattttgcctgcccataccaccctatctgtcaattcagcaggttctccagagtccgcgcctttgggacctcggcttttgtttggatctggtagtaagggatctcggagttggggccgtggaggcaccacacgccgattgtgggacccaaacaatcctgatcagaaacctgctctaaagactcagacgccccagctacatttcttggacactgatgatgaagtcagccctacatcttggggtgactcacgccaggctcaggcatcttactataagtttcaaaactctgacaacccctattattacccccggacaccaggccctgcctcccagtatccctatacgggctataaccctctacagtacccagtgggccctacgaatggtgtgtacccagggccttactacccaggctacccgactccgtcaggacagtatgtgtgtagccctctacctaccagcaccatgagtcccgaggaggtagagcagcacatgaggaacctgcagcaacaggagctgcacaggcttctccgggtggctgacaaccaggaactgcagctcagcaacctgctctccagggaccgcatcagtccggagggcctggagaagatggcgcaactcagagctgaactgctgcagctatatgagcgctgtattctattagatattgagttctctgataatcagaatgtggatcagatcctgtggaagaatgctttctatcaggtgattgagaagttcaggcaacttgtcaaggatccgaatgttgagaacccagaacagattcggaacagacttttggagctcttggatgagggtagtgacttctttgatagtttgcttcagaagctgcaggttacttacaagttcaaactggaagactacatggatggtcttgccattcgcagcaagccattacgcaagacagtaaaatatgccttgatcagtgcccagcgatgcatgatatgccaaggagatattgctaggtaccgggagcaagccagtgatacagcgaattatgggaaagcacgcagttggtacctgaaggcccagcacattgctcccaagaatgggcgcccctataaccagttggctttgctggcagtgtatacgaggaggaagcttgacgctgtctattactatatgcgcagtttagctgccagcaaccctatcctgactgccaaggagagtctcatgagcttgtttgaagagaccaagcggaaggcagaacagatggaaaagaagcaacatgaggaatttgacctgagccctgaccagtggcggaaaggaaagaagtctactttccggcatgttggagatgacaccactcgcctggagatctggattcatccatcccatccacggtcttcccagggcactgagtctgggaaggattctgagcaagagaatgggctgggcagcctgagtcccagtgatctgaacaaaaggttcatcctcagttttctccatgcccatgggaagctgtttacccggattgggatggagacattccctgcagtggctgagaaggtcctcaaggagttccaggtgttactgcagcacagcccctctcccattggaagtacccgcatgctgcagcttatgaccatcaatatgtttgcagtacacaactcccagctgaaagactgcttctcggaggagtgccgctctgtgatccaggaacaagccgcagctctgggcttggccatgttttctctactggtccgccgctgcacctgcttacttaaggagtccgccaaagctcagctgtcctctcctgaggaccaggatgaccaagacgacatcaaggtgtcttcctttgtcccggacctgaaggagctgctccccagtgtcaaagtctggtcagattggatgctcggctacccggacacctggaatcctcctcccacatccctggatctgccctcgcatgttgctgtggatgtatggtcgacgctggctgatttctgtaacatactgactgcagtgaatcagtctgaggtgccactgtacaaggacccggatgatgacctcacccttcttatcctggaagaggatcggcttctctcgggctttgtccccttgctggctgcccctcaggacccctgctacgtggagaaaacctcggataaggttattgcagctgactgcaaaagggtcacagtgctgaagtattttctggaagccctttgtggacaagaagagcctctgctggcattcaagggtggaaagtatgtgtcagtggcacccgtcccagacaccatgggaaaggaaatgggaagccaagagggaacacgactggaagatgaggaggaggatgtggtgattgaagactttgaggaagattcagaggctgaaggcagcggaggcgaggatgacatcagggagcttcgggccaagaagctggctctggccaggaagatagctgagcagcagcgtcgccaggaaaagatccaggctgtcctggaggaccacagtcagatgaggcagatggagctcgaaatcagacctttgttcctcgtaccagacaccaacggcttcattgaccacctggccagtctggcgcggctgctggagagcaggaagtacatcctggtggtgcccctcatcgtgatcaatgagctggacggcctggccaaggggcaggagacagaccaccgggctgggggctacgcccgtgtggtacaagagaaggcccgcaagtccatcgagttcctcgagcagcgattcgagagtcgggactcttgcctgcgagccctgaccagccgtggcaatgaactcgaatccatcgccttccgcagtgaggacatcactggccagctgggtaacaacgatgatctcatcctgtcctgctgcctccactactgcaaagacaaggctaaggacttcatgcccgccagcaaagaggagccaatccggctactgcgggaggtggtgctgttgacggatgaccggaacctgcgtgtgaaggcgctcacaaggaatgttcctgtacgggacatcccagccttcctcacgtgggcccaggtgggctgagggagccacactggggccccccccccgtggaaccgttcctgaaaggccaccaggcgcccagtgtagcacggaagatgcccacgtgcctgagccaccaatccacccagacaataaaccatcctcttccaacccacgccacggccatgctgtgggggacctgctcctcacagagcccctcccaaggatcgggcggaagctgctgggaccctcctgggctgccaggatttagcagggaggtggctggctacagcaacagcagctgggcaagccagataggccgcccatgctctcagcctttctccctcccccgtctcattccaaggctgagggagggccttctcgcctggggacgcagccactttctccagtggagacagggcaggggttctgagtttccgtcagatgcagtgaaatcacagttccctttcatcttcagaacctctgtcgtgaatgtgttcaagaggctttggttaagtcaggaagaagtgcccagggtgtgtgtccccagtctccctgaggcctggactcgcccatgaacccaagtcggcttctagacagcatgtccctaacagcagccctgggcccccacctcttctaccatccaccccagacttaccacacacccttcctgctgctcctcttcctgcccttatcaacctgggtccctcacacttcgccagttgcgtccccgtggacagtcatgagtctagaggaaaggggcatctggtctcaggcccgtgctctcgggtggcctccacctgctccctctctcctcactggcctttctttccgtctagcttcctcttcaggaaatgtcctgactcccctcagctcccccttcacccctccttgcccgcctaccctccctccagaatagcccctcacccttcttccccttctagttgatccttttcacctccctgatccccttcatttcttcaccgcggttcctcgtcataggggttctcactctgaactttccctctctactacccatggcaggaacctagtacaggtctcccacccagggccttccaccctcggctcctgtgctgggagaaacttccaggcgtggacagcccagcctgaggcattccagtgctggggcaccgtcgcctaacctggtttctagctttgccctcactccccggaaaaactgacactgacacaggggccctttccttgcccctttagctggtacctcagtggggaggcttccttaccaagaatgagttcctgaaacccagggccagagacaaggacaacttaggggaagacggggttttcggtggagccaggggcaaatcttaatgggaccagtgggggataccccagagcccatggcctgactgcacagcctgcctggaggatgggtgcgcagctctgccctccctgaggcccaggactatgccagaagcgatggggtaccgtgtaggggagccaaggccagtagtttgggggtaggagtcccctagagtctcagaagactgggctctttggagtacagggtccccggcctctcctttaagattctctccccagctggaaggccgatgactgggtggtcgggagggagacccagctctcctttctgtcccgtttgcagcactggttttgtttccttaataaatttttagttatgaaacatacctg

SEQ ID NO: 3933 - DNA, 2646 bp, Homo sapiens
  source 1..2646: mol_type = genomic DNA
atgagatttaggctttgccaccagaggggttgctgtccacatgagagagagaacacctgcacctgtaaaatgatcatcagtagtctccaggttattgcagctgactgcaaaagggtcacagtgctgaagtattttctggaagccctttgtggacaagaagagcctctgctggcattcaagggtggaaagtatgtgtcagtggcacccgtcccagacaccatgggaaaggaaatgggaagccaagagggaacacgactggaagatgaggaggaggatgtggtgattgaagactttgaggaagattcagaggctgaaggcagcggaggcgaggatgacatcagggagcttcgggccaagaagctggctctggccaggaagatagctgagcagcagcgtcgccaggaaaagatccaggctgtcctggaggaccacagtcagatgaggcagatggagctcgaaatcagacctttgttcctcgtaccagacaccaacggcttcattgaccacctggccagtctggcgcggctgctggagagcaggaagtacatcctggtggtgcccctcatcgtgatcaatgagctggacggcctggccaaggggcaggagacagaccaccgggctgggggctacgcccgtgtggtacaagagaaggcccgcaagtccatcgagttcctcgagcagcgattcgagagtcgggactcttgcctgcgagccctgaccagccgtggcaatgaactcgaatccatcgccttccgcagtgaggacatcactggccagctgggtaacaacgatgatctcatcctgtcctgctgcctccactactgcaaagacaaggctaaggacttcatgcccgccagcaaagaggagccaatccggctactgcgggaggtggtgctgttgacggatgaccggaacctgcgtgtgaaggcgctcacaaggaatgttcctgtacgggacatcccagccttcctcacgtgggcccaggtgggctgagggagccacactggggccccccccccgtggaaccgttcctgaaaggccaccaggcgcccagtgtagcacggaagatgcccacgtgcctgagccaccaatccacccagacaataaaccatcctcttccaacccacgccacggccatgctgtgggggacctgctcctcacagagcccctcccaaggatcgggcggaagctgctgggaccctcctgggctgccaggatttagcagggaggtggctggctacagcaacagcagctgggcaagccagataggccgcccatgctctcagcctttctccctcccccgtctcattccaaggctgagggagggccttctcgcctggggacgcagccactttctccagtggagacagggcaggggttctgagtttccgtcagatgcagtgaaatcacagttccctttcatcttcagaacctctgtcgtgaatgtgttcaagaggctttggttaagtcaggaagaagtgcccagggtgtgtgtccccagtctccctgaggcctggactcgcccatgaacccaagtcggcttctagacagcatgtccctaacagcagccctgggcccccacctcttctaccatccaccccagacttaccacacacccttcctgctgctcctcttcctgcccttatcaacctgggtccctcacacttcgccagttgcgtccccgtggacagtcatgagtctagaggaaaggggcatctggtctcaggcccgtgctctcgggtggcctccacctgctccctctctcctcactggcctttctttccgtctagcttcctcttcaggaaatgtcctgactcccctcagctcccccttcacccctccttgcccgcctaccctccctccagaatagcccctcacccttcttccccttctagttgatccttttcacctccctgatccccttcatttcttcaccgcggttcctcgtcataggggttctcactctgaactttccctctctactacccatggcaggaacctagtacaggtctcccacccagggccttccaccctcggctcctgtgctgggagaaacttccaggcgtggacagcccagcctgaggcattccagtgctggggcaccgtcgcctaacctggtttctagctttgccctcactccccggaaaaactgacactgacacaggggccctttccttgcccctttagctggtacctcagtggggaggcttccttaccaagaatgagttcctgaaacccagggccagagacaaggacaacttaggggaagacggggttttcggtggagccaggggcaaatcttaatgggaccagtgggggataccccagagcccatggcctgactgcacagcctgcctggaggatgggtgcgcagctctgccctccctgaggcccaggactatgccagaagcgatggggtaccgtgtaggggagccaaggccagtagtttgggggtaggagtcccctagagtctcagaagactgggctctttggagtacagggtccccggcctctcctttaagattctctccccagctggaaggccgatgactgggtggtcgggagggagacccagctctcctttctgtcccgtttgcagcactggttttgtttccttaataaatttttagttatgaaacatacctg

SEQ ID NO: 3934 - DNA, 1675 bp, Homo sapiens
  source 1..1675: mol_type = genomic DNA
ctgaaaactcctttatcttgaatttgttcaaaattgcaggataccgggaaggatggagacattccctgcagtggctgagaaggtcctcaaggagttccaggtgttactgcagcacagcccctctcccattggaagtacccgcatgctgcagcttatgaccatcaatatgtttgcagtacacaactcccagctgaaagactgcttctcggaggagtgccgctctgtgatccaggaacaagccgcagctctgggcttggccatgttttctctactggtccgccgctgcacctgcttacttaaggagtccgccaaagctcagctgtcctctcctgaggaccaggatgaccaagacgacatcaaggtgtcttcctttgtcccggacctgaaggagctgctccccagtgtcaaagtctggtcagattggatgctcggctacccggacacctggaatcctcctcccacatccctggatctgccctcgcatgttgctgtggatgtatggtcgacgctggctgatttctgtaacatactgactgcagtgaatcagtctgaggtgccactgtacaaggacccggatgatgacctcacccttcttatcctggaagaggatcggcttctctcgggctttgtccccttgctggctgcccctcaggacccctgctacgtggagaaaacctcggataaggttattgcagctgactgcaaaagggtcacagtgctgaagtattttctggaagccctttgtggacaagaagagcctctgctggcattcaagggtggaaagtatgtgtcagtggcacccgtcccagacaccatgggaaaggaaatgggaagccaagagggaacacgactggaagatgaggaggaggatgtggtgattgaagactttgaggaagattcagaggctgaaggcagcggaggcgaggatgacatcagggagcttcgggccaagaagctggctctggccaggaagatagctgagcagcagcgtcgccaggaaaagatccaggctgtcctggaggaccacagtcagatgaggcagatggagctcgaaatcagacctttgttcctcgtaccagacaccaacggcttcattgaccacctggccagtctggcgcggctgctggagagcaggaagtacatcctggtggtgcccctcatcgtgatcaatgagctggacggcctggccaaggggcaggagacagaccaccgggctgggggctacgcccgtgtggtacaagagaaggcccgcaagtccatcgagttcctcgagcagcgattcgagagtcgggactcttgcctgcgagccctgaccagccgtggcaatgaactcgaatccatcgccttccgcagtgaggacatcactggccagctgggtaacaacgatgatctcatcctgtcctgctgcctccactactgcaaagacaaggctaaggacttcatgcccgccagcaaagaggagccaatccggctactgcgggaggtggtgctgttgacggatgaccggaacctgcgtgtgaaggcgctcacaaggaatgttcctgtacgggacatcccagccttcctcacgtgggcccaggtgggctgagggagccacactggggccccccccccgtggaaccgttcctgaaaggccaccaggcgcccagtgtagcacggaagatgcccacgtgcc

SEQ ID NO: 3935 - DNA, 6331 bp, Homo sapiens
  source 1..6331: mol_type = genomic DNA
agcagtaggcgctggggccgcggcggaccctcgctgccctacctctctcgcgggttagtgcggggtcgggctcggccagtcctggccagctccgggagagcctggcccgaattcctgcctccaccctctttctcgccgcgaaggtgactgttccttttgccccagccctctcagacccgccccggattcccaggcatcgggagacgcggaaaggagtggggtctggtggaggccccgggcgtatcgctctccaggccgccctccgcgggcctgccccggccaccgctttaacgtcggagagaaggaattggggagaaaggtttaagagcctgcgacttcgttgctgaacttttcccccccaagacaggcttccgaaagctgcgccactggagggatccgggacctcagactactcgggtttggccctggcatgtgtgggagcagtttttattagagagaatgctcaatttgcaagttaatttcaagtctccagccacgtcaggaaaaaaacatgaaggaattaaaggaggccaggccgcgcaaagataacaggcgtccagatctggaaatctataagcctggcctttctcggctaaggaacaagcccaaaatcaaggaaccccctgggagtgaggaattcaaagatgaaattgttaatgaccgagattgctctgctgttgaaaatggtacacagcccgttaaagatgtctgcaaggaactgaacaaccaagagcagaatggtcctatagacccagaaaataatcggggacaagaatcctttcctaggactgctggacaagaggatcgtagtctaaaaattatcaaaagaacaaagaaacccgacctgcagatctatcagcctggacgacgtttgcagactgttagcaaagaatccgccagtcgggtggaggaggaagaagtcctcaaccaggtagaacaactgagagtagaggaagatgagtgtaggggaaatgttgcgaaggaggaagttgcgaataaaccagacagggctgagatagaaaagagcccaggtggtgggagagtaggggctgcaaaaggagaaaaaggaaagaggatgggaaaaggggagggggtgagggaaacccacgacgacccagcccgcgggaggccgggctccgcaaagcgctactcccgctcagacaaacgaaggaatcgctaccgcacgcgcagcaccagctcagctggcagcaacaacagcgctgagggagctggcctgacggataatggatgtcgccgccgccgacaggataggaccaaggagaggccacgactgaagaagcaagtgtctgtgtcctcaaccgattccttagacgaggacagaattgatgagcctgatggattaggacccaggagaagttcagaaaggaagagacatttagaaagaaactggtctggccgtggggagggtgagcagaaaaacagtgctaaagaatatcgaggcactcttcgtgtcactttcgatgcagaagccatgaacaaagagtctcccatggtgaggtcagccagggatgatatggatagaggaaagcctgacaaaggcttgagcagtgggggcaaaggctctgagaagcaggagtccaaaaacccgaaacaagaacttcggggtcgtggtcgtggcattctgattttgcctgcccataccaccctatctgtcaattcagcaggttctccagagtccgcgcctttgggacctcggcttttgtttggatctggtagtaagggatctcggagttggggccgtggaggcaccacacgccgattgtgggacccaaacaatcctgatcagaaacctgctctaaagactcagacgccccagctacatttcttggacactgatgatgaagtcagccctacatcttggggtgactcacgccaggctcaggcatcttactataagtttcaaaactctgacaacccctattattacccccggacaccaggccctgcctcccagtatccctatacgggctataaccctctacagtacccagtgggccctacgaatggtgtgtacccagggccttactacccaggctacccgactccgtcaggacagtatgtgtgtagccctctacctaccagcaccatgagtcccgaggaggtagagcagcacatgaggaacctgcagcaacaggagctgcacaggcttctccgggtggctgacaaccaggaactgcagctcagcaacctgctctccagggaccgcatcagtccggagggcctggagaagatggcgcaactcagagctgaactgctgcagctatatgagcgctgtattctattagatattgagttctctgataatcagaatgtggatcagatcctgtggaagaatgctttctatcaggtgattgagaagttcaggcaacttgtcaaggatccgaatgttgagaacccagaacagattcggaacagacttttggagctcttggatgagggtagtgacttctttgatagtttgcttcagaagctgcaggttacttacaagttcaaactggaagactacatggatggtcttgccattcgcagcaagccattacgcaagacagtaaaatatgccttgatcagtgcccagcgatgcatgatatgccaaggagatattgctaggtaccgggagcaagccagtgatacagcgaattatgggaaagcacgcagttggtacctgaaggcccagcacattgctcccaagaatgggcgcccctataaccagttggctttgctggcagtgtatacgaggaggaagcttgacgctgtctattactatatgcgcagtttagctgccagcaaccctatcctgactgccaaggagagtctcatgagcttgtttgaagagaccaagcggaaggcagaacagatggaaaagaagcaacatgaggaatttgacctgagccctgaccagtggcggaaaggaaagaagtctactttccggcatgttggagatgacaccactcgcctggagatctggattcatccatcccatccacggtcttcccagggcactgagtctgggaaggattctgagcaagagaatgggctgggcagcctgagtcccagtgatctgaacaaaaggttcatcctcagttttctccatgcccatgggaagctgtttacccggattgggatggagacattccctgcagtggctgagaaggtcctcaaggagttccaggtgttactgcagcacagcccctctcccattggaagtacccgcatgctgcagcttatgaccatcaatatgtttgcagtacacaactcccagctgaaagactgcttctcggaggagtgccgctctgtgatccaggaacaagccgcagctctgggcttggccatgttttctctactggtccgccgctgcacctgcttacttaaggagtccgccaaagctcagctgtcctctcctgaggaccaggatgaccaagacgacatcaaggtgtcttcctttgtcccggacctgaaggagctgctccccagtgtcaaagtctggtcagattggatgctcggctacccggacacctggaatcctcctcccacatccctggatctgccctcgcatgttgctgtggatgtatggtcgacgctggctgatttctgtaacatactgactgcagtgaatcagtctgaggtgccactgtacaaggacccggatgatgacctcacccttcttatcctggaagaggatcggcttctctcgggctttgtccccttgctggctgcccctcaggacccctgctacgtggagaaaacctcggataaggttattgcagctgactgcaaaagggtcacagtgctgaagtattttctggaagccctttgtggacaagaagagcctctgctggcattcaagggtggaaagtatgtgtcagtggcacccgtcccagacaccatgggaaaggaaatgggaagccaagagggaacacgactggaagatgaggaggaggatgtggtgattgaagactttgaggaagattcagaggctgaaggcagcggaggcgaggatgacatcagggagcttcgggccaagaagctggctctggccaggaagatagctgagcagcagcgtcgccaggaaaagatccaggctgtcctggaggaccacagtcagatgaggcagatggagctcgaaatcagacctttgttcctcgtaccagacaccaacggcttcattgaccacctggccagtctggcgcggctgctggagagcaggaagtacatcctggtggtgcccctcatcgtgatcaatgagctggacggcctggccaaggggcaggagacagaccaccgggctgggggctacgcccgtgtggtacaagagaaggcccgcaagtccatcgagttcctcgagcagcgattcgagagtcgggactcttgcctgcgagccctgaccagccgtggcaatgaactcgaatccatcgccttccgcagtgaggacatcactggccagctgggtaacaacgatgatctcatcctgtcctgctgcctccactactgcaaagacaaggctaaggacttcatgcccgccagcaaagaggagccaatccggctactgcgggaggtggtgctgttgacggatgaccggaacctgcgtgtgaaggcgctcacaaggaatgttcctgtacgggacatcccagccttcctcacgtgggcccaggtgggctgagggagccacactggggccccccccccgtggaaccgttcctgaaaggccaccaggcgcccagtgtagcacggaagatgcccacgtgcctgagccaccaatccacccagacaataaaccatcctcttccaacccacgccacggccatgctgtgggggacctgctcctcacagagcccctcccaaggatcgggcggaagctgctgggaccctcctgggctgccaggatttagcagggaggtggctggctacagcaacagcagctgggcaagccagataggccgcccatgctctcagcctttctccctcccccgtctcattccaaggctgagggagggccttctcgcctggggacgcagccactttctccagtggagacagggcaggggttctgagtttccgtcagatgcagtgaaatcacagttccctttcatcttcagaacctctgtcgtgaatgtgttcaagaggctttggttaagtcaggaagaagtgcccagggtgtgtgtccccagtctccctgaggcctggactcgcccatgaacccaagtcggcttctagacagcatgtccctaacagcagccctgggcccccacctcttctaccatccaccccagacttaccacacacccttcctgctgctcctcttcctgcccttatcaacctgggtccctcacacttcgccagttgcgtccccgtggacagtcatgagtctagaggaaaggggcatctggtctcaggcccgtgctctcgggtggcctccacctgctccctctctcctcactggcctttctttccgtctagcttcctcttcaggaaatgtcctgactcccctcagctcccccttcacccctccttgcccgcctaccctccctccagaatagcccctcacccttcttccccttctagttgatccttttcacctccctgatccccttcatttcttcaccgcggttcctcgtcataggggttctcactctgaactttccctctctactacccatggcaggaacctagtacaggtctcccacccagggccttccaccctcggctcctgtgctgggagaaacttccaggcgtggacagcccagcctgaggcattccagtgctggggcaccgtcgcctaacctggtttctagctttgccctcactccccggaaaaactgacactgacacaggggccctttccttgcccctttagctggtacctcagtggggaggcttccttaccaagaatgagttcctgaaacccagggccagagacaaggacaacttaggggaagacggggttttcggtggagccaggggcaaatcttaatgggaccagtgggggataccccagagcccatggcctgactgcacagcctgcctggaggatgggtgcgcagctctgccctccctgaggcccaggactatgccagaagcgatggggtaccgtgtaggggagccaaggccagtagtttgggggtaggagtcccctagagtctcagaagactgggctctttggagtacagggtccccggcctctcctttaagattctctccccagctggaaggccgatgactgggtggtcgggagggagacccagctctcctttctgtcccgtttgcagcactggttttgtttccttaataaatttttagttatgaaacatacctg

SEQ ID NO: 3936 - DNA, 3738 bp, Homo sapiens
  source 1..3738: mol_type = genomic DNA
gggctgaagacaacttggattgcgaggctagggcttggggagtcgtgcatcccgttccgggcctccgcagcccaacatgggccccgggttccaaagtttgcgaagttgggcgccgaggggccggggcgcgcggagcgtccgggggggcccgggcccggattctctgggcgcacaggtcgcctgagccgcctccgcggccgccgaggtcgtgcgtgtggccggggggctccgaggagcaggcgggggcgccggggcttttgctgagttggcggggttggccatggccgctgcccgcccagcgcgggggccggagctcccgctcctggggctgctgctgctgctgctgctgggggacccgggccggggggcggcctcgagcgggaacgcgaccgggcctgggcctcggagcgcgggcgggagcgcgaggaggagcgcggcggtgactggccctccgccgccgctgagccactgcggccgggctgccccctgcgagccgctgcgctacaacgtgtgcctgggctcggtgctgccctacggggccacctccacactgctggccggagactcggactcccaggaggaagcgcacggcaagctcgtgctctggtcgggcctccggaatgccccccgctgctgggcagtgatccagcccctgctgtgtgccgtatacatgcccaagtgtgagaatgaccgggtggagctgcccagccgtaccctctgccaggccacccgaggcccctgtgccatcgtggagagggagcggggctggcctgacttcctgcgctgcactcctgaccgcttccctgaaggctgcacgaatgaggtgcagaacatcaagttcaacagttcaggccagtgcgaagtgcccttggttcggacagacaaccccaagagctggtacgaggacgtggagggctgcggcatccagtgccagaacccgctcttcacagaggctgagcaccaggacatgcacagctacatcgcggccttcggggccgtcacgggcctctgcacgctcttcaccctggccacattcgtggctgactggcggaactcgaatcgctaccctgctgttattctcttctacgtcaatgcgtgcttctttgtgggcagcattggctggctggcccagttcatggatggtgcccgccgagagatcgtctgccgtgcagatggcaccatgaggcttggggagcccacctccaatgagactctgtcctgcgtcatcatctttgtcatcgtgtactacgccctgatggctggtgtggtttggtttgtggtcctcacctatgcctggcacacttccttcaaagccctgggcaccacctaccagcctctctcgggcaagacctcctacttccacctgctcacctggtcactcccctttgtcctcactgtggcaatccttgctgtggcgcaggtggatggggactctgtgagtgggatttgttttgtgggctacaagaactaccgataccgtgcgggcttcgtgctggccccaatcggcctggtgctcatcgtgggaggctacttcctcatccgaggagtcatgactctgttctccatcaagagcaaccaccccgggctgctgagtgagaaggctgccagcaagatcaacgagaccatgctgcgcctgggcatttttggcttcctggcctttggctttgtgctcattaccttcagctgccacttctacgacttcttcaaccaggctgagtgggagcgcagcttccgggactatgtgctatgtcaggccaatgtgaccatcgggctgcccaccaagcagcccatccctgactgtgagatcaagaatcgcccgagccttctggtggagaagatcaacctgtttgccatgtttggaactggcatcgccatgagcacctgggtctggaccaaggccacgctgctcatctggaggcgtacctggtgcaggttgactgggcagagtgacgatgagccaaagcggatcaagaagagcaagatgattgccaaggccttctctaagcggcacgagctcctgcagaacccaggccaggagctgtccttcagcatgcacactgtgtcccacgacgggcccgtggcgggcttggcctttgacctcaatgagccctcagctgatgtctcctctgcctgggcccagcatgtcaccaagatggtggctcggagaggagccatactgccccaggatatttctgtcacccctgtggcaactccagtgcccccagaggaacaagccaacctgtggctggttgaggcagagatctccccagagctgcagaagcgcctgggccggaagaagaagaggaggaagaggaagaaggaggtgtgcccgctggcgccgccccctgagcttcacccccctgcccctgcccccagtaccattcctcgactgcctcagctgccccggcagaaatgcctggtggctgcaggtgcctggggagctggggactcttgccgacagggagcgtggaccctggtctccaacccattctgcccagagcccagtccccctcaggatccatttctgcccagtgcaccggcccccgtggcatgggctcatggccgccgacagggcctggggcctattcactcccgcaccaacctgatggacacagaactcatggatgcagactcggacttctgagcctgcagagcaggacctgggacaggaaagagaggaaccaataccttcaaggctcttcttcctcaccgagcatgcttccctaggatcccgtcttccagagaacctgtgggctgactgccctccgaagagagttctggatgtctggctcaaagcagcaggactgtgggaaagagcctaacatctccatggggaggcctcaccccagggacagggccctggagctcagggtccttgtttctgccctgccagctgcagcctggttggcagcatctgctccatcggggcagggggtatgcagagcttgtggtggggcaggaacggtggaggcagaggtgacagttcccagagtgggctttggtggccagggaggcagcctagcctatgtctggcagatgagggctggctgccgttttctgggctgatgggtgccctttcctggcagtctcagtccaaaagtgttgactgtgtcattagtcctttgtctaagtagggccagggcaccgtattcctctcccaggtgtttgtggggctggaaggacctgctcccacaggggccatgtcctctcttaataggtggcactaccccaaacccatcttttgttctcctatatcctccttcttctgttccatttcagttcagtttcagcggtgccaacctctttgcgtttcctttttgttgatgaggacccagagctgctgcacacactcacctctaaccccctcccctcgctgctgggccccatctccacaggagagactggttcagctctagggcctcagtctggagtgggataggagcagtgagtgacaaagcctctgaaagatgcatcatctcttcctcacacccatttagtgggggatgggtcctctagacttgaggggctaccctgggaagctgccgtagcttcagccaggcaagaaagcttccttcaacctgcatagccggtgggtgaggagattcccaccttccatagcctccaaacatgttcccaaggccccactttcaagaatcagacagcaggaagccatagatgctggctgggttccaggttatggggagaagaaatacagtcaataaaaggtttttgtataaa

SEQ ID NO: 3937 - DNA, 831 bp, Homo sapiens
  source 1..831: mol_type = genomic DNA
gcagccgcggtgttgtgctgtggggaagggagaaggatttgtaaaccccggagcgaggttctgcttacccgaggccgctgctgtgcggagacccccgggtgaagccaccgtcatcatgtctgaccaggatagcagtgagattcacttcaaagtgaaaatgacaacacatctcaagaaactcaaagaatcatactgtcaaagacagggtgttccaatgaattcactcaggtttctctttgagggtcagagaattgctgataatcatactccaaaagaactgggaatggaggaagaagatgtgattgaagtttatcaggaacaaacggggggtcattcaacagtttagatattctttttattttttttcttttccctcaatccttttttatttttaaaaatagttcttttgtaatgtggtgttcaaaacggaattgaaaactggcaccccatctctttgaaacatctggtaatttgaattctagtgctcattattcattattgtttgttttcattgtgctgatttttggtgatcaagcctcagtccccttcatattaccctctcctttttaaaaattacgtgtgcacagagaggtcacctttttcaggacattgcattttcaggcttgtggtgataaataagatcgaccaatgcaagtgttcataatgactttccaattggccctgatgttctagcatgtgattacttcactcctggactgtgactttcagtgggagatggaagtttttcagagaactgaactgtggaaaaatgacctttccttaacttgaagctacttttaaaatttgagggtctggaccaaaagaagagga

SEQ ID NO: 3938 - DNA, 1071 bp, Homo sapiens
  source 1..1071: mol_type = genomic DNA
gcggaagtgacgcgaggcgtagcggaagttactgcagccgcggtgttgtgctgtggggaagggagaaggatttgtaaaccccggagcgaggttctgcttacccgaggccgctgctgtgcggagacccccgggtgaagccaccgtcatcatgtctgaccaggaggcaaaaccttcaactgaggacttgggggataagaaggaaggtgaatatattaaactcaaagtcattggacaggatagcagtgagattcacttcaaagtgaaaatgacaacacatctcaagaaactcaaagaatcatactgtcaaagacagggtgttccaatgaattcactcaggtttctctttgagggtcagagaattgctgataatcatactccaaaagaactgggaatggaggaagaagatgtgattgaagtttatcaggaacaaacggggggtcattcaacagtttagttttaaaatttgagggtctggaccaaaagaagaggaatatcaggttgaagtcaagatgacagataaggtgagagtaatgactaactccaaagatggcttcactgaagaaaaggcattttaagattttttaaaaatcttgtcagaagatcccagaaaagttctaattttcattagcaattaataaagctatacatgcagaaatgaatacaacagaacactgctctttttgattttatttgtactttttggcctgggatatgggttttaaatggacattgtctgtaccagcttcattaaaataaacaatatttgtaaaaatcatactaatgcttattttattttaattgtatagaaagaaaaaaatgcctaaaataaggttttcttgcataaatactggaaattgcacatggtacaaattttttcttcattactgtacagtgatgatgttaatgactttgaagcactgaaagttactgaagtgccttctgaatcaaggatttaattaaggccacaatacctttttaatactcagtgttctgtttttttaaaaacttgatattcctgtatggtgcatatatgatacagttacctaatcatgttgaataaatgggcatgcc

SEQ ID NO: 3939 - DNA, 1536 bp, Homo sapiens
  source 1..1536: mol_type = genomic DNA
ctgcgcgaagcggaagtgacgcgaggcgtagcggaagttactgcagccgcggtgttgtgctgtggggaagggagaaggatttgtaaaccccggagcgaggttctgcttacccgaggccgctgctgtgcggagacccccgggtgaagccaccgtcatcatgtctgaccaggaggcaaaaccttcaactgaggacttgggggataagaaggaaggtgaatatattaaactcaaagtcattggacaggatagcagtgagattcacttcaaagtgaaaatgacaacacatctcaagaaactcaaagaatcatactgtcaaagacagggtgttccaatgaattcactcaggtttctctttgagggtcagagaattgctgataatcatactccaaaagaactgggaatggaggaagaagatgtgattgaagtttatcaggaacaaacggggggtcattcaacagtttagatattctttttattttttttcttttccctcaatccttttttatttttaaaaatagttcttttgtaatgtggtgttcaaaacggaattgaaaactggcaccccatctctttgaaacatctggtaatttgaattctagtgctcattattcattattgtttgttttcattgtgctgatttttggtgatcaagcctcagtccccttcatattaccctctcctttttaaaaattacgtgtgcacagagaggtcacctttttcaggacattgcattttcaggcttgtggtgataaataagatcgaccaatgcaagtgttcataatgactttccaattggccctgatgttctagcatgtgattacttcactcctggactgtgactttcagtgggagatggaagtttttcagagaactgaactgtggaaaaatgacctttccttaacttgaagctacttttaaaatttgagggtctggaccaaaagaagaggaatatcaggttgaagtcaagatgacagataaggtgagagtaatgactaactccaaagatggcttcactgaagaaaaggcattttaagattttttaaaaatcttgtcagaagatcccagaaaagttctaattttcattagcaattaataaagctatacatgcagaaatgaatacaacagaacactgctctttttgattttatttgtactttttggcctgggatatgggttttaaatggacattgtctgtaccagcttcattaaaataaacaatatttgtaaaaatcatactaatgcttattttattttaattgtatagaaagaaaaaaatgcctaaaataaggttttcttgcataaatactggaaattgcacatggtacaaattttttcttcattactgtacagtgatgatgttaatgactttgaagcactgaaagttactgaagtgccttctgaatcaaggatttaattaaggccacaatacctttttaatactcagtgttctgtttttttaaaaacttgatattcctgtatggtgcatatatgatacagttacctaatcatgttgaataaatgggcatgccaaaaatt

SEQ ID NO: 3940 - DNA, 534 bp, Homo sapiens
  source 1..534: mol_type = genomic DNA
ccaccgtcatcatgtctgaccaggaggcaaaaccttcaactgaggacttgggggataagaaggaaggtgaatatattaaactcaaagtcattggacagcagtgagattcacttcaaagtgaaaatgacaacacatctcaagaaactcaaagaatcatactgtcaaagacagggtgttccaatgaattcactcaggtttctctttgagggtcagagaattgctgataatcatactccaaaagaactgggaatggaggaagaagatgtgattgaagtttatcaggaacaaacggggggtcattcaacagtttagatattctttttattttttttcttttccctcaatccttttttatttttaaaaatagttcttttgtaatgtggtgttcaaaacggaattgaaaactggcaccccatctctttgaaacatctggtaatttgaattctagtgctcattattcattattgtttgttttcattgtgctgatttttggtgatcaagcctcagtccccttcatattaccctctccttttt

SEQ ID NO: 3941 - DNA, 779 bp, Homo sapiens
  source 1..779: mol_type = genomic DNA
gaggcgtagcggaagttactgcagccgcggtgttgtgctgtggggaagggagaaggatttgtaaaccccggagcgaggttctgcttacccgaggccgctgctgtgcggagacccccgggtgaagccaccgtcatcatgtctgaccaggctctgtggattagactcacctctgcttcttggtgtgtggggcctcagctgagatgactcaagtggctgggggctggaacagctagttgtcaggaggcaaaaccttcaactgaggacttgggggataagaaggaaggtgaatatattaaactcaaagtcattggacaggatagcagtgagattcacttcaaagtgaaaatgacaacacatctcaagaaactcaaagaatcatactgtcaaagacagggtgttccaatgaattcactcaggtttctctttgagggtcagagaattgctgataatcatactccaaaagaactgggaatggaggaagaagatgtgattgaagtttatcaggaacaaacggggggtcattcaacagtttagatattctttttattttttttcttttccctcaatccttttttatttttaaaaatagttcttttgtaatgtggtgttcaaaacggaattgaaaactggcaccccatctctttgaaacatctggtaatttgaattctagtgctcattattcattattgtttgttttcattgtgctgatttttggtgatcaagcctcagtccccttcatattaccctctcctttttaaaaattacgtgtgcacagagag

SEQ ID NO: 3942 - DNA, 1686 bp, Homo sapiens
  source 1..1686: mol_type = genomic DNA
tagcgagtggttcttctgcgctactgctgcgcgaatcggcgaccccagtgcctcgaccactatgccgcgctctttcctcgtcaggaagccctccgaccccaatcggaagcctaactacagcgagctgcaggactctaatccagagtttaccttccagcagccctacgaccaggcccacctgctggcagccatcccacctccggagatcctcaaccccaccgcctcgctgccaatgctcatctgggactctgtcctggcgccccaagcccagccaattgcctgggcctcccttcggctccaggagagtcccagggtggcagagctgacctccctgtcagatgaggacagtgggaaaggctcccagccccccagcccaccctcaccggctccttcgtccttctcctctacttcagtctcttccttggaggccgaggcctatgctgccttcccaggcttgggccaagtgcccaagcagctggcccagctctctgaggccaaggatctccaggctcgaaaggccttcaactgcaaatactgcaacaaggaatacctcagcctgggtgccctcaagatgcacatccgaagccacacgctgccctgcgtctgcggaacctgcgggaaggccttctctaggccctggctgctacaaggccatgtccggacccacactggcgagaagcccttctcctgtccccactgcagccgtgccttcgctgaccgctccaacctgcgggcccacctccagacccactcagatgtcaagaagtaccagtgccaggcgtgtgctcggaccttctcccgaatgtccctgctccacaagcaccaagagtccggctgctcaggatgtccccgctgaccctcgaggctccctcttcctctccatacctgcccctgcctgacagccttccccagctccagcaggaaggaccccacatccttctcactgccatggaattccctcctgagtgccccacttctggccacatcagccccacaggactttgatgaagaccattttctggttctgtgtcctctgcctgggctctggaagaggccttcccatggccatttctgtggagggagggcagctggcccccagccctgggggattcctgagctggcctgtctgcgtgggtttttgtatccagagctgtttggatacagctgctttgagctacaggacaaaggctgacagactcactgggaagctcccaccccactcaggggaccccactcccctcacacacacccccccacaaggaaccctcaggccaccctccacgaggtgtgactaactatgcaataatccacccccaggtgcagccccagggcctgcggaggcggtggcagactagagtctgagatgccccgagcccaggcagctatttcagcctcctgtttggtggggtggcacctgtttcccgggcaatttaacaatgtctgaaaagggactgtgagtaatggctgtcacttgtcgggggcccaagtggggtgctctggtctgaccgatgtgtctcccagaactattctgggggcccgacaggtgggcctgggaggaagatgtttacatttttaaaggtacactggtatttatatttcaaacattttgtatcaaggaaacgttttgtatagttatatgtacagtttattgatattcaataaagcagttaatttatatattaaaaa

SEQ ID NO: 3943 - DNA, 2088 bp, Homo sapiens
  source 1..2088: mol_type = genomic DNA
agttcgtaaaggagccgggtgacttcagaggcgccggcccgtccgtctgccgcacctgagcacggcccctgcccgagcctggcccgccgcgatgctgtagggaccgccgtgtcctcccgccggaccgttatccgcgccgggcgcccgccagacccgctggcaagatgccgcgctccttcctggtcaagaagcatttcaacgcctccaaaaagccaaactacagcgaactggacacacatacagtgattatttccccgtatctctatgagagttactccatgcctgtcataccacaaccagagatcctcagctcaggagcatacagccccatcactgtgtggactaccgctgctccattccacgcccagctacccaatggcctctctcctctttccggatactcctcatctttggggcgagtgagtccccctcctccatctgacacctcctccaaggaccacagtggctcagaaagccccattagtgatgaagaggaaagactacagtccaagctttcagacccccatgccattgaagctgaaaagtttcagtgcaatttatgcaataagacctattcaactttttctgggctggccaaacataagcagctgcactgcgatgcccagtctagaaaatctttcagctgtaaatactgtgacaaggaatatgtgagcctgggcgccctgaagatgcatattcggacccacacattaccttgtgtttgcaagatctgcggcaaggcgttttccagaccctggttgcttcaaggacacattagaactcacacgggggagaagcctttttcttgccctcactgcaacagagcatttgcagacaggtcaaatctgagggctcatctgcagacccattctgatgtaaagaaataccagtgcaaaaactgctccaaaaccttctccagaatgtctctcctgcacaaacatgaggaatctggctgctgtgtagcacactgagtgacgcaatcaatgtttactcgaacagaatgcatttcttcactccgaagccaaatgacaaataaagtccaaaggcattttctcctgtgctgaccaaccaaataatatgtatagacacacacacatatgcacacacacacacacacacccacagagagagagctgcaagagcatggaattcatgtgtttaaagataatcctttccatgtgaagtttaaaattactatatatttgctgatggctagattgagagaataaaagacagtaacctttctcttcaaagataaaatgaaaagcacattgcatcttttcttcctaaaaaaatgcaaagatttacattgctgccaaatcatttcaactgaaaagaacagtattgctttgtaatagagtctgtaataggatttcccataggaagagatctgccagacgcgaactcaggtgccttaaaaagtattccaagtttactccattacatgtcggttgtctggttgccattgttgaactaaagcctttttttgattacctgtagtgctttaaagtatatttttaaaagggaggaaaaaaataacaagaacaaaacacaggagaatgtattaaaagtatttttgttttgttttgtttttgccaattaacagtatgtgccttgggggaggagggaaagattagctttgaacattcctggcgcatgctccattgtcttactattttaaaacattttaataatttttgaaaattaattaaagatgggaataagtgcaaaagaggattcttacaaattcattaatgtacttaaactatttcaaatgcataccacaaatgcaataatacaataccccttccaagtgcctttttaaattgtatagttgatgagtcaatgtaaatttgtgtttatttttatatgattgaatgagttctgtatgaaactgagatgttgtctatagctatgtctataaacaacctgaagacttgtgaaatcaatgtttcttttttaaaaaacaattttcaagttttttttacaataaacagttttgatttaaaatctcgtttgtatactattttcagagactttacttgcttcatgattagtaccaaaccactgtacaaagaattgtttgtt

SEQ ID NO: 3944 - DNA, 2204 bp, Homo sapiens
  source 1..2204: mol_type = genomic DNA
tctggaagccaggcgggcagggcagagaccccggctcctgcgcccctcctagctcccagagagcgtggatcgcgggcggggctcaccgagcgagctgtcccagagggaggagctgaaatctgaacctctcagctgtgattggatctttcttgcaaaagagaggaaaaaaaaaccctcccagccaaaacgggctcagttcgtaaaggagccgggtgacttcagaggcgccggcccgtccgtctgccgcacctgagcacggcccctgcccgagcctggcccgccgcgatgctgtagggaccgccgtgtcctcccgccggaccgttatccgcgccgggcgcccgccagacccgctggcaagatgccgcgctccttcctggtcaagaagcatttcaacgcctccaaaaagccaaactacagcgaactggacacacatacagtgattatttccccgtatctctatgagagttactccatgcctgtcataccacaaccagagatcctcagctcaggagcatacagccccatcactgtgtggactaccgctgctccattccacgcccagctacccaatggcctctctcctctttccggatactcctcatctttggggcgagtgagtccccctcctccatctgacacctcctccaaggaccacagtggctcagaaagccccattagtgatgaagaggaaagactacagtccaagctttcagacccccatgccattgaagctgaaaagtttcagtgcaatttatgcaataagacctattcaactttttctgggctggccaaacataagcagctgcactgcgatgcccagtctagaaaatctttcagctgtaaatactgtgacaaggaatatgtgagcctgggcgccctgaagatgcatattcggacccacacattaccttgtgtttgcaagatctgcggcaaggcgttttccagaccctggttgcttcaaggacacattagaactcacacgggggagaagcctttttcttgccctcactgcaacagagcatttgcagacaggtcaaatctgagggctcatctgcagacccattctgatgtaaagaaataccagtgcaaaaactgctccaaaaccttctccagaatgtctctcctgcacaaacatgaggaatctggctgctgtgtagcacactgagtgacgcaatcaatgtttactcgaacagaatgcatttcttcactccgaagccaaatgacaaataaagtccaaaggcattttctcctgtgctgaccaaccaaataatatgtatagacacacacacatatgcacacacacacacacacacccacagagagagagctgcaagagcatggaattcatgtgtttaaagataatcctttccatgtgaagtttaaaattactatatatttgctgatggctagattgagagaataaaagacagtaacctttctcttcaaagataaaatgaaaagcacattgcatcttttcttcctaaaaaaatgcaaagatttacattgctgccaaatcatttcaactgaaaagaacagtattgctttgtaatagagtctgtaataggatttcccataggaagagatctgccagacgcgaactcaggtgccttaaaaagtattccaagtttactccattacatgtcggttgtctggttgccattgttgaactaaagcctttttttgattacctgtagtgctttaaagtatatttttaaaagggaggaaaaaaataacaagaacaaaacacaggagaatgtattaaaagtatttttgttttgttttgtttttgccaattaacagtatgtgccttgggggaggagggaaagattagctttgaacattcctggcgcatgctccattgtcttactattttaaaacattttaataatttttgaaaattaattaaagatgggaataagtgcaaaagaggattcttacaaattcattaatgtacttaaactatttcaaatgcataccacaaatgcaataatacaataccccttccaagtgcctttttaaattgtatagttgatgagtcaatgtaaatttgtgtttatttttatatgattgaatgagttctgtatgaaactgagatgttgtctatagctatgtctataaacaacctgaagacttgtgaaatcaatgtttcttttttaaaaaacaattttcaagttttttttacaataaacagttttgatttaaaa

SEQ ID NO: 3945 - DNA, 1713 bp, Homo sapiens
  source 1..1713: mol_type = genomic DNA
cagcagtccggacccaggcgcgcccctcccgccccagcccaccccggcctgccgcccgggaggggaacatgccgcgctccttcctggtgaaaacgcactccagccacagggtccccaactaccggcggctggagacgcagagagaaatcaatggtgcctgctctgcctgtggggggctggtggtgcccctcctcccccgagacaaggaggccccttctgtgcccggtgaccttccccagccctgggaccgctcctcggccgtcgcctgcatctccctgcccctcctgccacggatcgaggaagctctgggggcctctgggctggacgccttggaagtcagcgaggtcgaccctcgggccagccgggccgccattgtacccctcaaagacagcctgaaccacctcaacctgcccccactgctggtgctgcccacacggtggtccccgaccttgggcccagaccggcacggggctccggaaaaactgcttggggctgagcggatgccccgagccccgggcggctttgagtgcttccactgccacaaaccctaccacacgctggccgggctggccaggcaccggcagctgcactgccacctgcaggtggggcgtgtcttcacctgcaagtactgcgacaaggagtacaccagcctgggtgccctcaagatgcacatccgcactcacacgctgccctgcacctgcaagatctgtggcaaggccttctccaggccctggttactgcagggccatgtccgcacccacacaggggagaagccctatgcctgctcgcactgcagcagggcctttgccgaccgctccaaccttcgggcccatctgcaaacgcactcagacgccaagaagtaccggtgccggcgctgcaccaagaccttctcccgcatgtccctcctggcgcggcatgaggagtctggctgctgcccgggcccctgagaggcacgtggtcggcgcaggtaggagggatggtcctcaccgggagagctggcgtccctcctgcccccagaggagccaggagtctgggagggcggggcctggcctcacacttggtgcgtcctccacatctgcgtccaatcagaaccaaagaagtccagcgggggccactgggccggaggacactcccccaggcatcccaccgcgcggagcccactcagaggagactcctctcccggggaaggctttcatcagaacaagagccatggttccatttcgacacggccaggtctccggggctacccttccaagagtcagagcctcggggaggtggccgccagcatgggccggcactgccgccggatggctggcaaggctgcctagttccattgcagcagaaatgaacagttctgacttatagtgagcaccgccctgtggcccttcctcagtaggcacaactacctctcagccagcccccgccagcctttggtttggggtctgggacgagctgccccatgtcacacgtctatgtgcatgtgcacacacactcaaacatgtacacacacgtgccctccccacctcactagactctccgggagatggggcaggactgggagagcccacgattggtgatttgggtgtgttgggatgaggcggagtgcctgtgggatttgtcccggtcagagcctcagggggctggggtctcagggcactcagcttcccaggcaataacagccgtggggtaataaatggtctctgcacacctgca

SEQ ID NO: 3946 - DNA, 4830 bp, Homo sapiens
  source 1..4830: mol_type = genomic DNA
tccttggccttgcatggcctgtttatttttaaaagtgcaaacttgcaaccccaaacaagctggggccctgaggccgtcaacccctccagtctcccctgtgacccgcagtctgcgtcctgttcccagtttcattcctcaagtgcatatatttttatttttttattttttttttgagacagagtctcgctctgtggcccaggttggagcgcagtcgcgcgatctcggctcactgcaagctctgcctcctgggttcacgccattctcctgcctcagcctcccgagtagctgggactacaggcgcctgccactgcgcccagctaattttttttatttttagtagagacggggtttcaccgtgttagccaggatggtctcgatctcctgacctcgtgatccgcccgccttggccccccaaagtgctgggattacaggcgtgagccaccgcgcccggcctcagtgcatatatttttaatatcttgtagttaccctgctgtatactgtcatcttagggaccttttaaacaataccagtatgagcgggacctaccctgctgctcagtgaccccaggcagtgtgtcctaaggtggtgtgtcctgaggcgtgcgacactctgtcctgtcccaggcactgtggtgggggcatccggtgtccaggtgcagaggcaaaagctgctcccgggtttcccagaaatggttccgaggcctgggtcccagagagccagtgcaggttggggggtggacctctggctctgtgggggggtctgttctgctccagtgggccgtgtctgccttgtcatcatccagacagccacagctggctcctgggtcccctcgtcaagcagcatttcccagtaacagtgacttcgtggaacacttaggaagcccttaaaaaccatcctcggacctctgaggcagggactccagggggcacagcacctgtggtggggacaggcaggcaggctggatgcggggagggcccgggaggaggagtgaggagccacgcacggaactgctcagactctcccagcaaaggtcctggcccttgtgcatgcctttagttacatgtctgccttagaggcaaagacgagccgtcacgggggacccaccgggtcaggggtctgcggacacgcttgcaggaggaacccaaggaaagggggtgggggtggagccccacagattgcgtcgtgggtgggcgtggagcttgcacagcaggcctgctgctgcctcccagggcgctggttcacagcacggtcccagcagggagaggctgagccggttggactagaccacccaaggtctcaggttgcagctccctggtgaggagaggacaaggtgacttctgggtggggtggggcatgaagatggaagtctgacctcgggttccaacttgactcaaacgagctgagctcctggagtttagaaagggacaccagcttcagacatcgtgggggctggcatggtttgctctcgtgggctggatgggagcctccctagcccctcctgatttcaggctgcagcctatgggtcactccaggcacaggtggggtgagtcaagatctcactggaggagtcactgagcaagagggccggtgggaggcaagggggcatccagggacaaggggccagctctgcccccacttccccaccccacccactctaatactgcagcccctgtgcttccaactgccccctccagcctggggcccagcccctcaccgccagagactgcccgcctcctcttgggcaagctcctggtgggctccactgaagccaaagtgggcccttgggggcaggagagccagagcaaggcacgctccacctagatttagaccgggagagacctggaggatgccaaccccagaggtcctggggcgagctcagtgctggggaccggaggtgccgtctgctgccagaatcatggtgtgcgtggtccctgcccagcacgggtcagccagagcgagccagggcagaaatgacggccaggtcgatgttcctgtcgggggctgcttgtcccaggaggtaatctgagtcctggccgagcccaaaaaagccactgccctttagagccagctgtgagggtgcaggaggcagtgcagagggagtgggacccacagctgctagcctccctccaaaccctcctgcctccaccagacaccaggtcagggggccacaagtgtgggtgccgggcagctgcccctcagctgagctgccgggccacccagctcgtgtccctcccctgccaggctgcagctgggatggtcacccgggcagcctgagtcagcctgctttctctctcaggtgaggcggaaccaaccctcctggccatgggaggggccgtggtggacgagggccccacaggcgtcaaggcccctgacggcggctggggctgggccgtgctcttcggctgtttcgtcatcactggcttctcctacgccttccccaaggccgtcagtgtcttcttcaaggagctcatacaggagtttgggatcggctacagcgacacagcctggatctcctccatcctgctggccatgctctacgggacaggtccgctctgcagtgtgtgcgtgaaccgctttggctgccggcccgtcatgcttgtggggggtctctttgcgtcgctgggcatggtggctgcgtccttttgccggagcatcatccaggtctacctcaccactggggtcatcacggggttgggtttggcactcaacttccagccctcgctcatcatgctgaaccgctacttcagcaagcggcgccccatggccaacgggctggcggcagcaggtagccctgtcttcctgtgtgccctgagcccgctggggcagctgctgcaggaccgctacggctggcggggcggcttcctcatcctgggcggcctgctgctcaactgctgcgtgtgtgccgcactcatgaggcccctggtggtcacggcccagccgggctcggggccgccgcgaccctcccggcgcctgctagacctgagcgtcttccgggaccgcggctttgtgctttacgccgtggccgcctcggtcatggtgctggggctcttcgtcccgcccgtgttcgtggtgagctacgccaaggacctgggcgtgcccgacaccaaggccgccttcctgctcaccatcctgggcttcattgacatcttcgcgcggccggccgcgggcttcgtggcggggcttgggaaggtgcggccctactccgtctacctcttcagcttctccatgttcttcaacggcctcgcggacctggcgggttctacggcgggcgactacggcggcctcgtggtcttctgcatcttctttggcatctcctacggcatggtgggggccctgcagttcgaggtgctcatggccatcgtgggcacccacaagttctccagtgccattggcctggtgctgctgatggaggcggtggccgtgctcgtcgggcccccttcgggaggcaaactcctggatgcgacccacgtctacatgtacgtgttcatcctggcgggggccgaggtgctcacctcctccctgattttgctgctgggcaacttcttctgcattaggaagaagcccaaagagccacagcctgaggtggcggccgcggaggaggagaagctccacaagcctcctgcagactcgggggtggacttgcgggaggtggagcatttcctgaaggctgagcctgagaaaaacggggaggtggttcacaccccggaaacaagtgtctgagtggctgggcggggccggcaggcacagggaggaggtacagaagccggcaacgcttgctatttattttacaaactggactggctcaggcagggccacggctgggctccagctgccggcccagcggatcgtcgcccgatcagtgttttgagggggaaggtggcggggtgggaaccgtgtcattccagagtggatctgcggtgaagccaagccgcaaggttacaaggcatcctcaccaggggccccgcctgctgctcccaggtggcctgcggccactgctatgctcaaggacctggaaacccatgcttcgagacaacgtgactttaatgggagggtgggtgggccgcagacaggctggcagggcaggtgctgcgtggggccctctccagcccgtcctaccctgggctcacatggggcctgtgcccacccctcttgagtgtcttggggacagctctttccacccctggaagatggaaataaacctgcgtgtgggtggagtgttaggaccaacggtttcctaggagtatgtggttttgctgtgtggcctgtgtcctgactcgcacgtctgctgatggcctggctgttcctaccgtggctctgtcctcgccagctttccctgcagcggcatagcattcgtagcaggggcaggcgctgcatggagggggctgcggggcaggtgcctggaggccgctgtgccagggtggcctctgaaatgtgccagggagcccctacgtggtggttagatgggagctgaggtggaacaagccactttattcactgctgtgtttaagaaacaggaccctcctgccttccctttttcgcccctctgcctggctggcagtgtgcgtggtgtggtcagtgcccagggctggtctttgcaccctgtcctccatccagcccggcccagcgcttgggcttgtcctggacacctaacacccacctgccctcgtggccagcagtggcctgcgtggctgggagcccggtcagaggccgccggggccctcagtaggtgcgtcgtgggcgctggggacggcagcgggtgccctggcgggccgcgtgcagccggagagatgccatgtccctgctcctctgcaatgaaaagcaagcgaaaag

SEQ ID NO: 3947 - DNA, 2002 bp, Homo sapiens
  source 1..2002: mol_type = genomic DNA
ggagcggaccggcagaggcgggcagaggcggcgagaggcggcgagaggcgggctgaggcggcccagcggcggcaggtgaggcggaaccaaccctcctggccatgggaggggccgtggtggacgagggccccacaggcgtcaaggcccctgacggcggctggggctgggccgtgctcttcggctgtttcgtcatcactggcttctcctacgccttccccaaggccgtcagtgtcttcttcaaggagctcatacaggagtttgggatcggctacagcgacacagcctggatctcctccatcctgctggccatgctctacgggacaggtccgctctgcagtgtgtgcgtgaaccgctttggctgccggcccgtcatgcttgtggggggtctctttgcgtcgctgggcatggtggctgcgtccttttgccggagcatcatccaggtctacctcaccactggggtcatcacggggttgggtttggcactcaacttccagccctcgctcatcatgctgaaccgctacttcagcaagcggcgccccatggccaacgggctggcggcagcaggtagccctgtcttcctgtgtgccctgagcccgctggggcagctgctgcaggaccgctacggctggcggggcggcttcctcatcctgggcggcctgctgctcaactgctgcgtgtgtgccgcactcatgaggcccctggtggtcacggcccagccgggctcggggccgccgcgaccctcccggcgcctgctagacctgagcgtcttccgggaccgcggctttgtgctttacgccgtggccgcctcggtcatggtgctggggctcttcgtcccgcccgtgttcgtggtgagctacgccaaggacctgggcgtgcccgacaccaaggccgccttcctgctcaccatcctgggcttcattgacatcttcgcgcggccggccgcgggcttcgtggcggggcttgggaaggtgcggccctactccgtctacctcttcagcttctccatgttcttcaacggcctcgcggacctggcgggttctacggcgggcgactacggcggcctcgtggtcttctgcatcttctttggcatctcctacggcatggtgggggccctgcagttcgaggtgctcatggccatcgtgggcacccacaagttctccagtgccattggcctggtgctgctgatggaggcggtggccgtgctcgtcgggcccccttcgggaggcaaactcctggatgcgacccacgtctacatgtacgtgttcatcctggcgggggccgaggtgctcacctcctccctgattttgctgctgggcaacttcttctgcattaggaagaagcccaaagagccacagcctgaggtggcggccgcggaggaggagaagctccacaagcctcctgcagactcgggggtggacttgcgggaggtggagcatttcctgaaggctgagcctgagaaaaacggggaggtggttcacaccccggaaacaagtgtctgagtggctgggcggggccggcaggcacagggaggaggtacagaagccggcaacgcttgctatttattttacaaactggactggctcaggcagggccacggctgggctccagctgccggcccagcggatcgtcgcccgatcagtgttttgagggggaaggtggcggggtgggaaccgtgtcattccagagtggatctgcggtgaagccaagccgcaaggttacaaggcatcctcaccaggggccccgcctgctgctcccaggtggcctgcggccactgctatgctcaaggacctggaaacccatgcttcgagacaacgtgactttaatgggagggtgggtgggccgcagacaggctggcagggcaggtgctgcgtggggccctctccagcccgtcctaccctgggctcacatggggcctgtgcccacccctcttgagtgtcttggggacagctctttccacccctggaagatggaaataaacctgcgtgtgggtggagtgttagga

SEQ ID NO: 3948 - DNA, 2033 bp, Homo sapiens
  source 1..2033: mol_type = genomic DNA
ggccactgcacggacccagggaacgggctgacagtccagcagaggcctcagcgaggcggcggcgctgcgcacaaacctgaggacctaggcgggtgaggcggaaccaaccctcctggccatgggaggggccgtggtggacgagggccccacaggcgtcaaggcccctgacggcggctggggctgggccgtgctcttcggctgtttcgtcatcactggcttctcctacgccttccccaaggccgtcagtgtcttcttcaaggagctcatacaggagtttgggatcggctacagcgacacagcctggatctcctccatcctgctggccatgctctacgggacaggtccgctctgcagtgtgtgcgtgaaccgctttggctgccggcccgtcatgcttgtggggggtctctttgcgtcgctgggcatggtggctgcgtccttttgccggagcatcatccaggtctacctcaccactggggtcatcacggggttgggtttggcactcaacttccagccctcgctcatcatgctgaaccgctacttcagcaagcggcgccccatggccaacgggctggcggcagcaggtagccctgtcttcctgtgtgccctgagcccgctggggcagctgctgcaggaccgctacggctggcggggcggcttcctcatcctgggcggcctgctgctcaactgctgcgtgtgtgccgcactcatgaggcccctggtggtcacggcccagccgggctcggggccgccgcgaccctcccggcgcctgctagacctgagcgtcttccgggaccgcggctttgtgctttacgccgtggccgcctcggtcatggtgctggggctcttcgtcccgcccgtgttcgtggtgagctacgccaaggacctgggcgtgcccgacaccaaggccgccttcctgctcaccatcctgggcttcattgacatcttcgcgcggccggccgcgggcttcgtggcggggcttgggaaggtgcggccctactccgtctacctcttcagcttctccatgttcttcaacggcctcgcggacctggcgggttctacggcgggcgactacggcggcctcgtggtcttctgcatcttctttggcatctcctacggcatggtgggggccctgcagttcgaggtgctcatggccatcgtgggcacccacaagttctccagtgccattggcctggtgctgctgatggaggcggtggccgtgctcgtcgggcccccttcgggaggcaaactcctggatgcgacccacgtctacatgtacgtgttcatcctggcgggggccgaggtgctcacctcctccctgattttgctgctgggcaacttcttctgcattaggaagaagcccaaagagccacagcctgaggtggcggccgcggaggaggagaagctccacaagcctcctgcagactcgggggtggacttgcgggaggtggagcatttcctgaaggctgagcctgagaaaaacggggaggtggttcacaccccggaaacaagtgtctgagtggctgggcggggccggcaggcacagggaggaggtacagaagccggcaacgcttgctatttattttacaaactggactggctcaggcagggccacggctgggctccagctgccggcccagcggatcgtcgcccgatcagtgttttgagggggaaggtggcggggtgggaaccgtgtcattccagagtggatctgcggtgaagccaagccgcaaggttacaaggcatcctcaccaggggccccgcctgctgctcccaggtggcctgcggccactgctatgctcaaggacctggaaacccatgcttcgagacaacgtgactttaatgggagggtgggtgggccgcagacaggctggcagggcaggtgctgcgtggggccctctccagcccgtcctaccctgggctcacatggggcctgtgcccacccctcttgagtgtcttggggacagctctttccacccctggaagatggaaataaacctgcgtgtgggtggagtgttaggaccaacggtttccta

SEQ ID NO: 3949 - DNA, 2054 bp, Homo sapiens
  source 1..2054: mol_type = genomic DNA
cggaagttcagggagggcgaggccgtgccccacatccaggcagcgcaggccgcgggccgctcccctagccaggaagagccgccgtccgcaccgggaccggagaggaagcggaggtgaggcggaaccaaccctcctggccatgggaggggccgtggtggacgagggccccacaggcgtcaaggcccctgacggcggctggggctgggccgtgctcttcggctgtttcgtcatcactggcttctcctacgccttccccaaggccgtcagtgtcttcttcaaggagctcatacaggagtttgggatcggctacagcgacacagcctggatctcctccatcctgctggccatgctctacgggacaggtccgctctgcagtgtgtgcgtgaaccgctttggctgccggcccgtcatgcttgtggggggtctctttgcgtcgctgggcatggtggctgcgtccttttgccggagcatcatccaggtctacctcaccactggggtcatcacggggttgggtttggcactcaacttccagccctcgctcatcatgctgaaccgctacttcagcaagcggcgccccatggccaacgggctggcggcagcaggtagccctgtcttcctgtgtgccctgagcccgctggggcagctgctgcaggaccgctacggctggcggggcggcttcctcatcctgggcggcctgctgctcaactgctgcgtgtgtgccgcactcatgaggcccctggtggtcacggcccagccgggctcggggccgccgcgaccctcccggcgcctgctagacctgagcgtcttccgggaccgcggctttgtgctttacgccgtggccgcctcggtcatggtgctggggctcttcgtcccgcccgtgttcgtggtgagctacgccaaggacctgggcgtgcccgacaccaaggccgccttcctgctcaccatcctgggcttcattgacatcttcgcgcggccggccgcgggcttcgtggcggggcttgggaaggtgcggccctactccgtctacctcttcagcttctccatgttcttcaacggcctcgcggacctggcgggttctacggcgggcgactacggcggcctcgtggtcttctgcatcttctttggcatctcctacggcatggtgggggccctgcagttcgaggtgctcatggccatcgtgggcacccacaagttctccagtgccattggcctggtgctgctgatggaggcggtggccgtgctcgtcgggcccccttcgggaggcaaactcctggatgcgacccacgtctacatgtacgtgttcatcctggcgggggccgaggtgctcacctcctccctgattttgctgctgggcaacttcttctgcattaggaagaagcccaaagagccacagcctgaggtggcggccgcggaggaggagaagctccacaagcctcctgcagactcgggggtggacttgcgggaggtggagcatttcctgaaggctgagcctgagaaaaacggggaggtggttcacaccccggaaacaagtgtctgagtggctgggcggggccggcaggcacagggaggaggtacagaagccggcaacgcttgctatttattttacaaactggactggctcaggcagggccacggctgggctccagctgccggcccagcggatcgtcgcccgatcagtgttttgagggggaaggtggcggggtgggaaccgtgtcattccagagtggatctgcggtgaagccaagccgcaaggttacaaggcatcctcaccaggggccccgcctgctgctcccaggtggcctgcggccactgctatgctcaaggacctggaaacccatgcttcgagacaacgtgactttaatgggagggtgggtgggccgcagacaggctggcagggcaggtgctgcgtggggccctctccagcccgtcctaccctgggctcacatggggcctgtgcccacccctcttgagtgtcttggggacagctctttccacccctggaagatggaaataaacctgcgtgtgggtggagtgttaggaccaacggtttccta

SEQ ID NO: 3950 - DNA, 1884 bp, Homo sapiens
  source 1..1884: mol_type = genomic DNA
agccgcgcgcccgccgcgccgccttgtgggcgctgtagtcccggagtccgcgtgcgcggggccgggtccgggagccccagggcagccgccccgccgagtcgcaggcacagcgtcaccttcgtcccctccggagctgcacgtggcctgagcaggatggtgccctccagcccagcggtggagaagcaggtgcccgtggaacctgggcctgaccccgagctccggtcctggcggcacctcgtgtgctacctttgcttctacggcttcatggcgcagatacggccaggggagagcttcatcaccccctacctcctggggcccgacaagaacttcacgcgggagcaggtcacgaacgagatcacgccggtgctgtcgtactcctacctggccgtgctggtgcccgtgttcctgctcaccgactacctgcgctacacgccggtgctgctgctgcaggggctcagcttcgtgtcggtgtggctgctgctgctgctgggccactcggtggcgcacatgcagctcatggagctcttctacagcgtcaccatggccgcgcgcatcgcctattcctcctacatcttctctctcgtgcggcccgcgcgctaccagcgtgtggccggctactcgcgcgctgcggtgctgctgggcgtgttcaccagctccgtgctgggccagctgctggtcactgtgggccgagtctccttctccacgctcaactacatctcgctggccttcctcaccttcagcgtggtcctcgccctcttcctgaagcgccccaagcgcagcctcttcttcaaccgcgacgaccgggggcggtgcgaaacctcggcttcggagctggagcgcatgaatcctggcccaggcgggaagctgggacacgccctgcgggtggcctgtggggactcagtgctggcgcggatgctgcgggagctgggggacagcctgcggcggccgcagctgcgcctgtggtccctctggtgggtcttcaactcggccggctactacctggtggtctactacgtgcacatcctgtggaacgaggtggaccccaccaccaacagtgcgcgggtctacaacggcgcggcagatgctgcctccacgctgctgggcgccatcacgtccttcgccgcgggcttcgtgaagatccgctgggcgcgctggtccaagctgctcatcgcgggcgtcacggccacgcaggcggggctggtcttccttctggcgcacacgcgccacccgagcagcatctggctgtgctatgcggccttcgtgctgttccgcggctcctaccagttcctcgtgcccatcgccacctttcagattgcatcttctctgtctaaagagctctgtgccctggtcttcggggtcaacacgttctttgccaccatcgtcaagaccatcatcactttcattgtctcggacgtgcggggcctgggcctcccggtccgcaagcagaatgaagaactgcatgtggcttctctgtctctgtggaaaagccatctcaggttggcggcagacacattgtcatcagaggggagcagcggctctggtcctcggagctggttcctctctcccaccctaagggcagccctccatggtcctgtctgtccttctgaagtgtgtccatcctgacctgcgggtcctcagctgctcccacacttgtgccagcccggaggggactggtcccggtcaccgcggacgtgctggccttggtatgtgccaggcttgcctgggctgggcagccttgggggggctgcctttgtggtgggcgctggggaagtacgtcccagcggcctcagggtctaaggagcgctagtgccttgcccacaggtgcgggaccatctgatgtgatgtgaatactcttcccacatacattaaacacacttaagtgag

SEQ ID NO: 3951 - DNA, 3811 bp, Homo sapiens
  source 1..3811: mol_type = genomic DNA
agccgcgcgcccgccgcgccgccttgtgggcgctgtagtcccggagtccgcgtgcgcggggccgggtccgggagccccagggcagccgccccgccgagtcgcaggcacagcgtcaccttcgtcccctccggagctgcacgtggcctgagcaggatggtgccctccagcccagcggtggagaagcaggtgcccgtggaacctgggcctgaccccgagctccggtcctggcggcacctcgtgtgctacctttgcttctacggcttcatggcgcagatacggccaggggagagcttcatcaccccctacctcctggggcccgacaagaacttcacgcgggagcaggtcacgaacgagatcacgccggtgctgtcgtactcctacctggccgtgctggtgcccgtgttcctgctcaccgactacctgcgctacacgccggtgctgctgctgcaggggctcagcttcgtgtcggtgtggctgctgctgctgctgggccactcggtggcgcacatgcagctcatggagctcttctacagcgtcaccatggccgcgcgcatcgcctattcctcctacatcttctctctcgtgcggcccgcgcgctaccagcgtgtggccggctactcgcgcgctgcggtgctgctgggcgtgttcaccagctccgtgctgggccagctgctggtcactgtgggccgagtctccttctccacgctcaactacatctcgctggccttcctcaccttcagcgtggtcctcgccctcttcctgaagcgccccaagcgcagcctcttcttcaaccgcgacgaccgggggcggtgcgaaacctcggcttcggagctggagcgcatgaatcctggcccaggcgggaagctgggacacgccctgcgggtggcctgtggggactcagtgctggcgcggatgctgcgggagctgggggacagcctgcggcggccgcagctgcgcctgtggtccctctggtgggtcttcaactcggccggctactacctggtggtctactacgtgcacatcctgtggaacgaggtggaccccaccaccaacagtgcgcgggtctacaacggcgcggcagatgctgcctccacgctgctgggcgccatcacgtccttcgccgcgggcttcgtgaagatccgctgggcgcgctggtccaagctgctcatcgcgggcgtcacggccacgcaggcggggctggtcttccttctggcgcacacgcgccacccgagcagcatctggctgtgctatgcggccttcgtgctgttccgcggctcctaccagttcctcgtgcccatcgccacctttcagattgcatcttctctgtctaaagagctctgtgccctggtcttcggggtcaacacgttctttgccaccatcgtcaagaccatcatcactttcattgtctcggacgtgcggggcctgggcctcccggtccgcaagcagttccagttatactccgtgtacttcctgatcctgtccatcatctacttcttgggggccatgctggatggcctgcggcactgccagcggggccaccacccgcggcagcccccggcccagggcctgaggagtgccgcggaggagaaggcagcacaggcactgagcgtgcaggacaagggcctcggaggcctgcagccagcccagagcccgccgctttccccagaagacagcctgggggctgtggggccagcctccctggagcagagacagagcgacccatacctggcccaggccccggccccgcaggcagctgaattcctgagcccagtgacaaccccttccccctgcactctgtgctccgcccaagcctcaggccctgaggctgcagatgagacttgtccccagctggctgtccatcctcctggtgtcagcaagctgggtttgcagtgtcttccaagcgacggtgttcagaatgtgaaccagtgactctcgggcgcccctgtggtaactttgcaggcggccctcagtgcatccccacgacccctgcctcgagggccgcctgccttagcaatgggggcctccgcttatcctgctagcaggccccctaggattccccctgccctgtgccgcactctggcggtggccacagcgtgctggcgacactcagggcagctgcctggccatgctgtccctgcactgtgccccgcgggctttgttgctggaagaggtgggtggtgggcttctgcgtccaccaggcctcactggctcatgccccttggggggcttgagacaaatcctttctgccccccagggctagtgaagtggcctcttggataccagctcaggggacactggccccacaggagttgtgagccctctagggcagggtgggagccgggaccctcaggtgtagctgagctgtgacattgctggtcatccttggtgctcttgcttttttgaaagatgctttttttttttttaactgacgtagaatgaagaactgcatgtggcttctctgtctctgtggaaaagccatctcaggttggcggcagacacattgtcatcagaggggagcagcggctctggtcctcggagctggttcctctctcccaccctaagggcagccctccatggtcctgtctgtccttctgaagtgtgtccatcctgacctgcgggtcctcagctgctcccacacttgtgccagcccggaggggactggtcccggtcaccgcggacgtgctggccttggtatgtgccaggcttgcctgggctgggcagccttgggggggctgcctttgtggtgggcgctggggaagtacgtcccagcggcctcagggtctaaggagcgctagtgccttgcccacaggtgcgggaccatctgatgtgatgtgaatactcttcccacatacattaaacacacttaagtgagtgtgcgcagggcttctgattcagggccggcctggcctgggggttgagggtcagcagtcagtgaggaggccaggagaggcgtcccagccttctcccgcctccagcccacgcagggccttggtgcccatgagctgagcacccccacaaccctagtcaacggccctatcctgtggggcctctgccacatctcagcggccccaggtgaatggctggctgctcagcacggagagctggggagagaatctctggctggggaggggctgctggagctgctggacccaggggtctcccgaggtggctcaggggagcaggcatcttggggtaccctgggttgaggcagaggctgcacgtggaagatggcccgagtcagtggatggtgccagtcagacagggccatggtcccaggtgcatccaggggctctgtcatggccaccctggggaccctgcttgggggggggtctgcaccagccatttcctgggctcgtagatctagcaggatgtgatgggtggaggtgggctgggcctgtgccatgggctagagcgtcactggggaggcccacaccgccatcagaatcctcctcccagcgcctccccaacctgagggcctgctccctccgcagcctgctcactgcacccactgcctgcctgcctctgagtcctgcactcacccgtccaccaggacagggatggctgtcaggatgtagtgttgctgggagcaagtcaggtcctgctgtgaggagagacctaagagtgttggtgtgtgtccacacacccgtgcatgcctgtgtacctgtgcacactatggatgctcctgcacacctgtgtacaactgcacgcctgtgtatggccatgcatgcataccccatgtaaccgtgcgtgcctgtgcacactcgggatctgccagtggggcagtccagggataaaagactcctgagaactc

SEQ ID NO: 3952 - DNA, 1724 bp, Homo sapiens
  source 1..1724: mol_type = genomic DNA
gtagtcccggagtccgcgtgcgcggggccgggtccgggagccccagggcagccgccccgccgagtcgcaggcacagcgtcaccttcgtcccctccggagctgcacgtggcctgagcaggatggtgccctccagcccagcggtggagaagcaggtgcccgtggaacctgggcctgaccccgagctccggtcctggcggcacctcgtgtgctacctttgcttctacggcttcatggcgcagatacggccaggggagagcttcatcaccccctacctcctggggcccgacaagaacttcacgcgggagcaggtcacgaacgagatcacgccggtgctgtcgtactcctacctggccgtgctggtgcccgtgttcctgctcaccgactacctgcgctacacgccggtgctgctgctgcaggggctcagcttcgtgtcggtgtggctgctgctgctgctgggccactcggtggcgcacatgcagctcatggagctcttctacagcgtcaccatggccgcgcgcatcgcctattcctcctacatcttctctctcgtgcggcccgcgcgctaccagcgtgtggccggctactcgcgcgctgcggtgctgctgggcgtgttcaccagctccgtgctgggccagctgctggtcactgtgggccgagtctccttctccacgctcaactacatctcgctggccttcctcaccttcagcgtggtcctcgccctcttcctgaagcgccccaagcgcagcctcttcttcaaccgcgacgaccgggggcggtgcgaaacctcggcttcggagctggagcgcatgaatcctggcccaggcgggaagctgggacacgccctgcgggtggcctgtggggactcagtgctggcgcggatgctgcgggagctgggggacagcctgcggcggccgcagctgcgcctgtggtccctctggtgggtcttcaactcggccggctactacctggtggtctactacgtgcacatcctgtggaacgaggtggaccccaccaccaacagtgcgcgggtctacaacggcgcggcagatgctgcctccacgctgctgggcgccatcacgtccttcgccgcgggcttcgtgaagatccgctgggcgcgctggtccaagctgctcatcgcgggcgtcacggccacgcaggcggggctggtcttccttctggcgcacacgcgccacccgagcagcatctggctgtgctatgcggccttcgtgctgttccgcggctcctaccagttcctcgtgcccatcgccacctttcagattgcatcttctctgtctaaagagctctgtgccctggtcttcggggtcaacacgttctttgccaccatcgtcaagaccatcatcactttcattgtctcggacgtgcggggcctgggcctcccggtccgcaagcaggccttaaggatgtcccggcccagactcggcctctgcctgcctggtcccttcccaccccagagtgcagccccagcaagagcaggtatggcggcctcctctgcagaggaccctggcagcgagaggggaccctggcggcgagcggggaccgtggcggcgagaggggaccctggcggcgagaggggaccgtggcggcgagaggggaccctggcggcgagaggggaccctggcggcgagaggggaccgtggtggcgagagggaaccctggcggcaaaaccgagaatgcagtgggtcactcgggccacggctccctga

SEQ ID NO: 3953 - DNA, 3572 bp, Homo sapiens
  source 1..3572: mol_type = genomic DNA
agctgcgcctgtggtccctctggtgggtcttcaactcggccggctactacctggtggtctactacgtgcacatcctgtggaacgaggtggaccccaccaccaacagtgcgcgggtctacaacggcgcggcagatgctgcctccacgctgctgggcgccatcacgtccttcgccgcgggcttcgtgaagatccgctgggcgcgctggtccaagctgctcatcgcgggcgtcacggccacgcaggcggggctggtcttccttctggcgcacacgcgccacccgagcagcatctggctgtgctatgcggccttcgtgctgttccgcggctcctaccagttcctcgtgcccatcgccacctttcagattgcatcttctctgtctaaagagctctgtgccctggtcttcggggtcaacacgttctttgccaccatcgtcaagaccatcatcactttcattgtctcggacgtgcggggcctgggcctcccggtccgcaagcaggccttaaggatgtcccggcccagactcggcctctgcctgcctggtcccttcccaccccagagtgcagccccagcaagagcaggtatggcggcctcctctgcagaggaccctggcagcgagaggggaccctggcggcgagcggggaccgtggcggcgagaggggaccctggcggcgagaggggaccgtggcggcgagaggggaccctggcggcgagaggggaccctggcggcgagaggggaccgtggtggcgagagggaaccctggcggcaaaaccgagaatgcagtgggtcactcgggccacggctccctgaggacaggaactggccccggccccacctcatcccacgctggagtcgtgcacagacgtccctcgggaggagtgaagaggccaccgggtctgcgtctcaggtaaaaaggtgactgaaaatgccccaccctgctgacatcagggagacaaagctcttggctcaaaagacagcagagtggacacctttgggctgagcgggagaacccccagcatggagggcttggagggcatggagggcatggagggcatagagggcatggagggcatggcccaggcccatggatgccctgctgagaatccacaggggcctgttgtatgtgtgtatatgggtgcacatgtgtgcatatatgtgtattggtgtgtatgcatgtgtatatgtatgtgtgcatgagtatacatgtgcagtgtgtatgcccatcatggaatgggccagggagggctcatagtcatgtatgtggatacacatgtggatacgtgcacatgtatgagtgtatgtatatacctgtatgggtgtgcacgtggacaggctcgtatatgcatgaatacatgtgtatatgtgcacctatgtggagtgtatgggcatgtgtacacacatgagcacgtgtggatgtgtgtgtgcgtgtatgtgtgcgcgtgtgtatgggcatgtatgtgcatagatgcatgtgtatatgtgcacacatgtatgagtacggccatatatgtgcatgcatgtttgggcacacgtgtgcgtgtgtggacatgtatgactgtgcatgggtatggcatgaccagtgctgtgtggccacatggcagggctgcttataagtggcctctgggaggagctgcaggaccccaggctgtggccaggccattcccaggtcctggtctcccagccacccagtccgccccttgagagacactcaccctcatgccaaatccaaggctggcatctcccggctcccctttctctcctttcaatccgttcatcccggggcgaccctggggcggagcacagggggtggggactgctgggcactgatgattaccagacaccttcccgcagggtgcctgccgttagccccacgccaggcccggccggcccacgctcagcctcacacgttcccagctctcaggctaccccggcccttctcacccctttcctgcacaaggacccttttgggaggaggtgactgagcctagcacacacaggcccactgccctgtctgcctccagggcttcctcctgggtactggcccctcgtggggtactgccagccacatccaggacaagagctgcgctcaggcagggccggttcttgggggaggacagtgggtgcggcggccgtccactcccctctgggcatgtcacccccgtgggcctgggctgctccccacctgccagaccccatctgccgcccccactggagaccccaggtcctcaccggccgtccaggaaagccaatctctcccttgtaccccggccgtccgtatggaccctgcaagaggaagggggccaggcttagtggggcagaccctggcccttgaccacgagttggggggtcctggggaaggggaggggccatgcagagcacagcaccctgggccacccatcagctcggaggagcccactgcagcctcacgccgacacctgccccacacgctttaaaactgcactagggagatgagccctgggccgcacagcacaagctcagcagccgcgggcgaccgtgtccttgggggccgtcatgcccgagctcagtgcagagaaagccagggaccgacttaccgggggtcctcggaagcccggctctccctgagcaaaaaaacaagaagacagggttaggtggcagcttgtgccccacctggcagcctctctgagggcccctgtggcgaaggcacggttaggtggcggcttgtgccccacctgatagcctccctaagggccgctgtggtccctttgggtgcactgggccgtccccaaggcgcaggcagccctggggaggacaggagccactggtgaggggagggtcgggtttggggtttgcgtccaggttggtgcgtgcatgcatgccccgggaccctgaagcaggggtggagggtggagggtggagggcatgtgccacgcagtgtcctggttgccacaggccccagctccaatgcacagctgggtgggatagtggagctctcactgggcctggggatcctgtgtctgaggcccaccccaaacaccccggagggctcactgctccctctgaaagtgggagagccggtggcccacactccaaagatccaggcttctccccaggaccctccccgagggcttttctgggcggctgcctgctgggggtggggacgcaggcacaggccccttgaggaactgactccgggccctgcccacagcatcagggcccccaggaagaggctggaggggcagccagaaacctgctgaggctgagctggtacagcctgggctcctgcaccccacaggccaggccccagggaggcgcgagctcagagctgcagcccactgagaacctcccctcagcagggtgggctcaggggtagggagaggacgaggggcagggagaggacgaggggccggcggaaccgccgacatgggtgcgagaaaggaggggccaccagggccaggcctggatggtagagccctgcttgggagaggctcgtgcatcaggagccagaccctcaggaagaccctccccaggctgtctccacagccccaggagcccccacgcctgccggaaggaggctgcccggccctcaccttg

SEQ ID NO: 3954 - DNA, 648 bp, Homo sapiens
  source 1..648: mol_type = genomic DNA
gtggatccggcgttcgcgcccaggcacgtgttgcttcgggacgggccagccggcacagcgtcaccttcgtcccctccggagctgcacgtggcctgagcaggatggtgccctccagcccagcggtggagaagcaggtgcccgtggaacctgggcctgaccccgagctccggtcctggcggcacctcgtgtgctacctttgcttctacggcttcatggcgcagatacggccaggggagagcttcatcaccccctacctcctggggcccgacaagaacttcacgcgggagcaggtcacgaacgagatcacgccggtgctgtcgtactcctacctggccgtgctggtgcccgtgttcctgctcaccgactacctgcgctacacgccggtgctgctgctgcaggggctcagcttcgtgtcggtgtggctgctgctgctgctgggccactcggtggcgcacatgcagctcatggagctcttctacagcgtcaccatggccgcgcgcatcgcctattcctcctacatcttctctctcgtgcggcccgcgcgctaccagcgtgtggccggctactcgcgcgctgcggtgctgctgggcgtgttcaccagctccgtgctgggccagctgctggtcactgtgggccgagtctccttct

SEQ ID NO: 3955 - DNA, 777 bp, Homo sapiens
  source 1..777: mol_type = genomic DNA
tcctcaatggaggtttctgtaagttcttcacgagtctcctggctcttccctcagagcagctgcctctagattacaactgccaagtgctgttggtggcagaagccctacctccccactccgaagcagctcctgcaggaaacctgggccttgtgtggctggggaactcccaggactcctgccacgcagggggacccgagggcagcttgggcaggcccctcgcggccgggggcggattcgctcggctacacctgaccggagagacaggcacagcgtcaccttcgtcccctccggagctgcacgtggcctgagcaggatggtgccctccagcccagcggtggagaagcaggtgcccgtggaacctgggcctgaccccgagctccggtcctggcggcacctcgtgtgctacctttgcttctacggcttcatggcgcagatacggccaggggagagcttcatcaccccctacctcctggggcccgacaagaacttcacgcgggagcaggtcacgaacgagatcacgccggtgctgtcgtactcctacctggccgtgctggtgcccgtgttcctgctcaccgactacctgcgctacacgccggtgctgctgctgcaggggctcagcttcgtgtcggtgtggctgctgctgctgctgggccactcggtggcgcacatgcagctcatggagctcttctacagcgtcaccatggccgcgcgcatcgcctattcctcctacatcttctctctcgtgcggcccgcgcgctaccagcgtgtggccggcta

SEQ ID NO: 3956 - DNA, 1805 bp, Homo sapiens
  source 1..1805: mol_type = genomic DNA
aggtgcctgatgaggccccagcctgcagagccagctcctggtggaagaggaaatgaggcatgctccattcattcggaggtcacgaacgagatcacgccggtgctgtcgtactcctacctggccgtgctggtgcccgtgttcctgctcaccgactacctgcgctacacgccggtgctgctgctgcaggggctcagcttcgtgtcggtgtggctgctgctgctgctgggccactcggtggcgcacatgcagctcatggagctcttctacagcgtcaccatggccgcgcgcatcgcctattcctcctacatcttctctctcgtgcggcccgcgcgctaccagcgtgtggccggctactcgcgcgctgcggtgctgctgggcgtgttcaccagctccgtgctgggccagctgctggtcactgtgggccgagtctccttctccacgctcaactacatctcgctggccttcctcaccttcagcgtggtcctcgccctcttcctgaagcgccccaagcgcagcctcttcttcaaccgcgacgaccgggggcggtgcgaaacctcggcttcggagctggagcgcatgaatcctggcccaggcgggaagctgggacacgccctgcgggtggcctgtggggactcagtgctggcgcggatgctgcgggagctgggggacagcctgcggcggccgcagctgcgcctgtggtccctctggtgggtcttcaactcggccggctactacctggtggtctactacgtgcacatcctgtggaacgaggtggaccccaccaccaacagtgcgcgggtctacaacggcgcggcagatgctgcctccacgctgctgggcgccatcacgtccttcgccgcgggcttcgtgaagatccgctgggcgcgctggtccaagctgctcatcgcgggcgtcacggccacgcaggcggggctggtcttccttctggcgcacacgcgccacccgagcagcatctggctgtgctatgcggccttcgtgctgttccgcggctcctaccagttcctcgtgcccatcgccacctttcagattgcatcttctctgtctaaagagctctgtgccctggtcttcggggtcaacacgttctttgccaccatcgtcaagaccatcatcactttcattgtctcggacgtgcggggcctgggcctcccggtccgcaagcagttccagttatactccgtgtacttcctgatcctgtccatcatctacttcttgggggccatgctggatggcctgcggcactgccagcggggccaccacccgcggcagcccccggcccagggcctgaggagtgccgcggaggagaaggcagcacaggcactgagcgtgcaggacaagggcctcggaggcctgcagccagcccagagcccgccgctttccccagaagacagcctgggggctgtggggccagcctccctggagcagagacagagcgacccatacctggcccaggccccggccccgcaggcagctgaattcctgagcccagtgacaaccccttccccctgcactctgtgctccgcccaagcctcaggccctgaggctgcagatgagacttgtccccagctggctgtccatcctcctggtgtcagcaagctgggtttgcagtgtcttccaagcgacggtgttcagaatgtgaaccagtgactctcgggcgcccctgtggtaactttgcaggcggccctcagtgcatccccacgacccctgcctcgagggccgcctgccttagcaatgggggcctccgcttatcctgctagcaggccccctaggattccccctgccctgtg

SEQ ID NO: 3957 - DNA, 580 bp, Homo sapiens
  source 1..580: mol_type = genomic DNA
agtcctcaatggaggtttctgtaagttcttcacgagtctcctggctcttccctcagagcagctgcctctagattacaactgccaagtgctgttggtggcagaagccctacctccccactccgaagcagctcctgcaggaaacctgggccttgtgtggctggggaactcccaggactcctgccacgcagggggacccgagggcagcttgggcaggcccctcgcggccgggggcggattcgctcggctacacctgaccggagagacagcagggccaggttctgcccacccgtggagaaggccagtacaggggagagagccagggctcccacaaagcagggggtccctccaggcacagcgtcaccttcgtcccctccggagctgcacgtggcctgagcaggatggtgccctccagcccagcggtggagaagcaggtgcccgtggaacctgggcctgaccccgagctccggtcctggcggcacctcgtgtgctacctttgcttctacggcttcatggcgcagatacggccaggggagagcttcatcaccccctacctcctggggcccgacaagaacttcacgcg

SEQ ID NO: 3958 - DNA, 1031 bp, Homo sapiens
  source 1..1031: mol_type = genomic DNA
gaggtagcaacagcgagcgtgccggtcgctagtcgcgggtccccgagtgagcacgccagggagcaggagaccaaacgacgggggtcggagtcagagtcgcagtgggagtccccggaccggagcacgagcctgagcgggagagcgccgctcgcacgcccgtcgccacccgcgtacccggcgcagccagagccaccagcgcagcgctgccatggagcccagcagcaagaagctgacgggtcgcctcatgctggccgtgggaggagcagtgcttggctccctgcagtttggctacaacactggagtcatcaatgccccccagaaggtgatcgaggagttctacaaccagacatgggtccaccgctatggggagagcatcctgcccaccacgctcaccacgctctggtccctctcagtggccatcttttctgttgggggcatgattggctccttctctgtgggccttttcgttaaccgctttggccggcggaattcaatgctgatgatgaacctgctggccttcgtgtccgccgtgctcatgggcttctcgaaactgggcaagtcctttgagatgctgatcctgggccgcttcatcatcggtgtgtactgcggcctgaccacaggcttcgtgcccatgtatgtgggtgaagtgtcacccacagcccttcgtggggccctgggcaccctgcaccagctgggcatcgtcgtcggcatcctcatcgcccaggtaagctggggcaggatctacctgcctggcacggcccctgcccacagcttcagtggctctcggatctgtgcccagcagggcagagtttctcttccgcccagcccccacagccttgcagaggacaactatggtacacaggtccagagaacacagcaccatggcctcccagttgacagcaagatgacttgactcttctcagtccctttcttctcactctaggcttccaaccacagggcccgccttcccccaacatgccgcaggctgttatgcacagtaccctctctccaggaggcttccccttccctgt

SEQ ID NO: 3959 - DNA, 1700 bp, Homo sapiens
  source 1..1700: mol_type = genomic DNA
aagaggcaagaggtagcaacagcgagcgtgccggtcgctagtcgcgggtccccgagtgagcacgccagggagcaggagaccaaacgacgggggtcggagtcagagtcgcagtgggagtccccggaccggagcacgagcctgagcgggagagcgccgctcgcacgcccgtcgccacccgcgtacccggcgcagccagagccaccagcgcagcgctgccatggagcccagcagcaagaagctgacgggtcgcctcatgctggccgtgggaggagcagtgcttggctccctgcagtttggctacaacactggagtcatcaatgccccccagaaggtgatcgaggagttctacaaccagacatgggtccaccgctatggggagagcatcctgcccaccacgctcaccacgctctggtccctctcagtggccatcttttctgttgggggcatgattggctccttctctgtgggccttttcgttaaccgctttggccggcggaattcaatgctgatgatgaacctgctggccttcgtgtccgccgtgctcatgggcttctcgaaactgggcaagtcctttgagatgctgatcctgggccgcttcatcatcggtgtgtactgcggcctgaccacaggcttcgtgcccatgtatgtgggtgaagtgtcacccacagcccttcgtggggccctgggcaccctgcaccagctgggcatcgtcgtcggcatcctcatcgcccaggtgttcggcctggactccatcatgggcaacaaggacctgtggcccctgctgctgagcatcatcttcatcccggccctgctgcagtgcatcgtgctgcccttctgccccgagagtccccgcttcctgctcatcaaccgcaacgaggagaaccgggccaagagtgtgctaaagaagctgcgcgggacagctgacgtgacccatgacctgcaggagatgaaggaagagagtcggcagatgatgcgggagaagaaggtcaccatcctggagctgttccgctcccccgcctaccgccagcccatcctcatcgctgtggtgctgcagctgtcccagcagctgtctggcatcaacgctgtcttctattactccacgagcatcttcgagaaggcgggggtgcagcagcctgtgtatgccaccattggctccggtatcgtcaacacggccttcactgtcgtgtcgctgtttgtggtggagcgagcaggccggcggaccctgcacctcataggcctcgctggcatggcgggttgtgccatactcatgaccatcgcgctagcactgctggagcagctaccctggatgtcctatctgagcatcgtggccatctttggctttgtggccttctttgaagtgggtcctggccccatcccatggttcatcgtggctgaactcttcagccagggtccacgtccagctgccattgccgttgcaggcttctccaactggacctcaaatttcattgtgggcatgtgcttccagtatgtggagcaactgtgtggtccctacgtcttcatcatcttcactgtgctcctggttctgttcttcatcttcaccctgaatggttccatgcctgagggtggagactaagccctgtcgagacacttgccttcttcacccagctaatctgtagggctggacctatgtcctaaggacacactaatcgaactatgaactacaaagcttctatcccagg

SEQ ID NO: 3960 - DNA, 1833 bp, Homo sapiens
  source 1..1833: mol_type = genomic DNA
aagaggcaagaggtagcaacagcgagcgtgccggtcgctagtcgcgggtccccgagtgagcacgccagggagcaggagaccaaacgacgggggtcggagtcagagtcgcagtgggagtccccggaccggagcacgagcctgagcgggagagcgccgctcgcacgcccgtcgccacccgcgtacccggcgcagccagagccaccagcgcagcgctgccatggagcccagcagcaagaagctgacgggtcgcctcatgctggccgtgggaggagcagtgcttggctccctgcagtttggctacaacactggagtcatcaatgccccccagaaggtgatcgaggagttctacaaccagacatgggtccaccgctatggggagagcatcctgcccaccacgctcaccacgctctggtccctctcagtggccatcttttctgttgggggcatgattggctccttctctgtgggccttttcgttaaccgctttggccggcggaattcaatgctgatgatgaacctgctggccttcgtgcccatgtatgtgggtgaagtgtcacccacagcccttcgtggggccctgggcaccctgcaccagctgggcatcgtcgtcggcatcatcatcttcatcccggccctgctgcagtgcatcgtgctgcccttctgccccgagagtccccgcttcctgctcatcaaccgcaacgaggagaaccgggccaagagtgtgctaaagaagctgcgcgggacagctgacgtgacccatgacctgcaggagatgaaggaagagagtcggcagatgatgcgggagaagaaggtcaccatcctggagctgttccgctcccccgcctaccgccagcccatcctcatcgctgtggtgctgcagctgtcccagcagctgtctggcatcaacgctgtcttctattactccacgagcatcttcgagaaggcgggggtgcagcagcctgtgtatgccaccattggctccggtatcgtcaacacggccttcactgtcgtgtcgctgtttgtggtggagcgagcaggccggcggaccctgcacctcataggcctcgctggcatggcgggttgtgccatactcatgaccatcgcgctagcactgctggagcagctaccctggatgtcctatctgagcatcgtggccatctttggctttgtggccttctttgaagtgggtcctggccccatcccatggttcatcgtggctgaactcttcagccagggtccacgtccagctgccattgccgttgcaggcttctccaactggacctcaaatttcattgtgggcatgtgcttccagtatgtggagcaactgtgtggtccctacgtcttcatcatcttcactgtgctcctggttctgttcttcatcttcacctacttcaaagttcctgagactaaaggccggaccttcgatgagatcgcttccggcttccggcaggggggagccagccaaagtgacaagacacccgaggagctgttccatcccctgggggctgattcccaagtgtgagtcgccccagatcaccagcccggcctgctcccagcagccctaaggatctctcaggagcacaggcagctggatgagacttccaaacctgacagatgtcagccgagccgggcctggggctcctttctccagccagcaatgatgtccagaagaatattcaggacttaacggctccaggattttaacaaaagcaagactgttgctcaaatctattcagacaagcaacaggttttataatttttttattactgattttgttatttttatatcagcctgagtctcctgtgcccacatcccaggcttcaccctgaatg

SEQ ID NO: 3961 - DNA, 705 bp, Homo sapiens
  source 1..705: mol_type = genomic DNA
agtcgcgggtccccgagtgagcacgccagggagcaggagaccaaacgacgggggtcggagtcagagtcgcagtgggagtccccggaccggagcacgagcctgagcgggagagcgccgctcgcacgcccgtcgccacccgcgtacccggcgcagccagagccaccagcgcagcgctgccatggagcccagcagcaagaagctgacgggtcgcctcatgctggccgtgggaggagcagtgcttggctccctgcagtttggctacaacactggagtcatcaatgccccccagaaggtgatcgaggagttctacaaccagacatgggtccaccgctatggggagagcatcctgcccaccacgctcaccacgctctggtccctctcagtggccatcttttctgttgggggcatgattggctccttctctgtgggccttttcgttaaccgctttggccggcggaattcaatgctgatgatgaacctgctggccttcgtgtccgccgtgctcatgggcttctcgaaactgggcaatcccaaacttgaaacaacagatacgcctctgccgaagaagtttccctttagaccccaagcccgtaaggtcactgcagtgcagtgtcccttctgcctgagtatttgtccccttcattctttactcatcctgggtcccacatccactgctacagaggcagggaagggccacaatgtcca

SEQ ID NO: 3962 - DNA, 2851 bp, Homo sapiens
  source 1..2851: mol_type = genomic DNA
tagtcgcgggtccccgagtgagcacgccagggagcaggagaccaaacgacgggggtcggagtcagagtcgcagtgggagtccccggaccggagcacgagcctgagcgggagagcgccgctcgcacgcccgtcgccacccgcgtacccggcgcagccagagccaccagcgcagcgctgccatggagcccagcagcaagaagctgacgggtcgcctcatgctggccgtgggaggagcagtgcttggctccctgcagtttggctacaacactggagtcatcaatgccccccagaaggtgatcgaggagttctacaaccagacatgggtccaccgctatggggagagcatcctgcccaccacgctcaccacgctctggtccctctcagtggccatcttttctgttgggggcatgattggctccttctctgtgggccttttcgttaaccgctttggccggcggaattcaatgctgatgatgaacctgctggccttcgtgtccgccgtgctcatgggcttctcgaaactgggcaagtcctttgagatgctgatcctgggccgcttcatcatcggtgtgtactgcggcctgaccacaggcttcgtgcccatgtatgtgggtgaagtgtcacccacagcccttcgtggggccctgggcaccctgcaccagctgggcatcgtcgtcggcatcctcatcgcccaggtgttcggcctggactccatcatgggcaacaaggacctgtggcccctgctgctgagcatcatcttcatcccggccctgctgcagtgcatcgtgctgcccttctgccccgagagtccccgcttcctgctcatcaaccgcaacgaggagaaccgggccaagagtgtgctaaagaagctgcgcgggacagctgacgtgacccatgacctgcaggagatgaaggaagagagtcggcagatgatgcgggagaagaaggtcaccatcctggagctgttccgctcccccgcctaccgccagcccatcctcatcgctgtggtgctgcagctgtcccagcagctgtctggcatcaacgctgtcttctattactccacgagcatcttcgagaaggcgggggtgcagcagcctgtgtatgccaccattggctccggtatcgtcaacacggccttcactgtcgtgtcgctgtttgtggtggagcgagcaggccggcggaccctgcacctcataggcctcgctggcatggcgggttgtgccatactcatgaccatcgcgctagcactgctggagcagctaccctggatgtcctatctgagcatcgtggccatctttggctttgtggccttctttgaagtgggtcctggccccatcccatggttcatcgtggctgaactcttcagccagggtccacgtccagctgccattgccgttgcaggcttctccaactggacctcaaatttcattgtgggcatgtgcttccagtatgtggagcaactgtgtggtccctacgtcttcatcatcttcactgtgctcctggttctgttcttcatcttcacctacttcaaagttcctgagactaaaggccggaccttcgatgagatcgcttccggcttccggcaggggggagccagccaaagtgacaagacacccgaggagctgttccatcccctgggggctgattcccaagtgtgagtcgccccagatcaccagcccggcctgctcccagcagccctaaggatctctcaggagcacaggcagctggatgagacttccaaacctgacagatgtcagccgagccgggcctggggctcctttctccagccagcaatgatgtccagaagaatattcaggacttaacggctccaggattttaacaaaagcaagactgttgctcaaatctattcagacaagcaacaggttttataatttttttattactgattttgttatttttatatcagcctgagtctcctgtgcccacatcccaggcttcaccctgaatggttccatgcctgagggtggagactaagccctgtcgagacacttgccttcttcacccagctaatctgtagggctggacctatgtcctaaggacacactaatcgaactatgaactacaaagcttctatcccaggaggtggctatggccacccgttctgctggcctggatctccccactctaggggtcaggctccattaggatttgccccttcccatctcttcctacccaaccactcaaattaatctttctttacctgagaccagttgggagcactggagtgcagggaggagaggggaagggccagtctgggctgccgggttctagtctcctttgcactgagggccacactattaccatgagaagagggcctgtgggagcctgcaaactcactgctcaagaagacatggagactcctgccctgttgtgtatagatgcaagatatttatatatatttttggttgtcaatattaaatacagacactaagttatagtatatctggacaagccaacttgtaaatacaccacctcactcctgttacttacctaaacagatataaatggctggtttttagaaacatggttttgaaatgcttgtggattgagggtaggaggtttggatgggagtgagacagaagtaagtggggttgcaaccactgcaacggcttagacttcgactcaggatccagtcccttacacgtacctctcatcagtgtcctcttgctcaaaaatctgtttgatccctgttacccagagaatatatacattctttatcttgacattcaaggcatttctatcacatatttgatagttggtgttcaaaaaaacactagttttgtgccagccgtgatgctcaggcttgaaatgcattattttgaatgtgaag

SEQ ID NO: 3963 - DNA, 913 bp, Homo sapiens
  source 1..913: mol_type = genomic DNA
tccctctcagtggccatcttttctgttgggggcatgattggctccttctctgtgggccttttcgttaaccgctttggccgggtattacctctgacccagcccctcggagcccaaggaatgtgggcactggcctgacctgtgaccccgtccccaggcggaattcaatgctgatgatgaacctgctggccttcgtgtccgccgtgctcatgggcttctcgaaactgggcaagtcctttgagatgctgatcctgggccgcttcatcatcggtgtgtactgcggcctgaccacaggcttcgtgcccatgtatgtgggtgaagtgtcacccacagcccttcgtggggccctgggcaccctgcaccagctgggcatcgtcgtcggcatcctcatcgcccaggtgttcggcctggactccatcatgggcaacaaggacctgtggcccctgctgctgagcatcatcttcatcccggccctgctgcagtgcatcgtgctgcccttctgccccgagagtccccgcttcctgctcatcaaccgcaacgaggagaaccgggccaagagtgtgctaaagaagctgcgcgggacagctgacgtgacccatgacctgcaggagatgaaggaagagagtcggcagatgatgcgggagaagaaggtcaccatcctggagctgttccgctcccccgcctaccgccagcccatcctcatcgctgtggtgctgcagctgtcccagcagctgtctggcatcaacgctgtcttctattactccacgagcatcttcgagaaggcgggggtgcagcagcctgtgtatgccaccattggctccggtatcgtcaacacggccttcactgtcgtgtcggtgagtctttgcttactggcccccccagccaaaccccagggaggaggcagtgccatcttccc

SEQ ID NO: 3964 - DNA, 3348 bp, Homo sapiens
  source 1..3348: mol_type = genomic DNA
gcggggggcaggaggagcggctgcggccggcacagcgccagggcgagtgaggcgggtggcgcgggggaggcggcggagtaaagagaggccgccggctgggtccgcgggtcactccgaggcgcgggctgcgggcggcgggcggcgggcgcaccatgccctccttcgacgaggcgctgcagcgggtgggcgagttcgggcgcttccagaggcgcgtgtttttgctgctgtgcctgacgggcgtcaccttcgccttcctcttcgtcggcgtggtcttcctgggcacgcagcccgaccactactggtgccgcgggccaagtgccgcggcgctggccgagcgctgcggctggagcccggaggaggagtggaaccgcacggcgcccgcctcccgcggcccagagccccccgagcgccgcggccgctgccagcgctacctcctggaggcggccaacgacagcgcctccgccactagcgctctcagctgcgcggacccactcgccgccttccccaaccgctcggctccccttgtgccgtgccgcggcggctggcgctacgcccaggcccactccaccatcgtcagcgagtttgaccttgtctgtgtcaatgcgtggatgctggacctcacccaagccatcctgaacctcggcttcctgactggagcattcaccttaggctatgcagcagacaggtatggcaggatcgtcatttacttgctatcctgccttggtgttggcgtcactggggttgtggtggcctttgcaccaaacttccctgtgtttgtgatcttccgcttcctgcaaggtgtatttggaaaggggacgtggatgacttgctacgtgattgtgacagaaatagtaggttcgaaacaaaggaggattgtgggaatcgtgattcaaatgttctttacccttggaatcataattctccctggaattgcctacttcatccccaactggcaaggaatccagttagccatcacgctgcccagctttctcttcctcctttattactgggtggtccctgagtctccccgttggctgattactcggaagaaaggagataaagcattacagatcctgagacgcattgctaagtgcaatgggaaatacctctcatcaaattactcagagatcactgttacagatgaggaagttagtaatccatcctttttagatctggtgagaactccccaaatgaggaaatgcacacttattcttatgtttgcttggttcacaagcgcagtggtgtatcaaggacttgtcatgcgcctgggaattatagggggcaacctctatatagactttttcatctcgggcgtggtggaactgccaggagctctcttgatcttactaaccattgagcgccttggacgacgcctcccctttgcggcaagcaatatagtggcaggggtggcatgccttgtcactgcgttcttaccagaaggaatagcatggttgaggaccacagtggctacattgggaagactagggataaccatggcctttgaaattgtttatttggtaaattcagaattgtacccaacaacattacgaaatttcggagtttcgctctgttcaggtctgtgtgattttgggggaatcatagccccatttctgctctttcggctagcagccgtgtggctagaactacctctgatcatctttggtatcctggcatccatctgtggtggccttgtgatgcttttgcctgaaaccaagggtattgccttgccagagacagtggatgatgtagaaaaacttggcagtccacattcctgtaaatgtggcaggaataagaaaaccccagtttcccgctctcacctttgaggcccccgacaaagacagaaagaaggagctatccaggagctgatcctccttgcaaagctgtgccttgcagagatgcacgtgtgcatttcagctacatcatgccgcgctgttgtaatactgtataaagacctcaatctatccagagtatttttatataatgttggatgagttaggatttgtaatgctgttgaagtttctgggaacacataatatgtagccagtttaacaaagaagctgtcaggtgcacagcccttcctgggtttttttcttgtgttccctgtggtctctgacccattaggctaaagagagacaagagaagcccccaacctgattctcatgacagctccatcaagaatgtgggatgtgccgaccaaggatttgagaaagttgtacagaaatgtgttcatcaaatctggtcaagggactaagctcctagctgaccattcattctgaagattgcatggaggatgaacatctgggaatcctgttaatgagaaggctgaatcacaggcacctgggccaaagggtgtgagcattcatgttctctgctcaccttggtttccgcacaccttcgcaatgtgaacaggtcaggagtccctcccgtccacctcctctgtaacagctggggttccaggcatggtttaggccctgttccagcaataagaaccaatctgctgtacaatctgaggacttggctctgttatttacaaaatgatgctgtggttctgagattatttgggacatttttggctctcctttagtggacacctagagccacagattcccttctttactaaacaaatcccatggattctgatttctgggtcttaggattttaaaagtgaagggatatttttcttatatttgtgagttcagttccgatggtgcccgtggtcaaaagcgaaaaacatggacaattcctattcattcttagcactttgacatgtcttggggaaaagcttacattttaatttaaaagaaagatcaattatatccatgcttaacaggatcagcaggagctttataaatgactttacagagactaataagggatttgatctttctttttttgttatcgaggcttttgaaatgtggaacttgtgtgttctgctttatatgttatattcaatatcttttcagatgcagtctatattttatgctgagttttaaaaatgaaatactttatgcaaacaggcaaaattggtaccaaagggaaacattaaccatgaggaagagcatttttctaaggagaacaggtgacaatatacacatgtgcgctaatcgtaaaatgagcatcttagtctttaaaacacatcagaattgaatacgaataatctatttgtcgatgaaataaacacaactctttgaggatttgagactacattcaccctttattcacagtcacttgcagttttgcttttctctgcatttctctgctgtaagatgactgttgcattgttgaattgtattttgagtggatatttttgtttggtaacaattaaaattttaaatcgtaaaaaatgta

SEQ ID NO: 3965 - DNA, 5627 bp, Homo sapiens
  source 1..5627: mol_type = genomic DNA
ctgcgggcggcgggcggcgggcgcaccatgccctccttcgacgaggcgctgcagcgggtgggcgagttcgggcgcttccagaggcgcgtgtttttgctgctgtgcctgacgggcgtcaccttcgccttcctcttcgtcggcgtggtcttcctgggcacgcagcccgaccactactggtgccgcgggccaagtgccgcggcgctggccgagcgctgcggctggagcccggaggaggagtggaaccgcacggcgcccgcctcccgcggcccagagccccccgagcgccgcggccgctgccagcgctacctcctggaggcggccaacgacagcgcctccgccactagcgctctcagctgcgcggacccactcgccgccttccccaaccgctcggctccccttgtgccgtgccgcggcggctggcgctacgcccaggcccactccaccatcgtcagcgagtttgaccttgtctgtgtcaatgcgtggatgctggacctcacccaagccatcctgaacctcggcttcctgactggagcattcaccttaggctatgcagcagacaggtatggcaggatcgtcatttacttgctatcctgccttggtgttggcgtcactggggttgtggtggcctttgcaccaaacttccctgtgtttgtgatcttccgcttcctgcaaggtgtatttggaaaggggacgtggatgacttgctacgtgattgtgacagaaatagtaggttcgaaacaaaggaggattgtgggaatcgtgattcaaatgttctttacccttggaatcataattctccctggaattgcctacttcatccccaactggcaaggaatccagttagccatcacgctgcccagctttctcttcctcctttattactgggtggtccctgagtctccccgttggctgattactcggaagaaaggagataaagcattacagatcctgagacgcattgctaagtgcaatgggaaatacctctcatcaaattactcagagatcactgttacagatgaggaagttagtaatccatcctttttagatctggtgagaactccccaaatgaggaaatgcacacttattcttatgtttgcttggttcacaagcgcagtggtgtatcaaggacttgtcatgcgcctgggaattatagggggcaacctctatatagactttttcatctcgggcgtggtggaactgccaggagctctcttgatcttactaaccattgagcgccttggacgacgcctcccctttgcggcaagcaatatagtggcaggggtggcatgccttgtcactgcgttcttaccagaagcaggaatagcatggttgaggaccacagtggctacattgggaagactagggataaccatggcctttgaaattgtttatttggtaaattcagaattgtacccaacaacattacgaaatttcggagtttcgctctgttcaggtctgtgtgattttgggggaatcatagccccatttctgctctttcggctagcagccgtgtggctagaactacctctgatcatctttggtatcctggcatccatctgtggtggccttgtgatgcttttgcctgaaaccaagggtattgccttgccagagacagtggatgatgtagaaaaacttggcagtccacattcctgtaaatgtggcaggaataagaaaaccccagtttcccgctctcacctttgaggcccccgacaaagacagaaagaaggagctatccaggagctgatcctccttgcaaagctgtgccttgcagagatgcacgtgtgcatttcagctacatcatgccgcgctgttgtaatactgtataaagacctcaatctatccagagtatttttatataatgttggatgagttaggatttgtaatgctgttgaagtttctgggaacacataatatgtagccagtttaacaaagaagctgtcaggtgcacagcccttcctgggtttttttcttgtgttccctgtggtctctgacccattaggctaaagagagacaagagaagcccccaacctgattctcatgacagctccatcaagaatgtgggatgtgccgaccaaggatttgagaaagttgtacagaaatgtgttcatcaaatctggtcaagggactaagctcctagctgaccattcattctgaagattgcatggaggatgaacatctgggaatcctgttaatgagaaggctgaatcacaggcacctgggccaaagggtgtgagcattcatgttctctgctcaccttggtttccgcacaccttcgcaatgtgaacaggtcaggagtccctcccgtccacctcctctgtaacagctggggttccaggcatggtttaggccctgttccagcaataagaaccaatctgctgtacaatctgaggacttggctctgttatttacaaaatgatgctgtggttctgagattatttgggacatttttggctctcctttagtggacacctagagccacagattcccttctttactaaacaaatcccatggattctgatttctgggtcttaggattttaaaagtgaagggatatttttcttatatttgtgagttcagttccgatggtgcccgtggtcaaaagcgaaaaacatggacaattcctattcattcttagcactttgacatgtcttggggaaaagcttacattttaatttaaaagaaagatcaattatatccatgcttaacaggatcagcaggagctttataaatgactttacagagactaataagggatttgatctttctttttttgttatcgaggcttttgaaatgtggaacttgtgtgttctgctttatatgttatattcaatatcttttcagatgcagtctatattttatgctgagttttaaaaatgaaatactttatgcaaacaggcaaaattggtaccaaagggaaacattaaccatgaggaagagcatttttctaaggagaacaggtgacaatatacacatgtgcgctaatcgtaaaatgagcatcttagtctttaaaacacatcagaattgaatacgaataatctatttgtcgatgaaataaacacaactctttgaggatttgagactacattcaccctttattcacagtcacttgcagttttgcttttctctgcatttctctgctgtaagatgactgttgcattgttgaattgtattttgagtggatatttttgtttggtaacaattaaaattttaaatcgtaaaaaatgtacatttgccctttctcttccttctaaacatgtgtctctcccacaggtcattctcctgtgacacgtgtactgcagagtgtttcaaaaccgggcaggcaattagcaatgggaaataagtggtccaccttcaatatttgcttgttgttcatttacatgctcttggcaccaatcctagactcacgtgtgccccagaataacattcagactctcagctggtcttgtgttacacatccatggaccggttcactccatcatatacagctctctgctccgtgtcccctgggctcaagtcaagcagtcggtgacagatttcattcccaataacagaatcggtttgcatgactccccatacatgttgcagctttgaaaacattcatctcagagttaggtataaagacataaaaatgtgtgtcaagccctcgttagctgatgaggtaaatgcatggacaacttcctaggacttctcggctctgccctctgtgaccttgcagcctgctcaggtctttgtgctctgttccttatcaaaaacagcacaaccccctcaatctgcccatttaaaaattggtggagtgaacaaagagcatgaaaatgttgaagaccacaaccaaaatttactcaaatcaaagttaagtacagagtttatttttaacaaatgtcatagctatgtcaccttactacagaatccagcagtcagaaaataacacaaaaaatgccgaggtttggcgtagctggtagctggggacagtgtcttcgtttgattactgccagttatttccagcatgctaaatccctacccacgttccagcctctaggtgagtcagtgcgtcactctgtctcccgtccaattaattatttctcatcactccctcaatccaagtaacaaaccttgaaacacgaacatagacaccaggcttattggggcgtgcacagccaagaccccaagaagtgactccttgtaaaatgtatttgtccttctcaaagcaaaccagaggccctccactgtcaccctaaatagaggtagggaaaaattcatgtgagggttaggctgccagccttttattgtggcatccatctattgtccatatgtatattttcccagtaattgaaattggaaaggaacttatgggcatattactggagcatctgcagtgcttaagtacttagcaaaatctattcagcgaaaccacaccacttagtttctcccaggggtaaaaaaaacccttgtgaatcctgcacacatcccttcctgtgttggtgtttcctttagactggcctagcctgggcatcactgtaaagtatgtgcagttggtctctgtcctgtaccctctacctccttccctgtcggaaaagtcaccactttagtccctggccaccagcacaccccaggagggtgagtggcctgaggtagttacggcacttaaaactcccttgctaccgatctggaactcaagccccaagacatccccttagatgatctgaatacgcattcagggacagatctaggcagtttctaaacaacacttagactggggtctaacgttgacaaatccttctagaatttgcctctttgggactgaagtctaaggggctgagaccaagaagggagagcacaagactaactttggtctcttgaccttttcttaccttgcaactgtcagtgcctccagccaaatgcctagcacagagctcagtggatttgattcttccattcagatactcatagcgattgcacactttattctcaatcacaagaagctggggcttccttgagaaggccagccccaaaggtacctgtgtttaaaagatgaaagaaatggttgctgaacccaaaacatgtttaggaggaaaaccagaagaacagagcagtggcactggacctcctgtctgtccgtgaggctgcagaacacaaggcagctcccaatgccgctggactctctgaccttggagagtgtaaacatcatatatgattctgtgttcctgagatctgggtttaacgatctgggctttgtcatggtgttttacgttcgttgttgtttgtgtactttttgcttttcttttgaaagtatgaaaatgatttttacaatgtaaagagagtctgagaaatgcaattgctattctttttatatactttttcagattttttatatgcttctttactacttacatcataatgcacaattttatatactgattttttcaatcaatgtatatcatgagtttttaaaataatgctacaatcttcataactaatattttaatggggagtgactgcttaattggcatgaggtttccttttgagatgaggaaaatgttctgaaaatatggtgatggttgcacaccattgtgaatgtactgaatgccattcagtggtaccctgcaaaataattaaaatcctaactctta

SEQ ID NO: 3966 - DNA, 4823 bp, Homo sapiens
  source 1..4823: mol_type = genomic DNA
acaccaatggcgcggcggccgccggcctcttggttcccggcgattggtgtctctggccgctgcgctccaccccagcccgccatggcgtcaggcgccgcggccccggggaggtggctcccactttaagaagtgaagttttgcgcccctccccctccctgcccacctcctgcagcctcctgcgccccgccgagctggcggatggagctgcgcagcgggagcgtgggcagccaggcggtggcgcggaggatggatggggacagccgagatggcggcggcggcaaggacgccaccgggtcggaggactacgagaacctgccgactagcgcctccgtgtccacccacatgacagcaggagcgatggccgggatcctggagcactcggtcatgtacccggtggactcggtgaagacacgaatgcagagtttgagtccagatcccaaagcccagtacacaagtatctacggagccctcaagaaaatcatgcggaccgaaggcttctggaggcccttgcgaggcgtcaacgtcatgatcatgggtgcagggccggcccatgccatgtattttgcctgctatgaaaacatgaaaaggactttaaatgacgttttccaccaccaaggaaacagccacctagccaacgggatagctgggagtatggccaccctgctccacgatgcggtaatgaatccagcagaagtggtgaagcagcgcttgcagatgtacaactcgcagcaccggtcagcaatcagctgcatccggacggtgtggaggaccgaggggttgggggccttctaccggagctacaccacgcagctgaccatgaacatccccttccagtccatccacttcatcacctatgagttcctgcaggagcaggtcaacccccaccggacctacaacccgcagtcccacatcatctcaggcgggctggccggggccctcgccgcggccgccacgacccccctggacgtctgtaagacccttctgaacactcaggagaacgtggccctctcgctggccaacatcagcggccggctgtcgggtatggccaatgccttccggacggtgtaccagctcaacggcctggccggctacttcaaaggcatccaggcgcgtgtcatctaccagatgccctccaccgccatttcttggtctgtctatgagttcttcaagtactttctcaccaagcgccagctggaaaatcgagctccatactaaaggaagggatcatagaatcttttcttaaagtcattctctgcctgcatccagccccttgccctctcctcacacgtagatcattttttttttgcagggtgctgcctatgggccctctgctccccaatgccttagagagaggaggggacggcacggccgctcaccggaaggctgtgtgcggggacatccgaggtggtggtggacaggaaggacttgggaaggggagcgagaaattgctttttctcttcctccctgggcagaatgtagcttttctgcttcactgtggcagcctcctccctggatccttagatcccagaggagggaagaaaatttgcagtgactgaaaacagtaaaaaaaaaaaaaaaaaaaaaaaaaaaaaaaaaaaaaaaaaaaaatttatgtatataaaagttgcattacacagtacaaaatagatggataatgtttatcctttatttttctatgtagaagtttttgaatttgtgtgtgtgcttgtgcgtgtctacacctagtattacggctgggactctccagctgtttttgttgttgttatgtttttaagagggttgaattcttccatcaggtgaacgaaaaaggcaacaaagtaataaatcagtgaatgtggccggcagctgtgtttagcccctccagatggaagtttcacttgaatgtaaaataataaagtttatattttgaatttctcttttcatgggggaaaaaaggtacgttaaaaaaatcaaaataatgatatgtcacttgcagctacctttttttttcttttaaattcaatcagccaccttcatgtgcctttttcctttgtctttccccaaaattccaggaccagagatctggccctggcctattttctcttgctgtgtacacacacgcacacatgctgggtggcaggatctcgcccgctggagggtggtggagcccagtagaattggggtgactgggcataaacctgctgagactgcttccttccctggttgtgagtgatgtgaatgcctgccttccccggtcagcacttagaagcccttgataggcagcatttggcgacttgtggggcaggtgtttgggataaatcctaccttcatcctaggacttatttctgcatcagccttttaactcaggcacttcaggtaacgtgatctatgtgtgttttgactgaatctcatctcctgtgtttccctgtgcagtctagggaagcatgtctccagtctttgtccctgtcttgtcccaaccattaattctcatgtcacagcttctcactgcatgtgacaagagccaggcctatctgctagggccctgcggctgaggtctgacctggaccctcatgcccgagtcggaagacccctctccagaagccattctgcatccttgtctgctctgcgtcacccgagaacacaggcttcgcagcctcgctttctgaaatggtgtgtgccgagtcagattgccgctcagagaaaatacaagcccgttttccctagctgtgccatttggtgctctgccaggctgccgtgcaagggaataccgacgagacgagctgcactgtctctgatttggagccctcaccggagcttgtctttaaaaatgagcaggaagctcatgtatgtttgcatttcagtgagccgggtcctgacctgccgccacccatcacggtcagcgtggtgcatcttaccgaggaggcgcaggcctggattcttttgagtggtgctactgcctaggaagtaacacgtggagaatttccatcttgggaccatgcacacagtgccttggggagtagattttgccctaatagcgatgaagaattttatcagtcagtggagttcctttttcagatcagggatgggaaagagccaaactgggtacctcccacgtgtgccccgtgaacagccctttgcagctgggctgtggggcttggctgctgccctgtcccatctggcagttaacgccttctccctgctctgccccccactccccaaaaccagttgcagcctcaacccacatggggatgtagaaagccgtaaagtccacgctactgttgaaaatgtttacatctccgctctcaacctgccttgggttcgtgttaaatggtgttaaattctgcaaatggaggggaaaaaaatcaaattctaaatttcaaagtagaatttaaagcaaatttgtaaaaaaattatcctaccaccccttttggtccacttaagatatgccacgctgaagcaaggtatttcctactggattttgctttcactggtgtttagaaaataaacttgatttctctaggagcactcctttggttagagggatgcaagaaggagaggtgaaggtggcgtgtggtggctcatgcctgtaatcccagcactttggggaggccgaggcaggcggatcacttgaggccagcagtttgagaccagcctggccaacatgatgaaaccccatctctactaaaaatacaaaaaattagctgggcatggtggcaggcacctgtaatcccagttacttgggaggctgaggcaggagaattgcttgaacccaggaggtggaggttgcagtgagctgagattgtgccactgcacttcagcctgggcgacagagtgactctgtcaaaaaggaaaggcaaaaaccggaccctggagctctgtgggccctgattgcaggcccctccctgtgtgatgagggatgagtcagcttggggagccacttggccagcctgcatgcctggtcatcaggaggttgagaaaagccttgaaagttgtgaagcactgagcagatacaagtgtttgttaattttgtagaaattaactttcccatctggcctttatctccaaagttggtattgttgctccacgcagactgcagtccggtttcttattgtgactttgacaatgcaaagtgcaaaataggaagaggcctccccaccccactatcccaccctggtgaccaattcagtgtaacctttgcacgtactcagtcattggtgtctttggagtgacatctgcagccagttagtgccacctgagtacagcactcgtacttttacatgatgtgtgtgtgagtagctcttctgtccaaaccatgatttgaggttcaactacctgtagatcaaagctttattttagaacgataaactgattttttccaaatgggtgaaatcttctccccatgactatgttttcttaactttgcattgaatctatttactgggttacattctatgtgtagtttgctttcttcatttttttttcttttaaaatgctcatgtcttattccaagcaccttcctccaaagtccccataaagctgcatctccaacacattgttatgccaataaggttttatttaactttatttaaggatgattgtgtctttgaatgacaaatgtactgctgcttcctacctgcaagacgaacaatgtatgtttcaagggtgagcaagtgttatttcttaaatttctcaaatgcctgtagtaactattgtttctgcctctcaattgttgccagctctttgaagaaggggagaattgtgtgtttttgtgtggggatgtttctgatatgctgctacagttgcaaaacactggagctagagaaaataaagtactgatcttcgaa

SEQ ID NO: 3967 - DNA, 3619 bp, Homo sapiens
  source 1..3619: mol_type = genomic DNA
agtcctgggcgaagggggcggtggttccccgcggcgctgcgcgcggcggtaattagtgattgtcttccagcttcgcgaaggctaggggcgcggctgccgggtggctgcgcggcgctgcccccggaccgaggggcagccaacccaatgaaaccaccgcgtgttcgcgcctggtagagatttctcgaagacaccagtgggcccgttccgagccctctggaccgcccgtgtggaaccaaacctgcgcgcgtggccgggccgtgggacaacgaggccgcggagacgaaggcgcaatggcgaggaagttatctgtaatcttgatcctgacctttgccctctctgtcacaaatccccttcatgaactaaaagcagctgctttcccccagaccactgagaaaattagtccgaattgggaatctggcattaatgttgacttggcaatttccacacggcaatatcatctacaacagcttttctaccgctatggagaaaataattctttgtcagttgaagggttcagaaaattacttcaaaatataggcatagataagattaaaagaatccatatacaccatgaccacgaccatcactcagaccacgagcatcactcagaccatgagcgtcactcagaccatgagcatcactcagagcacgagcatcactctgaccatgatcatcactctcaccataatcatgctgcttctggtaaaaataagcgaaaagctctttgcccagaccatgactcagatagttcaggtaaagatcctagaaacagccaggggaaaggagctcaccgaccagaacatgccagtggtagaaggaatgtcaaggacagtgttagtgctagtgaagtgacctcaactgtgtacaacactgtctctgaaggaactcactttctagagacaatagagactccaagacctggaaaactcttccccaaagatgtaagcagctccactccacccagtgtcacatcaaagagccgggtgagccggctggctggtaggaaaacaaatgaatctgtgagtgagccccgaaaaggctttatgtattccagaaacacaaatgaaaatcctcaggagtgtttcaatgcatcaaagctactgacatctcatggcatgggcatccaggttccgctgaatgcaacagagttcaactatctctgtccagccatcatcaaccaaattgatgctagatcttgtctgattcatacaagtgaaaagaaggctgaaatccctccaaagacctattcattacaaatagcctgggttggtggttttatagccatttccatcatcagtttcctgtctctgctgggggttatcttagtgcctctcatgaatcgggtgtttttcaaatttctcctgagtttccttgtggcactggccgttgggactttgagtggtgatgcttttttacaccttcttccacattctcatgcaagtcaccaccatagtcatagccatgaagaaccagcaatggaaatgaaaagaggaccacttttcagtcatctgtcttctcaaaacatagaagaaagtgcctattttgattccacgtggaagggtctaacagctctaggaggcctgtatttcatgtttcttgttgaacatgtcctcacattgatcaaacaatttaaagataagaagaaaaagaatcagaagaaacctgaaaatgatgatgatgtggagattaagaagcagttgtccaagtatgaatctcaactttcaacaaatgaggagaaagtagatacagatgatcgaactgaaggctatttacgagcagactcacaagagccctcccactttgattctcagcagcctgcagtcttggaagaagaagaggtcatgatagctcatgctcatccacaggaagtctacaatgaatatgtacccagagggtgcaagaataaatgccattcacatttccacgatacactcggccagtcagacgatctcattcaccaccatcatgactaccatcatattctccatcatcaccaccaccaaaaccaccatcctcacagtcacagccagcgctactctcgggaggagctgaaagatgccggcgtcgccactctggcctggatggtgataatgggtgatggcctgcacaatttcagcgatggcctagcaattggtgctgcttttactgaaggcttatcaagtggtttaagtacttctgttgctgtgttctgtcatgagttgcctcatgaattaggtgactttgctgttctactaaaggctggcatgaccgttaagcaggctgtcctttataatgcattgtcagccatgctggcgtatcttggaatggcaacaggaattttcattggtcattatgctgaaaatgtttctatgtggatatttgcacttactgctggcttattcatgtatgttgctctggttgatatggtacctgaaatgctgcacaatgatgctagtgaccatggatgtagccgctgggggtatttctttttacagaatgctgggatgcttttgggttttggaattatgttacttatttccatatttgaacataaaatcgtgtttcgtataaatttctagttaaggtttaaatgctagagtagcttaaaaagttgtcatagtttcagtaggtcatagggagatgagtttgtatgctgtactatgcagcgtttaaagttagtgggttttgtgatttttgtattgaatattgctgtctgttacaaagtcagttaaaggtacgttttaatatttaagttattctatcttggagataaaatctgtatgtgcaattcaccggtattaccagtttattatgtaaacaagagatttggcatgacatgttctgtatgtttcagggaaaaatgtctttaatgctttttcaagaactaacacagttattcctatactggattttaggtctctgaagaactgctggtgtttaggaataagaatgtgcatgaagcctaaaataccaagaaagcttatactgaatttaagcaaagaaataaaggagaaaagagaagaatctgagaattggggaggcatagattcttataaaaatcacaaaatttgttgtaaattagaggggagaaatttagaattaagtataaaaaggcagaattagtatagagtacattcattaaacatttttgtcaggattatttcccgtaaaaacgtagtgagcacttttcatatactaatttagttgtacatttaactttgtataatacagaaatctaaatatatttaatgaattcaagcaatatatcacttgaccaagaaattggaatttcaaaatgttcgtgcgggtatataccagatgagtacagtgagtagttttatgtatcaccagactgggttattgccaagttatatatcaccaaaagctgtatgactggatgttctggttacctggtttacaaaattatcagagtagtaaaactttgatatatatgaggatattaaaactacactaagtatcatttgattcgattcagaaagtactttgatatctctcagtgcttcagtgctatcattgtgagcaattgtcttttatatacggtactgtagccatactaggcctgtctgtggcattctctagatgtttcttttttacacaataaattccttatatcagcttg

SEQ ID NO: 3968 - DNA, 1666 bp, Homo sapiens
  source 1..1666: mol_type = genomic DNA
agtcctgggcgaagggggcggtggttccccgcggcgctgcgcgcggcggtaattagtgattgtcttccagcttcgcgaaggctaggggcgcggctgccgggtggctgcgcggcgctgcccccggaccgaggggcagccaacccaatgaaaccaccgcgtgttcgcgcctggtagagatttctcgaagacaccagtgggcccgttccgagccctctggaccgcccgtgtggaaccaaacctgcgcgcgtggccgggccgtgggacaacgaggccgcggagactgtttcaatgcatcaaagctactgacatctcatggcatgggcatccaggttccgctgaatgcaacagagttcaactatctctgtccagccatcatcaaccaaattgatgctagatcttgtctgattcatacaagtgaaaagaaggctgaaatccctccaaagacctattcattacaaatagcctgggttggtggttttatagccatttccatcatcagtttcctgtctctgctgggggttatcttagtgcctctcatgaatcgggtgtttttcaaatttctcctgagtttccttgtggcactggccgttgggactttgagtggtgatgcttttttacaccttcttccacattctcatgcaagtcaccaccatagtcatagccatgaagaaccagcaatggaaatgaaaagaggaccacttttcagtcatctgtcttctcaaaacatagaagaaagtgcctattttgattccacgtggaagggtctaacagctctaggaggcctgtatttcatgtttcttgttgaacatgtcctcacattgatcaaacaatttaaagataagaagaaaaagaatcagaagaaacctgaaaatgatgatgatgtggagattaagaagcagttgtccaagtatgaatctcaactttcaacaaatgaggagaaagtagatacagatgatcgaactgaaggctatttacgagcagactcacaagagccctcccactttgattctcagcagcctgcagtcttggaagaagaagaggtcatgatagctcatgctcatccacaggaagtctacaatgaatatgtacccagagggtgcaagaataaatgccattcacatttccacgatacactcggccagtcagacgatctcattcaccaccatcatgactaccatcatattctccatcatcaccaccaccaaaaccaccatcctcacagtcacagccagcgctactctcgggaggagctgaaagatgccggcgtcgccactctggcctggatggtgataatgggtgatggcctgcacaatttcagcgatggcctagcaattggtgctgcttttactgaaggcttatcaagtggtttaagtacttctgttgctgtgttctgtcatgagttgcctcatgaattaggtgactttgctgttctactaaaggctggcatgaccgttaagcaggctgtcctttataatgcattgtcagccatgctggcgtatcttggaatggcaacaggaattttcattggtcattatgctgaaaatgtttctatgtggatatttgcacttactgctggcttattcatgtatgttgctctggttgatatggtaagtttttaagaagtcttattacattattgaccaacaataaaatagagaaaatattc

SEQ ID NO: 3969 - DNA, 1774 bp, Homo sapiens
  source 1..1774: mol_type = genomic DNA
aattagtgattgtcttccagcttcgcgaaggctaggggcgcggctgccgggtggctgcgcggcgctgcccccggaccgaggggcagccaacccaatgaaaccaccgcgtgttcgcgcctggtagagatttctcgaagacaccagtgggcccgttccgagccctctggaccgcccgtgtggaaccaaacctgcgcgcgtggccgggccgtgggacaacgaggccgcggagactgtttcaatgcatcaaagctactgacatctcatggcatgggcatccaggttccgctgaatgcaacagagttcaactatctctgtccagccatcatcaaccaaattgatgctagatcttgtctgattcatacaagtgaaaagaaggctgaaatccctccaaagacctattcattacaaatagcctgggttggtggttttatagccatttccatcatcagtttcctgtctctgctgggggttatcttagtgcctctcatgaatcgggtgtttttcaaatttctcctgagtttccttgtggcactggccgttgggactttgagtggtgatgcttttttacaccttcttccacattctcatgcaagtcaccaccatagtcatagccatgaagaaccagcaatggaaatgaaaagaggaccacttttcagtcatctgtcttctcaaaacatagaagaaagtgcctattttgattccacgtggaagggtctaacagctctaggaggcctgtatttcatgtttcttgttgaacatgtcctcacattgatcaaacaatttaaagataagaagaaaaagaatcagaagaaacctgaaaatgatgatgatgtggagattaagaagcagttgtccaagtatgaatctcaactttcaacaaatgaggagaaagtagatacagatgatcgaactgaaggctatttacgagcagactcacaagagccctcccactttgattctcagcagcctgcagtcttggaagaagaagaggtcatgatagctcatgctcatccacaggaagtctacaatgaatatgtacccagagggtgcaagaataaatgccattcacatttccacgatacactcggccagtcagacgatctcattcaccaccatcatgactaccatcatattctccatcatcaccaccaccaaaaccaccatcctcacagtcacagccagcgctactctcgggaggagctgaaagatgccggcgtcgccactctggcctggatggtgataatgggtgatggcctgcacaatttcagcgatggcctagcaattggtgctgcttttactgaaggcttatcaagtggtttaagtacttctgttgctctggttgatatggtacctgaaatgctgcacaatgatgctagtgaccatggatgtagccgctgggggtatttctttttacagaatgctgggatgcttttgggttttggaattatgttacttatttccatatttgaacataaaatcgtgtttcgtataaatttctagttaaggtttaaatgctagagtagcttaaaaagttgtcatagtttcagtaggtcatagggagatgagtttgtatgctgtactatgcagcgtttaaagttagtgggttttgtgatttttgtattgaatattgctgtctgttacaaagtcagttaaaggtacgttttaatatttaagttattctatcttggagataaaatctgtatgtgcaattcaccggtattaccagtttattatgtaaacaagagatttggcatgacatgttctgtatgtttca

SEQ ID NO: 3970 - DNA, 4178 bp, Homo sapiens
  source 1..4178: mol_type = genomic DNA
attaacctatcaaataaggcagtctaaaaactccaggcgtccctttccgtaaggacccggactgttgaactggaaagctaaaattcaaggcgtgacaattgccctttgtcccacattcctccaccggtcgcctgcttatttaaatggtgcgtcccctcgggtaccacttgaacaaaacctgcccagagcgctccctgtgtagattcgctggaagcagctggaggctccagttctcatctgctcaggtgtccccggcgccttggcgaactcggccactccagttcctcacgtggtgagcactcagggcagcgggtcgattttccgaggtcccatacctgggtttgaggggcgcggctcgcagcggcgggtgcaggggcgactgccagccctcaccccgcctcggggtgcgttcggaggccgacacctggaggacgcctccagtccccgcgggacgccacgcctgcgcgccagggatccgggataagaagtgcgcgccgggctccggctgcgcgccgcggggccaccagtttgcgcgcagggctcaggcgaccgtgcggccatggacacgccacggggcatcggcaccttcgtggtgtgggactacgtggtgttcgcgggcatgctggtcatctcggccgccatcggcatctactacgccttcgctgggggcggccagcagacctccaaggacttcctgatgggcggccgcagaatgaccgcagtgcccgtggcgctgtccctcaccgctagcttcatgtcagccgtcactgtcctgggcaccccctccgaggtctaccgttttggggccatttttagcatctttgccttcacctacttctttgtggtggtcatcagcgcggaggtcttcctcccggtgttctacaaactgggaattaccagcacctacgagtatttagaacttcgatttaacaaatgtgttcgtctctgtggaacagtcctcttcattgttcaaacaattctgtatactggaattgttatttatgcccctgccctggctttgaatcaagtcacaggatttgatctgtggggcgcggtagtggcaacgggggtggtctgcacattctactgcacactgggtggtcttaaagcagttatctggacagatgtttttcaagttgggatcatggtggctggatttgcatccgtgattatacaggctgtggtgatgcaaggtggaatcagcactattttaaatgatgcctatgatggtggaagattaaatttctggaattttaatcctaaccctttgcaaagacacaccttctggacaattattataggagggaccttcacatggaccagcatctacggtgtcaaccaatcccaggtgcagagatatatttcttgtaaaagcagattccaggcaaaactgtctctctacatcaatcttgtgggactctgggcaatcctcacatgctcagtgttttgtgggctcgccctatattccaggtaccatgactgtgatccttggacagccaagaaagtgtctgcaccagaccagctcatgccttatttggtactggacattctgcaagattatccaggacttcctggactttttgtggcctgtgcttacagtgggacattaagcacagtgtcctccagtattaatgccttagcagcagtaactgtggaagatctaatcaaaccttacttcagatcgctctcagaaaggtctctgtcttggatttcccaaggaatgagtgtggtgtatggagccctgtgtattggaatggctgcgctggcgtcacttatgggagctttgttgcaggcagcactcagcgtatttggtatggttggtggaccacttatgggcctgttcgctttgggcattttggttccctttgccaactcaattggagcacttgttggtctgatggctggatttgccatttctctatgggttggaattggagctcaaatatatcctccacttcctgagagaacattgccattgcaccttgatatccaaggctgtaacagcacctacaatgagacaaatttgatgacaaccacagaaatgccatttactactagtgtttttcaaatatacaatgttcaaaggactccactgatggataactggtattctttatcatatctgtacttcagcactgttggaactttggtaacattattagtggggatacttgtcagtttatcaacaggaggaagaaaacagaacttagaccccagatacatactaaccaaagaggactttttatccaattttgatatttttaagaaaaagaagcatgttttgagctataaatcacatccagtggaagatggtggaactgataatcctgctttcaaccacattgaattgaactcagatcagagtggcaagagcaatgggactcgtttgtgaagctgctctgatactagatatccttaaatgatgtttcaattttatatgttttctaagataattggatcaggttttctttgtgtgtgtgtgtgtgttgtatcatgagtgtttgggggataagtttttgttaaaacaaagtctggactatcttcatttactacatcattaattgatgttactctggagtttagaattctggcattgacatttccctctctttcctttatttcgatgaagctataattgtgaaaattgtaactacatagatgctgaaaggctaatacacacatatgcacatgtatttgattgtcaaaggtatattcttaaatttgggtattattgaaaatattttccatgccttggtgctagcatataagtttggaagtttgccaacatcacaattcatcttgaaaagagcttttttccctcctaccacatacaccattcttagggagcaatgaggtaacaggtctgtgttgtctagatctttgctttttatccccctatcagtccagggcatatactaacctgcaaactgattctgaatcaggaaggtggtaatcaataagtattctggctgggaaagaccgtgggcccaatgatcaaagtcttcttggtgctgttcattaattcttgtgccttttggcttgttttctagagtttctgggctttggctgctgatactgcctttcttagactgtaatttttatctgcatgcccagtttctgacctatcaacttgggttttattgtgcactctaactgagcttgtcttcataattttctgtttattgccctgggcttggatatgtctcaagacactcatgtgaatcatgccaccccaaatcctggcttatcaagtcccagactataaattatgaactcccattagcttggtactaacatatacttgatgtaggtatttatggacttgatgatccaagaatattatattcttcaaaatggttaagctccatggagttagatgactacacttaatgctattaagttgaacttttgaatgtcaactaatttgcaatcaattaaagatacatatgcctagaaattttgaaatttcggtatatttatccagttaaagggctaaattatataagcaaacactactttttttaaaacgtctggactcaaaaaatgctttgttccatgttttaaaatttttaagtagcagtctcaaagttgcttagctgtttattttgctatgttcctagctaagagtttggttataggagttcatcaataacttattttttgtacagttcccacattagatactgtttaaaagttcttttttaaactcaattttttttagaaacataagagaaatatttagatacatacaaatgtttttatgattaaataattttatgcttattttctgatacgtgttatttaggtaatcatgccctgtacatttagaggttgctaactgacaatgttaagaaatttaaaaaaaaaaaaaagcctgggcatgatggctcatgcttgtaatctgaacatttgggaggctgaggcaggaagatcgcttgaggtccagagtttaagtccagcctggaaacatagttagacctcatctctacaaaaataaaaaataaaaataaaaaaaacttagctaggcatgttgccacatacttgtagtcccagttattagggaagctgaggtgggaggatagcttaagcccaggatttcaaggctgcattgagctatgattacaccactgcactccagcctgggtaacagagtgaaatcttgtctctgggaaaaaaaa

SEQ ID NO: 3971 - DNA, 1071 bp, Homo sapiens
  source 1..1071: mol_type = genomic DNA
atggacatggcggatgagccactcaatggaagccacacatggctatccattccatttgacctcaatggctctgtggtgtcaaccaacacctcaaaccagacagagccgtactatgacctgacaagcaatgcagtcctcacattcatctattttgtggtctgcatcattgggttgtgtggcaacacacttgtcatttatgtcatcctccgctatgccaagatgaagaccatcaccaacatttacatcctcaacctggccatcgcagatgagctcttcatgctgggtctgcctttcttggctatgcaggtggctctggtccactggccctttggcaaggccatttgccgggtggtcatgactgtggatggcatcaatcagttcaccagcatcttctgcctgacagtcatgagcatcgaccgatacctggctgtggtccaccccatcaagtcggccaagtggaggagaccccggacggccaagatgatcaccatggctgtgtggggagtctctctgctggtcatcttgcccatcatgatatatgctgggctccggagcaaccagtgggggagaagcagctgcaccatcaactggccaggtgaatctggggcttggtacacagggttcatcatctacactttcattctggggttcctggtacccctcaccatcatctgtctttgctacctgttcattatcatcaaggtgaagtcctctggaatccgagtgggctcctctaagaggaagaagtctgagaagaaggtcacccgaatggtgtccatcgtggtggctgtcttcatcttctgctggcttcccttctacatattcaacgtttcttccgtctccatggccatcagccccaccccagcccttaaaggcatgtttgactttgtggtggtcctcacctatgctaacagctgtgccaaccctatcctatatgccttcttgtctgacaacttcaagaagagcttccagaatgtcctctgcttggtcaaggtagacaattcaaagtctggagaagagggatcatgcctggatatgatctttagaaacaacaaaaatagaaaaaaataa

SEQ ID NO: 3972 - DNA, 2962 bp, Homo sapiens
  source 1..2962: mol_type = genomic DNA
cgcagccacccatgcgcgcgcgctcgcaagaccaccagcgcccagagccccagtctgaggcttggcgccgggggtctgcgggcgaggggagctctctacgtgcgaggggctagcgggagccggcacaagagggtcgaggagccaggaaccccaaacgtccggcgccaggcgctagccaagctgctgcgcgccccggcgcccagctggctcggggacagccgctgggtgtcggagaccggagctagcggattgcagcggaaaagcaaagatgtcacactggatccttggcctccagggtccattaaggtgagaataagatctctgggctggctggaactagcctaagactgaaaagcagccatggacatggcggatgagccactcaatggaagccacacatggctatccattccatttgacctcaatggctctgtggtgtcaaccaacacctcaaaccagacagagccgtactatgacctgacaagcaatgcagtcctcacattcatctattttgtggtctgcatcattgggttgtgtggcaacacacttgtcatttatgtcatcctccgctatgccaagatgaagaccatcaccaacatttacatcctcaacctggccatcgcagatgagctcttcatgctgggtctgcctttcttggctatgcaggtggctctggtccactggccctttggcaaggccatttgccgggtggtcatgactgtggatggcatcaatcagttcaccagcatcttctgcctgacagtcatgagcatcgaccgatacctggctgtggtccaccccatcaagtcggccaagtggaggagaccccggacggccaagatgatcaccatggctgtgtggggagtctctctgctggtcatcttgcccatcatgatatatgctgggctccggagcaaccagtgggggagaagcagctgcaccatcaactggccaggtgaatctggggcttggtacacagggttcatcatctacactttcattctggggttcctggtacccctcaccatcatctgtctttgctacctgttcattatcatcaaggtgaagtcctctggaatccgagtgggctcctctaagaggaagaagtctgagaagaaggtcacccgaatggtgtccatcgtggtggctgtcttcatcttctgctggcttcccttctacatattcaacgtttcttccgtctccatggccatcagccccaccccagcccttaaaggcatgtttgactttgtggtggtcctcacctatgctaacagctgtgccaaccctatcctatatgccttcttgtctgacaacttcaagaagagcttccagaatgtcctctgcttggtcaaggtgagcggcacagatgatggggagcggagtgacagtaagcaggacaaatcccggctgaatgagaccacggagacccagaggaccctcctcaatggagacctccaaaccagtatctgaactgcttggggggtgggaaagaaccaagccatgctctgtctactggcaatgggctccctacccacactggcttcctgcctcccacccctcacacctggcttctagaatagaggattgctcagcatgagtccaattcagagaacggtgtttgagtcagcttgtctgattgaatgataatgtgctaaattgattacctcccccttaaagcgaacactgaaatgcaggtagacaattcaaagtctggagaagagggatcatgcctggatatgatctttagaaacaacaaaaatagaaaaaaataagtatctgtgtgtttgtgtattgaaaactcaatatgtaatcttgtgtttttatatgtatacttgtatattcctatttattctctgtataggcattacctacgttcctgtgtttacatacacaagtagcaaattcgagtatgcatagtgtagatggacatttgccacaacacactgcccgcagaaatggacttaccgtgaagccaataaagttcaagcttcagggatctctcttgcacgggccttgccaaggcccaggagggacttgggcagtatgttcatgtggtcatatgtttttgtaaaaaattgtgaaagtaagatatgtttgtattgtttttcttaaagaggaacctcgtataagcttcaagcctcacaaaccttctagcctctgcccttggggatttgcttcattaatttcaggcaagtgaggtcaatgtaagaagggaaagggagaagatatttgaagaaccagaatgtaaattcatgtgtttccacttctcagatatagtcagagaattattcatttgcccaaaaggacttaagtggttgtggtcatccatcattgtatttatcaagacaaagccaactttgttataagattgcatttttttcttttcaaattgctttagtttttcttagggagctatgagggggaaaaatcactaacatgaaaggcaaaaaatggactatgattcctgtggggaaacaatttcattctctccatcgtgaaaataagtgaataagagtgaagcaaaattacacctttatgagaaaccataaaattgtttttatttttcaggccagacatagcttcctaatgaaagaaaatggaaatgtaattcgacgactcctcaaaggggactttagaggacttcatacaaagctgggcattaagaaaaccacaatgcatggccgggcgtggtggcttacacctgtaatcccagcactttgggaggccgaggtgggtggatcacccgaggtcaggagttcgagaccagcctggccaacatggtgaaaccccatcactactaaaaatatgtaaattagtcgggcgtggtgtcacgtgcctgtaatcctagctgctcgggaggctgaggcaggagaatcacttgaacttgggaggtggaggttgcagtaagctgagattgtgccactgcactctagcctgagcaacaagagcaaaactcagtctc

SEQ ID NO: 3973 - DNA, 3356 bp, Homo sapiens
  source 1..3356: mol_type = genomic DNA
ccgccgcccctctccccgcccagaggcgccccgggggcaccatgcaggcgcagcagctgccctacgagtttttcagcgaagagaacgcgcccaagtggcggggactactggtgcctgcgctgaaaaaggtccaggggcaagttcatcctactctcgagtctaatgatgatgctcttcagtatgttgaagaattaattttgcaattattaaatatgctatgccaagctcagccccgaagtgcttcagatgtagaggaacgtgttcaaaaaagtttccctcatccaattgataaatgggcaatagctgatgcccaatcagctattgaaaagaggaagcgaagaaaccctttatctctcccagtagaaaaaattcatcctttattaaaggaggtcctaggttataaaattgaccaccaggtttctgtttacatagtagcagtcttagaatacatttctgcagacattttaaagctggttgggaattatgtaagaaatatacggcattatgaaattacaaaacaagatattaaagtggcaatgtgtgctgacaaggtattgatggatatgtttcatcaagatgtagaagatattaatatattatctttaactgacgaagagccttccacctcaggagaacaaacttactatgatttggtaaaagcatttatggcagaaattcgacaatatataagggaactaaatctaattataaaagtttttagagagccctttgtctccaattcaaaattgttttcagctaatgatgtagaaaatatatttagtcgcatagtagatatacatgaacttagtgtaaagttactgggccatatagaagatacagtagaaatgacagatgaaggcagtccccatccactagtaggaagctgctttgaagacttagcagaggaactggcatttgatccatatgaatcgtatgctcgagatattttgcgacctggttttcatgatcgtttccttagtcagttatcaaagcctggggcagcactttatttgcagtcaataggcgaaggtttcaaagaagctgttcaatatgttttacccaggctgcttctggcccctgtttaccactgtctccattactttgaacttttgaagcagttagaagaaaaaagtgaagatcaagaagacaaggaatgtttaaaacaagcaataacagctttgcttaatgttcagagtggtatggaaaaaatatgttctaaaagtcttgcaaaacgaagactgagtgaatctgcatgtcggttttatagtcagcaaatgaaggggaaacaactagcaatcaagaagatgaacgagattcagaagaatattgatggttgggagggaaaagacattggacagtgttgtaatgaatttataatggaaggaactcttacacgtgtaggagccaaacatgagagacacatatttctctttgatggcttaatgatttgctgtaaatcaaatcatgggcagccaagacttcctggtgctagcaatgcagaatatcgtcttaaagaaaagttttttatgcgaaaggtacaaattaatgataaagatgacaccaatgaatacaagcatgcttttgaaataattttaaaagatgaaaatagtgttatattttctgccaagtcagctgaagagaaaaacaattggatggcagcattgatatctttacagtaccggagtacactggaaaggatgcttgatgtaacaatgctacaggaagagaaagaggagcagatgaggctgcctagtgctgatgtttatagatttgcagagcctgactctgaagagaatattatatttgaagagaacatgcagcccaaggctggaattccaattatcaaagcaggaactgttattaaacttatagagaggcttacgtaccatatgtacgcagatcccaattttgttcggacatttcttacaacatacagatccttttgcaaacctcaagaactactgagtcttataatagaaaggtttgaaattccagagcctgagccaacagaagctgatcgcatagctatagagaatggagatcaacccttgagtgcagaactgaaaagatttagaaaagaatatatacagcctgtgcaactgcgagtattaaatgtatgtcggcactgggtagagcaccacttctatgattttgaaagagatgcatatcttttgcaacgaatggaagaatttattggaacagtaagaggtaaagcaatgaaaaaatgggttgaatccatcactaaaataatccaaaggaaaaaaattgcaagagacaatggaccaggtcataatattacatttcagagttcacctcccacagttgagtggcatataagcagacctgggcacatagagacttttgacctgctcaccttacacccaatagaaattgctcgacaactcactttacttgaatcagatctataccgagctgtacagccatcagaattagttggaagtgtgtggacaaaagaagacaaagaaattaactctcctaatcttctgaaaatgattcgacataccaccaacctcactctgtggtttgagaaatgtattgtagaaactgaaaatttagaagaaagagtagctgtggtgagtcgaattattgagattctacaagtctttcaagagttgaacaactttaatggtgtccttgaggttgtcagtgctatgaattcatcacctgtttacagactagaccacacatttgagcaaataccaagtcgccagaagaaaattttagaagaagctcatgaattgagtgaagatcactataagaaatatttggcaaaactcaggtctattaatccaccatgtgtgcctttctttggaatttatctcactaatatcttgaaaacagaagaaggcaaccctgaggtcctaaaaagacatggaaaagagcttataaactttagcaaaaggaggaaagtagcagaaataacaggagagatccagcagtaccaaaatcagccttactgtttacgagtagaatcagatatcaaaaggttctttgaaaacttgaatccgatgggaaatagcatggagaaggaatttacagattatcttttcaacaaatccctagaaatagaaccacgaaaccctaagcctctcccaagatttccaaaaaaatatagctatcccctaaaatctcctggtgttcgtccatcaaacccaagaccaggtaccatgaggcatcccacacctctgcagcaggagccaaggaaaattagttatagtaggatccctgaaagtgaaacagaaagtacagcatctgcaccaaattctccaaacaccgttaacacctccgcctgcttctggtgcttccagtaccacagatgtttgcagtgtatttga

SEQ ID NO: 3974 - DNA, 4123 bp, Homo sapiens
  source 1..4123: mol_type = genomic DNA
ccccgcccagaggcgccccgggggcaccatgcaggcgcagcagctgccctacgagtttttcagcgaagagaacgcgcccaagtggcggggactactggtgcctgcgctgaaaaaggtccaggggcaagttcatcctactctcgagtctaatgatgatgctcttcagtatgttgaagaattaattttgcaattattaaatatgctatgccaagctcagccccgaagtgcttcagatgtagaggaacgtgttcaaaaaagtttccctcatccaattgataaatgggcaatagctgatgcccaatcagctattgaaaagaggaagcgaagaaaccctttatctctcccagtagaaaaaattcatcctttattaaaggaggtcctaggttataaaattgaccaccaggtttctgtttacatagtagcagtcttagaatacatttctgcagacattttaaagctggttgggaattatgtaagaaatatacggcattatgaaattacaaaacaagatattaaagtggcaatgtgtgctgacaaggtattgatggatatgtttcatcaagatgtagaagatattaatatattatctttaactgacgaagagccttccacctcaggagaacaaacttactatgatttggtaaaagcatttatggcagaaattcgacaatatataagggaactaaatctaattataaaagtttttagagagccctttgtctccaattcaaaattgttttcagctaatgatgtagaaaatatatttagtcgcatagtagatatacatgaacttagtgtaaagttactgggccatatagaagatacagtagaaatgacagatgaaggcagtccccatccactagtaggaagctgctttgaagacttagcagaggaactggcatttgatccatatgaatcgtatgctcgagatattttgcgacctggttttcatgatcgtttccttagtcagttatcaaagcctggggcagcactttatttgcagtcaataggcgaaggtttcaaagaagctgttcaatatgttttacccaggctgcttctggcccctgtttaccactgtctccattactttgaacttttgaagcagttagaagaaaaaagtgaagatcaagaagacaaggaatgtttaaaacaagcaataacagctttgcttaatgttcagagtggtatggaaaaaatatgttctaaaagtcttgcaaaacgaagactgagtgaatctgcatgtcggttttatagtcagcaaatgaaggggaaacaactagcaatcaagaagatgaacgagattcagaagaatattgatggttgggagggaaaagacattggacagtgttgtaatgaatttataatggaaggaactcttacacgtgtaggagccaaacatgagagacacatatttctctttgatggcttaatgatttgctgtaaatcaaatcatgggcagccaagacttcctggtgctagcaatgcagaatatcgtcttaaagaaaagttttttatgcgaaaggtacaaattaatgataaagatgacaccaatgaatacaagcatgcttttgaaataattttaaaagatgaaaatagtgttatattttctgccaagtcagctgaagagaaaaacaattggatggcagcattgatatctttacagtaccggagtacactggaaaggatgcttgatgtaacaatgctacaggaagagaaagaggagcagatgaggctgcctagtgctgatgtttatagatttgcagagcctgactctgaagagaatattatatttgaagagaacatgcagcccaaggctggaattccaattatcaaagcaggaactgttattaaacttatagagaggcttacgtaccatatgtacgcagatcccaattttgttcggacatttcttacaacatacagatccttttgcaaacctcaagaactactgagtcttataatagaaaggtttgaaattccagagcctgagccaacagaagctgatcgcatagctatagagaatggagatcaacccttgagtgcagaactgaaaagatttagaaaagaatatatacagcctgtgcaactgcgagtattaaatgtatgtcggcactgggtagagcaccacttctatgattttgaaagagatgcatatcttttgcaacgaatggaagaatttattggaacagtaagaggtaaagcaatgaaaaaatgggttgaatccatcactaaaataatccaaaggaaaaaaattgcaagagacaatggaccaggtcataatattacatttcagagttcacctcccacagttgagtggcatataagcagacctgggcacatagagacttttgacctgctcaccttacacccaatagaaattgctcgacaactcactttacttgaatcagatctataccgagctgtacagccatcagaattagttggaagtgtgtggacaaaagaagacaaagaaattaactctcctaatcttctgaaaatgattcgacataccaccaacctcactctgtggtttgagaaatgtattgtagaaactgaaaatttagaagaaagagtagctgtggtgagtcgaattattgagattctacaagtctttcaagagttgaacaactttaatggtgtccttgaggttgtcagtgctatgaattcatcacctgtttacagactagaccacacatttgagcaaataccaagtcgccagaagaaaattttagaagaagctcatgaattgagtgaagatcactataagaaatatttggcaaaactcaggtctattaatccaccatgtgtgcctttctttggaatttatctcactaatatcttgaaaacagaagaaggcaaccctgaggtcctaaaaagacatggaaaagagcttataaactttagcaaaaggaggaaagtagcagaaataacaggagagatccagcagtaccaaaatcagccttactgtttacgagtagaatcagatatcaaaaggttctttgaaaacttgaatccgatgggaaatagcatggagaaggaatttacagattatcttttcaacaaatccctagaaatagaaccacgaaaccctaagcctctcccaagatttccaaaaaaatatagctatcccctaaaatctcctggtgttcgtccatcaaacccaagaccaggtaccatgaggcatcccacacctctgcagcaggagccaaggaaaattagttatagtaggatccctgaaagtgaaacagaaagtacagcatctgcaccaaattctccaagaacaccgttaacacctccgcctgcttctggtgcttccagtaccacagatgtttgcagtgtatttgattccgatcattcgagcccttttcactcaagatctgcttctgtatcatctataagtttaaccaaaggcactgatgaagtgcctgtccctcctcctgttcctccacgaagacgaccagaatctgccccagcagaatcttcaccatctaagattatgtctaagcatttggacagtcccccagccattcctcctaggcaacccacatcaaaagcctattcaccacgatattcaatatcagaccggacctctatctcagaccctcctgaaagccctcccttattaccaccacgagaacctgtgaggacacctgatgttttctcaagctcaccactacatctccaacctccccctttgggcaaaaaaagtgaccatggcaatgccttcttcccaaacagcccttccccctttacaccacctcctcctcaaacaccttctcctcacggcacaagaaggcatctgccatcaccaccattgacacaagaagtggaccttcattccattgctgggccgcctgttcctccacgacaaagcacttctcaacatatccctaaactccctccaaaaacttacaaaagggagcacacacacccatccatgcacagagatggaccaccactgttggagaatgcccattcttcctgagttcctctgtactgggatgtatattttcctagccccaaatccattgctggcaatggatgcactgaatgtgccagcactgaggagttaaaatgagaactccaaacactaacgactcttcttcaagatgcagtataagac

SEQ ID NO: 3975 - DNA, 8314 bp, Homo sapiens
  source 1..8314: mol_type = genomic DNA
ccgccgcccctctccccgcccagaggcgccccgggggcaccatgcaggcgcagcagctgccctacgagtttttcagcgaagagaacgcgcccaagtggcggggactactggtgcctgcgctgaaaaaggtccaggggcaagttcatcctactctcgagtctaatgatgatgctcttcagtatgttgaagaattaattttgcaattattaaatatgctatgccaagctcagccccgaagtgcttcagatgtagaggaacgtgttcaaaaaagtttccctcatccaattgataaatgggcaatagctgatgcccaatcagctattgaaaagaggaagcgaagaaaccctttatctctcccagtagaaaaaattcatcctttattaaaggaggtcctaggttataaaattgaccaccaggtttctgtttacatagtagcagtcttagaatacatttctgcagacattttaaagctggttgggaattatgtaagaaatatacggcattatgaaattacaaaacaagatattaaagtggcaatgtgtgctgacaaggtattgatggatatgtttcatcaagatgtagaagatattaatatattatctttaactgacgaagagccttccacctcaggagaacaaacttactatgatttggtaaaagcatttatggcagaaattcgacaatatataagggaactaaatctaattataaaagtttttagagagccctttgtctccaattcaaaattgttttcagctaatgatgtagaaaatatatttagtcgcatagtagatatacatgaacttagtgtaaagttactgggccatatagaagatacagtagaaatgacagatgaaggcagtccccatccactagtaggaagctgctttgaagacttagcagaggaactggcatttgatccatatgaatcgtatgctcgagatattttgcgacctggttttcatgatcgtttccttagtcagttatcaaagcctggggcagcactttatttgcagtcaataggcgaaggtttcaaagaagctgttcaatatgttttacccaggctgcttctggcccctgtttaccactgtctccattactttgaacttttgaagcagttagaagaaaaaagtgaagatcaagaagacaaggaatgtttaaaacaagcaataacagctttgcttaatgttcagagtggtatggaaaaaatatgttctaaaagtcttgcaaaacgaagactgagtgaatctgcatgtcggttttatagtcagcaaatgaaggggaaacaactagcaatcaagaagatgaacgagattcagaagaatattgatggttgggagggaaaagacattggacagtgttgtaatgaatttataatggaaggaactcttacacgtgtaggagccaaacatgagagacacatatttctctttgatggcttaatgatttgctgtaaatcaaatcatgggcagccaagacttcctggtgctagcaatgcagaatatcgtcttaaagaaaagttttttatgcgaaaggtacaaattaatgataaagatgacaccaatgaatacaagcatgcttttgaaataattttaaaagatgaaaatagtgttatattttctgccaagtcagctgaagagaaaaacaattggatggcagcattgatatctttacagtaccggagtacactggaaaggatgcttgatgtaacaatgctacaggaagagaaagaggagcagatgaggctgcctagtgctgatgtttatagatttgcagagcctgactctgaagagaatattatatttgaagagaacatgcagcccaaggctggaattccaattatcaaagcaggaactgttattaaacttatagagaggcttacgtaccatatgtacgcagatcccaattttgttcggacatttcttacaacatacagatccttttgcaaacctcaagaactactgagtcttataatagaaaggtttgaaattccagagcctgagccaacagaagctgatcgcatagctatagagaatggagatcaacccttgagtgcagaactgaaaagatttagaaaagaatatatacagcctgtgcaactgcgagtattaaatgtatgtcggcactgggtagagcaccacttctatgattttgaaagagatgcatatcttttgcaacgaatggaagaatttattggaacagtaagaggtaaagcaatgaaaaaatgggttgaatccatcactaaaataatccaaaggaaaaaaattgcaagagacaatggaccaggtcataatattacatttcagagttcacctcccacagttgagtggcatataagcagacctgggcacatagagacttttgacctgctcaccttacacccaatagaaattgctcgacaactcactttacttgaatcagatctataccgagctgtacagccatcagaattagttggaagtgtgtggacaaaagaagacaaagaaattaactctcctaatcttctgaaaatgattcgacataccaccaacctcactctgtggtttgagaaatgtattgtagaaactgaaaatttagaagaaagagtagctgtggtgagtcgaattattgagattctacaagtctttcaagagttgaacaactttaatggtgtccttgaggttgtcagtgctatgaattcatcacctgtttacagactagaccacacatttgagcaaataccaagtcgccagaagaaaattttagaagaagctcatgaattgagtgaagatcactataagaaatatttggcaaaactcaggtctattaatccaccatgtgtgcctttctttggaatttatctcactaatatcttgaaaacagaagaaggcaaccctgaggtcctaaaaagacatggaaaagagcttataaactttagcaaaaggaggaaagtagcagaaataacaggagagatccagcagtaccaaaatcagccttactgtttacgagtagaatcagatatcaaaaggttctttgaaaacttgaatccgatgggaaatagcatggagaaggaatttacagattatcttttcaacaaatccctagaaatagaaccacgaaaccctaagcctctcccaagatttccaaaaaaatatagctatcccctaaaatctcctggtgttcgtccatcaaacccaagaccaggtaccatgaggcatcccacacctctgcagcaggagccaaggaaaattagttatagtaggatccctgaaagtgaaacagaaagtacagcatctgcaccaaattctccaagaacaccgttaacacctccgcctgcttctggtgcttccagtaccacagatgtttgcagtgtatttgattccgatcattcgagcccttttcactcaagcaatgataccgtctttatccaagttactctgccccatggcccaagatctgcttctgtatcatctataagtttaaccaaaggcactgatgaagtgcctgtccctcctcctgttcctccacgaagacgaccagaatctgccccagcagaatcttcaccatctaagattatgtctaagcatttggacagtcccccagccattcctcctaggcaacccacatcaaaagcctattcaccacgatattcaatatcagaccggacctctatctcagaccctcctgaaagccctcccttattaccaccacgagaacctgtgaggacacctgatgttttctcaagctcaccactacatctccaacctccccctttgggcaaaaaaagtgaccatggcaatgccttcttcccaaacagcccttccccctttacaccacctcctcctcaaacaccttctcctcacggcacaagaaggcatctgccatcaccaccattgacacaagaagtggaccttcattccattgctgggccgcctgttcctccacgacaaagcacttctcaacatatccctaaactccctccaaaaacttacaaaagggagcacacacacccatccatgcacagagatggaccaccactgttggagaatgcccattcttcctgagttcctctgtactgggatgtatattttcctagccccaaatccattgctggcaatggatgcactgaatgtgccagcactgaggagttaaaatgagaactccaaacactaacgactcttcttcaagatgcagtataagacaatgaattttaacctagatgtaattatacaatggaaatggtattccagtttagaatatggaaagaccgacctagaggaattggacaactgattgcacctgaaaatcataaagggactttttctggccaataggcaggagtcctctttttgtgaagtgatcttttgtgaagtgatcattaaagggatggaaaacacagtctagtgtccagcaggcccacatgacagtttttgtaattcaaattatgcacttttaaaaaaaaaaacttaaacagggatcttaatatcttcctttgttttcctttgctttactcttctactttagaatattttcttaaaaatcactcaaaggactgtgaggaaaggctgtggtacctgaccttgttgaaatcaaggcccggcactgtactacaggcctgtttacagattattacggtgaactgaatgggtaccgaggcttcaccaaagaggtacttttttgttgttgttgttgttttaggaataattgtaccaattttaagagcattccccccacctgtccccacacacccaaacaaaatgtggtggtgttgccttcaaaaaagagaagttttgtgtcattaacatgacagaagaactttttaaaaaaaaataactgtcaactattctatttgcatttaggagactgttcatctatgctagattgtcattttccctccttctcccacagaagtttactggtagtccatgtcatggctcgtagctatccctctaaccataccatggaaatgcaggcacccaatgtgaaaaggagcacttgctgggcatcactgacaccgctcatgttttacacatagttgagtaatcagcatatctagaattatcttgcattgcctaaatcatatgtatatagtgaatgttatataatatacctggcaggtctgttttaatttaattgaataaagatacaaatactttgtttggctggcatatattaaattattatatgaagaaaatggttgattcttatttcttttagttgaaaaacacacaaaaacactaaacataaaagcacgttttgtggtacgccttggtttctagttctggatatatgtattaatcttaaagaatgatctaaagtcacagcttggcatataggaagatacttggttagaataggatgggtatcttttaagcagaactttgtaagtaagttttaagttcctaagcaacaagtatacagtttgttaaggtttatattgaacattctaccttgcttgaggttttctgctttatcaaaactattcataatagaacatctacctgcatcattactatcataatatggattattcataaagcgtatgtactgttcttctgagtctaacaaatactgtgactgaaatgcatgcaccttgttgaagagaaaacattttattaatctccactataatgtctgtgaaatgtgcagtattccatccttagagagtttatctggttcatcagcatctgcatgtatcctctgaataatgaagcaacatttcagcaattctgttaaccacaccattagagacatttttagaagtgctgcaacatggtgggaacctagtactttaataatttcctatgatatttattagagcataaaatgtacatcacgatagtacagtatgtagtcctttaagaccagaaggtatgttaactgcaccatcattaagcagtctatcctattttcttatttatttgttagaattgaatcctttctcaatatctgtaccattcctatgatggtagccattcttctctttataaaatatttcctctttgaaaagcgtcctaaaacattaatttcaaatcccctcttggatgcaaagtgtccctaagaccatccattcaacagtatttatgtgagccaacttactagagccgctacaactaatcatgatagacagtccagaatctccctggactttatactgggccagcctcattgtccctaagatttctctttttatgtctcatggattacttctctttttaattgccccaggcacattccaaatgagaacctggtaaaagtcacattggacccccttcagtatgtcttcggctaatgtgttagccttcaataaggtgataaccccttttcaacctatctagtctataaagaggaaaaattcagatttggagttctaatcctatttctcccaaagggaactattcttctaccccatggttctaggagaccacttcactgtgcaacagttttacatgcattgtggatggaggatatttttattctgaactgttacatttaggtaaaaatattttctgcagtggtaactgattagaaaaatgccaattggatgcccttaggtggaggtgagaaaatggcatccttgccttcttctcaatatgaaacattaactagttgacaaatttatccttgtagtaatgaaaatctatttaatcagggaccagaaatggctgaggagataaatgcatcattacaaaattctgcttttgaatcctggacattacaagggggtaaatgcagcatgactttttgttaaccacattccaaaatgtggaacatttcttttagaaatgaaaatatttcaaggctgatgtattttaagactacacattatcaggaaacatacattgagagttcgcttaattaaaggttgttgggcatcaaattatgtttagtaggttactattctctaacaactcaaggatgctttaatggatctgaatttgacaaagagcatgccacactaatactacagtcaacaacagcccagagaacaattactatgtcagctggaggctatattatgattctaaattcttaaaggtttttttccctccataaatcaaaaattaccttatgtaaaccaaaaattagttggtatttatggtcatgatcttaattctcaagtttagcttaatcttgtatttcattgtttgtcttctaatatgacagcttaaattcagatttttaagtgactcagcaaaataggaggagtgtcccaatttattagtgttgtacatattgaagaaaacctttttgttccttcagatttagaaagaaacagtttaaccatttatttcttggtattctgctgctgtgaataggtttacttattcttttaacatatattgtgtgactacgcaagtataggtcctgttgtattgcattaatctttaccagtaactaaacatcacaaggttaatattggtttggctgaaagaattatgcagtaaagttatttataagggaacatgatgactttattcaatatttttcttctttgaaacatctcattactaacttttaagattatttcataatcccttatacatgagccaatgaaatattttgagctctacttaagaagcatgaagtctatattataaatctaaacaacaaaagcacttgtaacttgtttagtaaattccatgccttattttccatttttgacaccgtaaagtgcattttctgtcgactgtgagcaaatttcccttttgcctttaatgaaaatagtgcattaagtagccaattgctgcagaattataaagcaaattagctaacagtgggtcacattggactaccactcaaagaaacaagatgcataacagatgatggaaggtacatgtggtgtggcttagggagagcgcacctgtgccagatgcatgccactttcagtagctgccaaatgtgcctttaattaagaacatctctaatttttttcttcagatcaagtcagcatttggggtcgggatttgggcagggaactttggggtgcaaatatctggtgaaaccaccagagaatttgtttgtcaaagtgacatgtataattttagttgagacgtgtttgtgtatatatgtgtatttgcctttgtttagtagcacggttatttgctaaaataattgtcaaaaaattgctctgtcggtcggtctttgatgtaagaacaaagtgtggtctatacatctaatatggcctttgtacctaaccatgttcataggtaatctttgtactctgtgtgcagcagtatttggtttgcatttaaagtgaaaataacggctgttatttttctggcattactaagataaactgaaaaataataaagaaaaatgccttacatagccc

SEQ ID NO: 3976 - DNA, 8517 bp, Homo sapiens
  source 1..8517: mol_type = genomic DNA
agtagcgagcaggttcagttcgctagtaggaagctccagcgctacaccgccgcccctctccccgcccagaggcgccccgggggcaccatgcaggcgcagcagctgccctacgagtttttcagcgaagagaacgcgcccaagtggcggggactactggtgcctgcgctgaaaaaggtccaggggcaagttcatcctactctcgagtctaatgatgatgctcttcagtatgttgaagaattaattttgcaattattaaatatgctatgccaagctcagccccgaagtgcttcagatgtagaggaacgtgttcaaaaaagtttccctcatccaattgataaatgggcaatagctgatgcccaatcagctattgaaaagaggaagcgaagaaaccctttatctctcccagtagaaaaaattcatcctttattaaaggaggtcctaggttataaaattgaccaccaggtttctgtttacatagtagcagtcttagaatacatttctgcagacattttaaagctggttgggaattatgtaagaaatatacggcattatgaaattacaaaacaagatattaaagtggcaatgtgtgctgacaaggtattgatggatatgtttcatcaagatgtagaagatattaatatattatctttaactgacgaagagccttccacctcaggagaacaaacttactatgatttggtaaaagcatttatggcagaaattcgacaatatataagggaactaaatctaattataaaagtttttagagagccctttgtctccaattcaaaattgttttcagctaatgatgtagaaaatatatttagtcgcatagtagatatacatgaacttagtgtaaagttactgggccatatagaagatacagtagaaatgacagatgaaggcagtccccatccactagtaggaagctgctttgaagacttagcagaggaactggcatttgatccatatgaatcgtatgctcgagatattttgcgacctggttttcatgatcgtttccttagtcagttatcaaagcctggggcagcactttatttgcagtcaataggcgaaggtttcaaagaagctgttcaatatgttttacccaggctgcttctggcccctgtttaccactgtctccattactttgaacttttgaagcagttagaagaaaaaagtgaagatcaagaagacaaggaatgtttaaaacaagcaataacagctttgcttaatgttcagagtggtatggaaaaaatatgttctaaaagtcttgcaaaacgaagactgagtgaatctgcatgtcggttttatagtcagcaaatgaaggggaaacaactagcaatcaagaagatgaacgagattcagaagaatattgatggttgggagggaaaagacattggacagtgttgtaatgaatttataatggaaggaactcttacacgtgtaggagccaaacatgagagacacatatttctctttgatggcttaatgatttgctgtaaatcaaatcatgggcagccaagacttcctggtgctagcaatgcagaatatcgtcttaaagaaaagttttttatgcgaaaggtacaaattaatgataaagatgacaccaatgaatacaagcatgcttttgaaataattttaaaagatgaaaatagtgttatattttctgccaagtcagctgaagagaaaaacaattggatggcagcattgatatctttacagtaccggagtacactggaaaggatgcttgatgtaacaatgctacaggaagagaaagaggagcagatgaggctgcctagtgctgatgtttatagatttgcagagcctgactctgaagagaatattatatttgaagagaacatgcagcccaaggctggaattccaattatcaaagcaggaactgttattaaacttatagagaggcttacgtaccatatgtacgcagatcccaattttgttcggacatttcttacaacatacagatccttttgcaaacctcaagaactactgagtcttataatagaaaggtttgaaattccagagcctgagccaacagaagctgatcgcatagctatagagaatggagatcaacccttgagtgcagaactgaaaagatttagaaaagaatatatacagcctgtgcaactgcgagtattaaatgtatgtcggcactgggtagagcaccacttctatgattttgaaagagatgcatatcttttgcaacgaatggaagaatttattggaacagtaagaggtaaagcaatgaaaaaatgggttgaatccatcactaaaataatccaaaggaaaaaaattgcaagagacaatggaccaggtcataatattacatttcagagttcacctcccacagttgagtggcatataagcagacctgggcacatagagacttttgacctgctcaccttacacccaatagaaattgctcgacaactcactttacttgaatcagatctataccgagctgtacagccatcagaattagttggaagtgtgtggacaaaagaagacaaagaaattaactctcctaatcttctgaaaatgattcgacataccaccaacctcactctgtggtttgagaaatgtattgtagaaactgaaaatttagaagaaagagtagctgtggtgagtcgaattattgagattctacaagtctttcaagagttgaacaactttaatggtgtccttgaggttgtcagtgctatgaattcatcacctgtttacagactagaccacacatttgagcaaataccaagtcgccagaagaaaattttagaagaagctcatgaattgagtgaagatcactataagaaatatttggcaaaactcaggtctattaatccaccatgtgtgcctttctttggaatttatctcactaatatcttgaaaacagaagaaggcaaccctgaggtcctaaaaagacatggaaaagagcttataaactttagcaaaaggaggaaagtagcagaaataacaggagagatccagcagtaccaaaatcagccttactgtttacgagtagaatcagatatcaaaaggttctttgaaaacttgaatccgatgggaaatagcatggagaaggaatttacagattatcttttcaacaaatccctagaaatagaaccacgaaaccctaagcctctcccaagatttccaaaaaaatatagctatcccctaaaatctcctggtgttcgtccatcaaacccaagaccaggtaccatgaggcatcccacacctctgcagcaggagccaaggaaaattagttatagtaggatccctgaaagtgaaacagaaagtacagcatctgcaccaaattctccaagaacaccgttaacacctccgcctgcttctggtgcttccagtaccacagatgtttgcagtgtatttgattccgatcattcgagcccttttcactcaagcaatgataccgtctttatccaagttactctgccccatggcccaagatctgcttctgtatcatctataagtttaaccaaaggcactgatgaagtgcctgtccctcctcctgttcctccacgaagacgaccagaatctgccccagcagaatcttcaccatctaagattatgtctaagcatttggacagtcccccagccattcctcctaggcaacccacatcaaaagcctattcaccacgatattcaatatcagaccggacctctatctcagaccctcctgaaagccctcccttattaccaccacgagaacctgtgaggacacctgatgttttctcaagctcaccactacatctccaacctccccctttgggcaaaaaaagtgaccatggcaatgccttcttcccaaacagcccttccccctttacaccacctcctcctcaaacaccttctcctcacggcacaagaaggcatctgccatcaccaccattgacacaagaagtggaccttcattccattgctgggccgcctgttcctccacgacaaagcacttctcaacatatccctaaactccctccaaaaacttacaaaagggagcacacacacccatccatgcacagagatggaccaccactgttggagaatgcccattcttcctgagttcctctgtactgggatgtatattttcctagccccaaatccattgctggcaatggatgcactgaatgtgccagcactgaggagttaaaatgagaactccaaacactaacgactcttcttcaagatgcagtataagacaatgaattttaacctagatgtaattatacaatggaaatggtattccagtttagaatatggaaagaccgacctagaggaattggacaactgattgcacctgaaaatcataaagggactttttctggccaataggcaggagtcctctttttgtgaagtgatcttttgtgaagtgatcattaaagggatggaaaacacagtctagtgtccagcaggcccacatgacagtttttgtaattcaaattatgcacttttaaaaaaaaaaacttaaacagggatcttaatatcttcctttgttttcctttgctttactcttctactttagaatattttcttaaaaatcactcaaaggactgtgaggaaaggctgtggtacctgaccttgttgaaatcaaggcccggcactgtactacaggcctgtttacagattattacggtgaactgaatgggtaccgaggcttcaccaaagaggtacttttttgttgttgttgttgttttaggaataattgtaccaattttaagagcattccccccacctgtccccacacacccaaacaaaatgtggtggtgttgccttcaaaaaagagaagttttgtgtcattaacatgacagaagaactttttaaaaaaaaataactgtcaactattctatttgcatttaggagactgttcatctatgctagattgtcattttccctccttctcccacagaagtttactggtagtccatgtcatggctcgtagctatccctctaaccataccatggaaatgcaggcacccaatgtgaaaaggagcacttgctgggcatcactgacaccgctcatgttttacacatagttgagtaatcagcatatctagaattatcttgcattgcctaaatcatatgtatatagtgaatgttatataatatacctggcaggtctgttttaatttaattgaataaagatacaaatactttgtttggctggcatatattaaattattatatgaagaaaatggttgattcttatttcttttagttgaaaaacacacaaaaacactaaacataaaagcacgttttgtggtacgccttggtttctagttctggatatatgtattaatcttaaagaatgatctaaagtcacagcttggcatataggaagatacttggttagaataggatgggtatcttttaagcagaactttgtaagtaagttttaagttcctaagcaacaagtatacagtttgttaaggtttatattgaacattctaccttgcttgaggttttctgctttatcaaaactattcataatagaacatctacctgcatcattactatcataatatggattattcataaagcgtatgtactgttcttctgagtctaacaaatactgtgactgaaatgcatgcaccttgttgaagagaaaacattttattaatctccactataatgtctgtgaaatgtgcagtattccatccttagagagtttatctggttcatcagcatctgcatgtatcctctgaataatgaagcaacatttcagcaattctgttaaccacaccattagagacatttttagaagtgctgcaacatggtgggaacctagtactttaataatttcctatgatatttattagagcataaaatgtacatcacgatagtacagtatgtagtcctttaagaccagaaggtatgttaactgcaccatcattaagcagtctatcctattttcttatttatttgttagaattgaatcctttctcaatatctgtaccattcctatgatggtagccattcttctctttataaaatatttcctctttgaaaagcgtcctaaaacattaatttcaaatcccctcttggatgcaaagtgtccctaagaccatccattcaacagtatttatgtgagccaacttactagagccgctacaactaatcatgatagacagtccagaatctccctggactttatactgggccagcctcattgtccctaagatttctctttttatgtctcatggattacttctctttttaattgccccaggcacattccaaatgagaacctggtaaaagtcacattggacccccttcagtatgtcttcggctaatgtgttagccttcaataaggtgataaccccttttcaacctatctagtctataaagaggaaaaattcagatttggagttctaatcctatttctcccaaagggaactattcttctaccccatggttctaggagaccacttcactgtgcaacagttttacatgcattgtggatggaggatatttttattctgaactgttacatttaggtaaaaatattttctgcagtggtaactgattagaaaaatgccaattggatgcccttaggtggaggtgagaaaatggcatccttgccttcttctcaatatgaaacattaactagttgacaaatttatccttgtagtaatgaaaatctatttaatcagggaccagaaatggctgaggagataaatgcatcattacaaaattctgcttttgaatcctggacattacaagggggtaaatgcagcatgactttttgttaaccacattccaaaatgtggaacatttcttttagaaatgaaaatatttcaaggctgatgtattttaagactacacattatcaggaaacatacattgagagttcgcttaattaaaggttgttgggcatcaaattatgtttagtaggttactattctctaacaactcaaggatgctttaatggatctgaatttgacaaagagcatgccacactaatactacagtcaacaacagcccagagaacaattactatgtcagctggaggctatattatgattctaaattcttaaaggtttttttccctccataaatcaaaaattaccttatgtaaaccaaaaattagttggtatttatggtcatgatcttaattctcaagtttagcttaatcttgtatttcattgtttgtcttctaatatgacagcttaaattcagatttttaagtgactcagcaaaataggaggagtgtcccaatttattagtgttgtacatattgaagaaaacctttttgttccttcagatttagaaagaaacagtttaaccatttatttcttggtattctgctgctgtgaataggtttacttattcttttaacatatattgtgtgactacgcaagtataggtcctgttgtattgcattaatctttaccagtaactaaacatcacaaggttaatattggtttggctgaaagaattatgcagtaaagttatttataagggaacatgatgactttattcaatatttttcttctttgaaacatctcattactaacttttaagattatttcataatcccttatacatgagccaatgaaatattttgagctctacttaagaagcatgaagtctatattataaatctaaacaacaaaagcacttgtaacttgtttagtaaattccatgccttattttccatttttgacaccgtaaagtgcattttctgtcgactgtgagcaaatttcccttttgcctttaatgaaaatagtgcattaagtagccaattgctgcagaattataaagcaaattagctaacagtgggtcacattggactaccactcaaagaaacaagatgcataacagatgatggaaggtacatgtggtgtggcttagggagagcgcacctgtgccagatgcatgccactttcagtagctgccaaatgtgcctttaattaagaacatctctaatttttttcttcagatcaagtcagcatttggggtcgggatttgggcagggaactttggggtgcaaatatctggtgaaaccaccagagaatttgtttgtcaaagtgacatgtataattttagttgagacgtgtttgtgtatatatgtgtatttgcctttgtttagtagcacggttatttgctaaaataattgtcaaaaaattgctctgtcggtcggtctttgatgtaagaacaaagtgtggtctatacatctaatatggcctttgtacctaaccatgttcataggtaatctttgtactctgtgtgcagcagtatttggtttgcatttaaagtgaaaataacggctgttatttttctggcattactaagataaactgaaaaataataaagaaaaatgccttacatagcccacaagtgtattatttttgcatgtatttattttagagggcagtatttttgaaatcattagtgattctcatttagctcatatatgccatatagaaatattttgcatttttattgtggtctttctttggaggcacttttttcctgtatcaagttataaaa

SEQ ID NO: 3977 - DNA, 1469 bp, Homo sapiens
  source 1..1469: mol_type = genomic DNA
aagaagcctctgcgcctgcgccagggcgcacccgtcggcggtaaaagctgaggggctggcgcgggggattggtgggcgacacttttacgtctacacgtgcctacccgtctgcacgtttctgagtccgcacggttgtcttctcttgctgaatggacataggtgttttgttttgtcccaagagatacaggtccaggggcaagttcatcctactctcgagtctaatgatgatgctcttcagtatgttgaagaattaattttgcaattattaaatatgctatgccaagctcagccccgaagtgcttcagatgtagaggaacgtgttcaaaaaagtttccctcatccaattgataaatgggcaatagctgatgcccaatcagctattgaaaagaggaagcgaagaaaccctttatctctcccagtagaaaaaattcatcctttattaaaggaggtcctaggttataaaattgaccaccaggtttctgtttacatagtagcagtcttagaatacatttctgcagacattttaaagctggttgggaattatgtaagaaatatacggcattatgaaattacaaaacaagatattaaagtggcaatgtgtgctgacaaggtattgatggatatgtttcatcaagatgtagaagatattaatatattatctttaactgacgaagagccttccacctcaggagaacaaacttactatgatttggtaaaagcatttatggcagaaattcgacaatatataagggaactaaatctaattataaaagtttttagagagccctttgtctccaattcaaaattgttttcagctaatgatgtagaaaatatatttagtcgcatagtagatatacatgaacttagtgtaaagttactgggccatatagaagatacagtagaaatgacagatgaaggcagtccccatccactagtaggaagctgctttgaagacttagcagaggaactggcatttgatccatatgaatcgtatgctcgagatattttgcgacctggttttcatgatcgtttccttagtcagttatcaaagcctggggcagcactttatttgcagtcaataggcgaaggtttcaaagaagctgttcaatatgttttacccaggctgcttctggcccctgtttaccactgtctccattactttgaacttttgaagtttccatttggggacctcagcagactcagggactcagtgtgaggataagggagccagtgtgaggataaggccaaagtaatggggaagcagttagaagaaaaaagtgaagatcaagaagacaaggaatgtttaaaacaagcaataacagctttgcttaatgttcagagtggtatggaaaaaatatgttctaaaagtcttgcaaaacgaagactgagtgaatctgcatgtcggttttatagtcagcaaatgaaggggaaacaactagcaatcaagaagatgaacgagattcagaaga

SEQ ID NO: 3978 - DNA, 8269 bp, Homo sapiens
  source 1..8269: mol_type = genomic DNA
ccgccgcccctctccccgcccagaggcgccccgggggcaccatgcaggcgcagcagctgccctacgagtttttcagcgaagagaacgcgcccaagtggcggggactactggtgcctgcgctgaaaaaggtccaggggcaagttcatcctactctcgagtctaatgatgatgctcttcagtatgttgaagaattaattttgcaattattaaatatgctatgccaagctcagccccgaagtgcttcagatgtagaggaacgtgttcaaaaaagtttccctcatccaattgataaatgggcaatagctgatgcccaatcagctattgaaaagaggaagcgaagaaaccctttatctctcccagtagaaaaaattcatcctttattaaaggaggtcctaggttataaaattgaccaccaggtttctgtttacatagtagcagtcttagaatacatttctgcagacattttaaagctggttgggaattatgtaagaaatatacggcattatgaaattacaaaacaagatattaaagtggcaatgtgtgctgacaaggtattgatggatatgtttcatcaagatgtagaagatattaatatattatctttaactgacgaagagccttccacctcaggagaacaaacttactatgatttggtaaaagcatttatggcagaaattcgacaatatataagggaactaaatctaattataaaagtttttagagagccctttgtctccaattcaaaattgttttcagctaatgatgtagaaaatatatttagtcgcatagtagatatacatgaacttagtgtaaagttactgggccatatagaagatacagtagaaatgacagatgaaggcagtccccatccactagtaggaagctgctttgaagacttagcagaggaactggcatttgatccatatgaatcgtatgctcgagatattttgcgacctggttttcatgatcgtttccttagtcagttatcaaagcctggggcagcactttatttgcagtcaataggcgaaggtttcaaagaagctgttcaatatgttttacccaggctgcttctggcccctgtttaccactgtctccattactttgaacttttgaagcagttagaagaaaaaagtgaagatcaagaagacaaggaatgtttaaaacaagcaataacagctttgcttaatgttcagagtggtatggaaaaaatatgttctaaaagtcttgcaaaacgaagactgagtgaatctgcatgtcggttttatagtcagcaaatgaaggggaaacaactagcaatcaagaagatgaacgagattcagaagaatattgatggttgggagggaaaagacattggacagtgttgtaatgaatttataatggaaggaactcttacacgtgtaggagccaaacatgagagacacatatttctctttgatggcttaatgatttgctgtaaatcaaatcatgggcagccaagacttcctggtgctagcaatgcagaatatcgtcttaaagaaaagttttttatgcgaaaggtacaaattaatgataaagatgacaccaatgaatacaagcatgcttttgaaataattttaaaagatgaaaatagtgttatattttctgccaagtcagctgaagagaaaaacaattggatggcagcattgatatctttacagtaccggagtacactggaaaggatgcttgatgtaacaatgctacaggaagagaaagaggagcagatgaggctgcctagtgctgatgtttatagatttgcagagcctgactctgaagagaatattatatttgaagagaacatgcagcccaaggctggaattccaattatcaaagcaggaactgttattaaacttatagagaggcttacgtaccatatgtacgcagatcccaattttgttcggacatttcttacaacatacagatccttttgcaaacctcaagaactactgagtcttataatagaaaggtttgaaattccagagcctgagccaacagaagctgatcgcatagctatagagaatggagatcaacccttgagtgcagaactgaaaagatttagaaaagaatatatacagcctgtgcaactgcgagtattaaatgtatgtcggcactgggtagagcaccacttctatgattttgaaagagatgcatatcttttgcaacgaatggaagaatttattggaacagtaagaggtaaagcaatgaaaaaatgggttgaatccatcactaaaataatccaaaggaaaaaaattgcaagagacaatggaccaggtcataatattacatttcagagttcacctcccacagttgagtggcatataagcagacctgggcacatagagacttttgacctgctcaccttacacccaatagaaattgctcgacaactcactttacttgaatcagatctataccgagctgtacagccatcagaattagttggaagtgtgtggacaaaagaagacaaagaaattaactctcctaatcttctgaaaatgattcgacataccaccaacctcactctgtggtttgagaaatgtattgtagaaactgaaaatttagaagaaagagtagctgtggtgagtcgaattattgagattctacaagtctttcaagagttgaacaactttaatggtgtccttgaggttgtcagtgctatgaattcatcacctgtttacagactagaccacacatttgagcaaataccaagtcgccagaagaaaattttagaagaagctcatgaattgagtgaagatcactataagaaatatttggcaaaactcaggtctattaatccaccatgtgtgcctttctttggaatttatctcactaatatcttgaaaacagaagaaggcaaccctgaggtcctaaaaagacatggaaaagagcttataaactttagcaaaaggaggaaagtagcagaaataacaggagagatccagcagtaccaaaatcagccttactgtttacgagtagaatcagatatcaaaaggttctttgaaaacttgaatccgatgggaaatagcatggagaaggaatttacagattatcttttcaacaaatccctagaaatagaaccacgaaaccctaagcctctcccaagatttccaaaaaaatatagctatcccctaaaatctcctggtgttcgtccatcaaacccaagaccaggtaccatgaggcatcccacacctctgcagcaggagccaaggaaaattagttatagtaggatccctgaaagtgaaacagaaagtacagcatctgcaccaaattctccaagaacaccgttaacacctccgcctgcttctggtgcttccagtaccacagatgtttgcagtgtatttgattccgatcattcgagcccttttcactcaagatctgcttctgtatcatctataagtttaaccaaaggcactgatgaagtgcctgtccctcctcctgttcctccacgaagacgaccagaatctgccccagcagaatcttcaccatctaagattatgtctaagcatttggacagtcccccagccattcctcctaggcaacccacatcaaaagcctattcaccacgatattcaatatcagaccggacctctatctcagaccctcctgaaagccctcccttattaccaccacgagaacctgtgaggacacctgatgttttctcaagctcaccactacatctccaacctccccctttgggcaaaaaaagtgaccatggcaatgccttcttcccaaacagcccttccccctttacaccacctcctcctcaaacaccttctcctcacggcacaagaaggcatctgccatcaccaccattgacacaagaagtggaccttcattccattgctgggccgcctgttcctccacgacaaagcacttctcaacatatccctaaactccctccaaaaacttacaaaagggagcacacacacccatccatgcacagagatggaccaccactgttggagaatgcccattcttcctgagttcctctgtactgggatgtatattttcctagccccaaatccattgctggcaatggatgcactgaatgtgccagcactgaggagttaaaatgagaactccaaacactaacgactcttcttcaagatgcagtataagacaatgaattttaacctagatgtaattatacaatggaaatggtattccagtttagaatatggaaagaccgacctagaggaattggacaactgattgcacctgaaaatcataaagggactttttctggccaataggcaggagtcctctttttgtgaagtgatcttttgtgaagtgatcattaaagggatggaaaacacagtctagtgtccagcaggcccacatgacagtttttgtaattcaaattatgcacttttaaaaaaaaaaacttaaacagggatcttaatatcttcctttgttttcctttgctttactcttctactttagaatattttcttaaaaatcactcaaaggactgtgaggaaaggctgtggtacctgaccttgttgaaatcaaggcccggcactgtactacaggcctgtttacagattattacggtgaactgaatgggtaccgaggcttcaccaaagaggtacttttttgttgttgttgttgttttaggaataattgtaccaattttaagagcattccccccacctgtccccacacacccaaacaaaatgtggtggtgttgccttcaaaaaagagaagttttgtgtcattaacatgacagaagaactttttaaaaaaaaataactgtcaactattctatttgcatttaggagactgttcatctatgctagattgtcattttccctccttctcccacagaagtttactggtagtccatgtcatggctcgtagctatccctctaaccataccatggaaatgcaggcacccaatgtgaaaaggagcacttgctgggcatcactgacaccgctcatgttttacacatagttgagtaatcagcatatctagaattatcttgcattgcctaaatcatatgtatatagtgaatgttatataatatacctggcaggtctgttttaatttaattgaataaagatacaaatactttgtttggctggcatatattaaattattatatgaagaaaatggttgattcttatttcttttagttgaaaaacacacaaaaacactaaacataaaagcacgttttgtggtacgccttggtttctagttctggatatatgtattaatcttaaagaatgatctaaagtcacagcttggcatataggaagatacttggttagaataggatgggtatcttttaagcagaactttgtaagtaagttttaagttcctaagcaacaagtatacagtttgttaaggtttatattgaacattctaccttgcttgaggttttctgctttatcaaaactattcataatagaacatctacctgcatcattactatcataatatggattattcataaagcgtatgtactgttcttctgagtctaacaaatactgtgactgaaatgcatgcaccttgttgaagagaaaacattttattaatctccactataatgtctgtgaaatgtgcagtattccatccttagagagtttatctggttcatcagcatctgcatgtatcctctgaataatgaagcaacatttcagcaattctgttaaccacaccattagagacatttttagaagtgctgcaacatggtgggaacctagtactttaataatttcctatgatatttattagagcataaaatgtacatcacgatagtacagtatgtagtcctttaagaccagaaggtatgttaactgcaccatcattaagcagtctatcctattttcttatttatttgttagaattgaatcctttctcaatatctgtaccattcctatgatggtagccattcttctctttataaaatatttcctctttgaaaagcgtcctaaaacattaatttcaaatcccctcttggatgcaaagtgtccctaagaccatccattcaacagtatttatgtgagccaacttactagagccgctacaactaatcatgatagacagtccagaatctccctggactttatactgggccagcctcattgtccctaagatttctctttttatgtctcatggattacttctctttttaattgccccaggcacattccaaatgagaacctggtaaaagtcacattggacccccttcagtatgtcttcggctaatgtgttagccttcaataaggtgataaccccttttcaacctatctagtctataaagaggaaaaattcagatttggagttctaatcctatttctcccaaagggaactattcttctaccccatggttctaggagaccacttcactgtgcaacagttttacatgcattgtggatggaggatatttttattctgaactgttacatttaggtaaaaatattttctgcagtggtaactgattagaaaaatgccaattggatgcccttaggtggaggtgagaaaatggcatccttgccttcttctcaatatgaaacattaactagttgacaaatttatccttgtagtaatgaaaatctatttaatcagggaccagaaatggctgaggagataaatgcatcattacaaaattctgcttttgaatcctggacattacaagggggtaaatgcagcatgactttttgttaaccacattccaaaatgtggaacatttcttttagaaatgaaaatatttcaaggctgatgtattttaagactacacattatcaggaaacatacattgagagttcgcttaattaaaggttgttgggcatcaaattatgtttagtaggttactattctctaacaactcaaggatgctttaatggatctgaatttgacaaagagcatgccacactaatactacagtcaacaacagcccagagaacaattactatgtcagctggaggctatattatgattctaaattcttaaaggtttttttccctccataaatcaaaaattaccttatgtaaaccaaaaattagttggtatttatggtcatgatcttaattctcaagtttagcttaatcttgtatttcattgtttgtcttctaatatgacagcttaaattcagatttttaagtgactcagcaaaataggaggagtgtcccaatttattagtgttgtacatattgaagaaaacctttttgttccttcagatttagaaagaaacagtttaaccatttatttcttggtattctgctgctgtgaataggtttacttattcttttaacatatattgtgtgactacgcaagtataggtcctgttgtattgcattaatctttaccagtaactaaacatcacaaggttaatattggtttggctgaaagaattatgcagtaaagttatttataagggaacatgatgactttattcaatatttttcttctttgaaacatctcattactaacttttaagattatttcataatcccttatacatgagccaatgaaatattttgagctctacttaagaagcatgaagtctatattataaatctaaacaacaaaagcacttgtaacttgtttagtaaattccatgccttattttccatttttgacaccgtaaagtgcattttctgtcgactgtgagcaaatttcccttttgcctttaatgaaaatagtgcattaagtagccaattgctgcagaattataaagcaaattagctaacagtgggtcacattggactaccactcaaagaaacaagatgcataacagatgatggaaggtacatgtggtgtggcttagggagagcgcacctgtgccagatgcatgccactttcagtagctgccaaatgtgcctttaattaagaacatctctaatttttttcttcagatcaagtcagcatttggggtcgggatttgggcagggaactttggggtgcaaatatctggtgaaaccaccagagaatttgtttgtcaaagtgacatgtataattttagttgagacgtgtttgtgtatatatgtgtatttgcctttgtttagtagcacggttatttgctaaaataattgtcaaaaaattgctctgtcggtcggtctttgatgtaagaacaaagtgtggtctatacatctaatatggcctttgtacctaaccatgttcataggtaatctttgtactctgtgtgcagcagtatttggtttgcatttaaagtgaaaataacggctgttatttttctggcattactaagataaactgaaaaataataaagaaaaatgccttacatagccc

SEQ ID NO: 3979 - DNA, 2846 bp, Homo sapiens
  source 1..2846: mol_type = genomic DNA
ggtccgggttcgcttgcctcgtcagcgtccgcgtttttcccggccccccccaacccccccggacaggacccccttgagcttgtccctcagctgccaccatgagcgaccaagatcactccatggatgaaatgacagctgtggtgaaaattgaaaaaggagttggtggcaataatgggggcaatggtaatggtggtggtgccttttcacaggctcgaagtagcagcacaggcagtagcagcagcactggaggaggagggcaggagtcccagccatcccctttggctctgctggcagcaacttgcagcagaattgagtcacccaatgagaacagcaacaactcccagggcccgagtcagtcagggggaacaggtgagcttgacctcacagccacacaactttcacagggtgccaatggctggcagatcatctcttcctcctctggggctacccctacctcaaaggaacagagtggcagcagtaccaatggcagcaatggcagtgagtcttccaagaatcgcacagtctctggtgggcagtatgttgtggctgccgctcccaacttacagaaccagcaagttctgacaggactacctggagtgatgcctaatattcagtatcaagtaatcccacagttccagaccgttgatgggcaacagctgcagtttgctgccactggggcccaagtgcagcaggatggttctggtcaaatacagatcataccaggtgcaaaccaacagattatcacaaatcgaggaagtggaggcaacatcattgctgctatgccaaacctactccagcaggctgtccccctccaaggcctggctaataatgtactctcaggacagactcagtatgtgaccaatgtaccagtggccctgaatgggaacatcaccttgctacctgtcaacagcgtttctgcagctaccttgactcccagctctcaggcagtcacgatcagcagctctgggtcccaggagagtggctcacagcctgtcacctcagggactaccatcagttctgccagcttggtatcatcacaagccagttccagctcctttttcaccaatgccaatagctactcaactactactaccaccagcaacatgggaattatgaactttactaccagtggatcatcagggaccaactctcaaggccagacaccccagagggtcagtgggctacaggggtctgatgctctgaacatccagcaaaaccagacatctggaggctcattgcaagcaggccagcaaaaagaaggagagcaaaaccagcagacacagcagcaacaaattcttatccagcctcagctagttcaagggggacaggccctccaggccctccaagcagcaccattgtcagggcagacctttacaactcaagccatctcccaggaaaccctccagaacctccagcttcaggctgttccaaactctggtcccatcatcatccggacaccaacagtggggcccaatggacaggtcagttggcagactctacagctgcagaacctccaagttcagaacccacaagcccaaacaatcaccttagccccaatgcagggtgtttccttggggcagaccagcagcagcaacaccactctcacacccattgcctcagctgcttccattcctgctggcacagtcactgtgaatgctgctcaactctcctccatgccaggcctccagaccattaacctcagtgcattgggtacttcaggaatccaggtgcacccaattcaaggcctgccgttggctatagcaaatgccccaggtgatcatggagctcagcttggtctccatggggctggtggtgatggaatacatgatgacacagcaggtggagaggaaggagaaaacagcccagatgcccaaccccaagccggtcggaggacccggcgggaagcatgcacctgcccctactgtaaagacagtgaaggaaggggctcgggggatcctggcaaaaagaaacagcatatttgccacatccaaggctgtgggaaagtgtatggcaagacctctcacctgcgggcacacttgcgctggcatacaggcgagaggccatttatgtgtacctggtcatactgtgggaaacgcttcacacgttcggatgagctacagaggcacaaacgtacacacacaggtgagaagaaatttgcctgccctgagtgtcctaagcgcttcatgaggagtgaccacctgtcaaaacatatcaagacccaccagaataagaagggaggcccaggtgtagctctgagtgtgggcactttgcccctggacagtggggcaggttcagaaggcagtggcactgccactccttcagcccttattaccaccaatatggtagccatggaggccatctgtccagagggcattgcccgtcttgccaacagtggcatcaacgtcatgcaggtggcagatctgcagtccattaatatcagtggcaatggcttctgagatcaggcacccggggccagagacatatgggccataccccttaaccccgggatgcaaggtagcatgggtccaagagacatggaagagagagccatgaagcattaaaatgcatggtgttgagaagaatcaggagagggatacaagagaggagatggggtcccggcacccatctgtatcatcagtgcctctttgaaggtgggaaacattagtgaaaattctgttggtgccacgctttgatgagcatttgtttgaccccagtttcttcttacacttcttaccccagcctacccttcctgcatttctcttctcagctcttccatgatggattcccccccctttcctaaagccatcatgccttgataaatatatatgatcattgaaatacttttt

SEQ ID NO: 3980 - DNA, 7603 bp, Homo sapiens
  source 1..7603: mol_type = genomic DNA
agcgaaggccccgcccgggccaaccgcctgcctggtccgccctctgaccaagatcactccatggatgaaatgacagctgtggtgaaaattgaaaaaggagttggtggcaataatgggggcaatggtaatggtggtggtgccttttcacaggctcgaagtagcagcacaggcagtagcagcagcactggaggaggagggcaggagtcccagccatcccctttggctctgctggcagcaacttgcagcagaattgagtcacccaatgagaacagcaacaactcccagggcccgagtcagtcagggggaacaggtgagcttgacctcacagccacacaactttcacagggtgccaatggctggcagatcatctcttcctcctctggggctacccctacctcaaaggaacagagtggcagcagtaccaatggcagcaatggcagtgagtcttccaagaatcgcacagtctctggtgggcagtatgttgtggctgccgctcccaacttacagaaccagcaagttctgacaggactacctggagtgatgcctaatattcagtatcaagtaatcccacagttccagaccgttgatgggcaacagctgcagtttgctgccactggggcccaagtgcagcaggatggttctggtcaaatacagatcataccaggtgcaaaccaacagattatcacaaatcgaggaagtggaggcaacatcattgctgctatgccaaacctactccagcaggctgtccccctccaaggcctggctaataatgtactctcaggacagactcagtatgtgaccaatgtaccagtggccctgaatgggaacatcaccttgctacctgtcaacagcgtttctgcagctaccttgactcccagctctcaggcagtcacgatcagcagctctgggtcccaggagagtggctcacagcctgtcacctcagggactaccatcagttctgccagcttggtatcatcacaagccagttccagctcctttttcaccaatgccaatagctactcaactactactaccaccagcaacatgggaattatgaactttactaccagtggatcatcagggaccaactctcaaggccagacaccccagagggtcagtgggctacaggggtctgatgctctgaacatccagcaaaaccagacatctggaggctcattgcaagcaggccagcaaaaagaaggagagcaaaaccagcagacacagcagcaacaaattcttatccagcctcagctagttcaagggggacaggccctccaggccctccaagcagcaccattgtcagggcagacctttacaactcaagccatctcccaggaaaccctccagaacctccagcttcaggctgttccaaactctggtcccatcatcatccggacaccaacagtggggcccaatggacaggtcagttggcagactctacagctgcagaacctccaagttcagaacccacaagcccaaacaatcaccttagccccaatgcagggtgtttccttggggcagaccagcagcagcaacaccactctcacacccattgcctcagctgcttccattcctgctggcacagtcactgtgaatgctgctcaactctcctccatgccaggcctccagaccattaacctcagtgcattgggtacttcaggaatccaggtgcacccaattcaaggcctgccgttggctatagcaaatgccccaggtgatcatggagctcagcttggtctccatggggctggtggtgatggaatacatgatgacacagcaggtggagaggaaggagaaaacagcccagatgcccaaccccaagccggtcggaggacccggcgggaagcatgcacctgcccctactgtaaagacagtgaaggaaggggctcgggggatcctggcaaaaagaaacagcatatttgccacatccaaggctgtgggaaagtgtatggcaagacctctcacctgcgggcacacttgcgctggcatacaggcgagaggccatttatgtgtacctggtcatactgtgggaaacgcttcacacgttcggatgagctacagaggcacaaacgtacacacacaggtgagaagaaatttgcctgccctgagtgtcctaagcgcttcatgaggagtgaccacctgtcaaaacatatcaagacccaccagaataagaagggaggcccaggtgtagctctgagtgtgggcactttgcccctggacagtggggcaggttcagaaggcagtggcactgccactccttcagcccttattaccaccaatatggtagccatggaggccatctgtccagagggcattgcccgtcttgccaacagtggcatcaacgtcatgcaggtggcagatctgcagtccattaatatcagtggcaatggcttctgagatcaggcacccggggccagagacatatgggccataccccttaaccccgggatgcaaggtagcatgggtccaagagacatggaagagagagccatgaagcattaaaatgcatggtgttgagaagaatcaggagagggatacaagagaggagatggggtcccggcacccatctgtatcatcagtgcctctttgaaggtgggaaacattagtgaaaattctgttggtgccacgctttgatgagcatttgtttgaccccagtttcttcttacacttcttaccccagcctacccttcctgcatttctcttctcagctcttccatgatggattcccccccctttcctaaagccatcatgccttgataaatatatatgatcattgaaatactttttaacaaaaaacagattctatattattatatatatatatatatatataaagatatatagagatgcattcacaggggttggctgggaggaggaagaccattctgtgaccaaaataccttggtcattttttttatattgccttatttccctatggctgagccttgttgtgacacatcaagcttttctgtagatgttgtcttggcttcccaccagcttaagcgttcatatgctctgcttttagttcatatatacatacataatgtttttcctttcttaattttgtctttttgtttgggatcagcttcttgcactccttccctaactcaactgttgccgtctcatcttctctcatctgatcacttcatgttttgtttttgttactgcctggatgaggcacttctgtcaattttttcaggaccttagttccagcagcagaatggaaaaatccttgaagcccaggctgatgcttgaagtaactgtggagggagtgttcaaaatactactgacgcaggcaccttcttggcgctggagagtcaaaggcatctcccttcattagctgctctgagcatcaagaattagaagtctttcagtggaattgtacaagagtccctttgaagataataatcttggctcagtttgtataaactgtcaaattttcaaataataggtagggggctttcactaggaaaatcatgtgctcagaagaggaaatgactcgtagtcaggttcaggagttagtggagtatttggactttggtactgctgtcttccaaggtagctctaagttttgatgtgtgggcttctgagtttatattctgaaaggaaatacacttcttttgaacatccccactaggttcttttccattgtcaataaggagcatcagccagtgaatctgtttcaggtttccattctgcagaactcctccaaagcatgtgctagtggcaagacagtggttcttatgatgttttcccttaacttttccttgtatgttcttgggtggttcctaagggaaagggaagcacatgatcatgggaatgatagcccagaacaaaaagaaatcttgtcttaccacagtgttttataggagagattgggagaaatcatcctgttttctctgtgacctgatttcagaagagactgatccaaaaattataacggcagggaacctagtgcatttggcactgagatttaaatgcaaccagaattgtcctcaaggcccagccataaaagcattgtctctctcgaccttctggtatcttgttagagagcttttcactgtgaggaagtgtggaaaaatagctctgtgtgtgtgtgtgtgtgtgtgtgtgtgtgtgtgtgtaatctgttaggttggggataggttttctgctagccaatattaaaagagacctgcaataaaaaaattaccctgatctgatagaaagcaagtgtttttgtatgtgtgggtgaatgtgtgttcatgcccgtatatgtctacacacagatgacaaattatatttgaaatcgttggaaaataaattcagatcaaaatgcctttcaggcccattacctagaaatctatcttaaaacctgggtatgttcctaaggtcatttctttgcttatgctaaattaattacaattatgaatggaggatattctactgtacttttttaaaaagaaactatttttgtgtttgaaagtgaaaccaacatccagatctatagcagagtccttattcttctcataaatctttttactttggctacaaatagatgatggtatgattctattatatattttatataaaatccatccaaattaagttttgggtaagtgtgttgtttaatctgaactatagtaacttaatactctaaacaatagttcactccatttggtcctttctccacagatgtaattatgttttcaactcaggaactatggcaaggaactttccccagatcaaattctattaacgctgagatacaagtcatccatgcacagccactatcataccctttattctcactgaaaggcagaactcagaacctgttattttatgtctgtaatcatgtactttggcatcttttggaggaaaggggcaggataactcactggaatgtacagtattttgctagtgcatttcaaggaatggaatcttctccagtatgaaattaccagatataaaataatgtaatgatgctgaggatataagcttttagaaggtaatttgatggtatttctttctcgaatgaaaagctgctggtttaccctcaaccctattcattagcattaccatgagtgaatttatatctaattatttccacttgccctgttctcttcacaccaaggaagctccagatccagtatcttgtttggcctcaaaacagaagcagcttcttttgtctcccagcagtagtgagccactcagtctcttccacaggaagtttggagcctacattccttgagtcaggagcttattacagaaaaaccccgtttccctgaacttttggctaacagaaattaatttaactgacatgcatattgattctgaaatttttttcctaagtttttttcatttttttgaatgagttttttaaattttttagatgaccaaaacttgcagggcaggggatgcccagaagagtggtgagatagtaaaacacttattccctcatcctttcaggttttcaggttgcccatttatattcatttacatgtcatttgactgtctcactttttacccagaacagtaacaacccacaccgtcttccttcagggatttccaactggcactctgtgggtgctacacagaatgcaatttaatggatatttctcagcctggttcagaataaattgatcctttgatcccagaaagtatatactgaagtgtgggataaagattatgattaggggagggttggagacaaaagctgtaaattactatggctgatttatttctactatatacatatatattttttgcttttgtatatcctatataggaaactaagcattgtattttttttaacaaatctaaaaaagcactatgaactacaggtgtttgactttcaaaatatattttgtattgttaatatcttcacattgtgtgaatactggaagctgcagatctttgctaggacgcaataaatttatatactttttgaggggttcttctggggtgctaatcaggcccctgttatgcttagggggagccctggtgctacttgcttgaagttttcagtgtaagtaccctgatgccttttggaccttgggatcagatcaagagttttggagatcaggtaccaaggaaataaggacagtctagctgcctcaagtgaggggccctttgcatagctctccttccccctcactgaagctgggtagcctattggggttgagagggaaaatgtgaaatctcagaatttatctcccttagaagagagccagtaacttatgtacaaggatgaaagaaaggtcgcagcagtagctttggggaaagggaggaagatatggcacttctccaaccccggaaaacattgcttttgaaaactgctgataaaatatgagccggttattacttctgtttgggagactgtgctctctgtggtgcctctcttggctctactccacagataccagacctcttctaagaggatgagcagaccagctttgaggttgacctgtttctctttgtctgccttcccaaaacaccagcccccaggaagacattaagcagccttaagcttaaattcctactccctcttccaaatttggctcacttgccttagatccaaggcagggaaaggaaaagaaggggggtctctggctttattactcccctaagtctttactctgacttccccaaacccagaaagattttctccacagtgttcatttgaaagaggagtattttgtcccattttccccttcctcattatcaaacagccccagtcttccttgtctctgctaagaaagtagaggcatgatgatctgcctctcaactgccctaagtcctagctaagtatcaggggaaaaaaaaaaaaaaaaagcctaacaaatgggattagactagggctgcaagtagtgaggattttgttgatacctctgctgggatgtgtgctttcccatatcttgccttcaggaattacactgtgccttttccccagggatatgggctctgtctacccagtgctccagtttcccggtaactgctcttgaacattgtggacaagggcaggtcttcatatttttgatcatccctttctcccagtgaaatcccatagcccttacctagagtctagggcacaaagacttcggggaagatacactgagattgacctgaggagacatctacacacaccagtggcagctgccccagggcctgcttccccttcctaagtctgtcatcctctggaagggatgggtggtgctccaatctctggtgcctaaaaacccaagtttatttctctcttaacactggcaataaccagtccacaccactgttgccttttaaaacctcttaataatctcatgctgtgtttgttttgattccaatccaattatcaccagggctgtgtgggtaaatgcttttaaatgctctctcatcttgttcttccccctcaccccccactcttaggtatgtatgatgctaatcttgtccctaagtaagtttcttcctgctccttttgtatcttcctttcttgtctttcctcctaccttttgtctcttggtgttttgggacttttttttttttttttttggccttttgtacaaagattagtttcaatgtagtctgtagcctcctttgtaaaccaattaaaaagttttttaataaaaaa

SEQ ID NO: 3981 - DNA, 2184 bp, Homo sapiens
  source 1..2184: mol_type = genomic DNA
agtgccctccccgctccgcggcgccggctgcgaagttgagcgaaaagtttgaggccggagggagcgaggccggggagtccgctccagcggggcgctccagtccctcagacgtgggctgagcttgggacgagctgcgttccgccccaggccactgtagggaacggcggtggcgcctccccagcaaaccggaccgactgggtagggccgcccaccctgccttcgcgccgctcgtggctcctgtgcggcccgccctcgcggggccccgggaactgggccacttgtcgcttgggcgagagcaggcggcagctggtggcccggttcgggcttggctttggcgcgacccgggagcggctcccacgagcgccgcgcgcgtcgcaacggagcggggccctgagaagcgcgcgccgcggctcccaccgctctggagctccgggcaggggacacggcaacctggatggctggggcagggatcctctcccagaacttcgtgcccagcaatgtccgctcaagttctgggatttttacgcagctggactcccctccccctggcagccccgaggggtccagccgccgcagggaatgacgccggtgctcctgcagccacggctccgggcggggaaggcgagccccacagccggccctgcgacgcccgcctgggcagcaccgataaggagctgaaggcaggagccgccgccacgggcagcgcccccacagcgccagggaccccctggcagcgggagccgcgggtcgaggttatggatccagcgggcggcccccggggcgtgctcccgcggccctgccgcgtgctggtgctgctgaacccgcgcggcggcaagggcaaggccttgcagctcttccggagtcacgtgcagccccttttggctgaggctgaaatctccttcacgctgatgctcactgagcggcggaaccacgcgcgggagctggtgcggtcggaggagctgggccgctgggacgctctggtggtcatgtctggagacgggctgatgcacgaggtggtgaacgggctcatggagcggcctgactgggagaccgccatccagaagcccctgtgtagcctcccagcaggctctggcaacgcgctggcagcttccttgaaccattatgctggctatgagcaggtcaccaatgaagacctcctgaccaactgcacgctattgctgtgccgccggctgctgtcacccatgaacctgctgtctctgcacacggcttcggggctgcgcctcttctctgtgctcagcctggcctggggcttcattgctgatgtggacctagagagtgagaagtatcggcgtctgggggagatgcgcttcactctgggcaccttcctgcgtctggcagccctgcgcacctaccgcggccgactggcctacctccctgtaggaagagtgggttccaagacacctgcctcccccgttgtggtccagcagggcccggtagatgcacaccttgtgccactggaggagccagtgccctctcactggacagtggtgcccgacgaggactttgtgctagtcctggcactgctgcactcgcacctgggcagtgagatgtttgctgcacccatgggccgctgtgcagctggcgtcatgcatctgttctacgtgcgggcgggagtgtctcgtgccatgctgctgcgcctcttcctggccatggagaagggcaggcatatggagtatgaatgcccctacttggtatatgtgcccgtggtcgccttccgcttggagcccaaggatgggaaaggtgtgtttgcagtggatggggaattgatggttagcgaggccgtgcagggccaggtgcacccaaactacttctggatggtcagcggttgcgtggagcccccgcccagctggaagccccagcagatgccaccgccagaagagcccttatgacccctgggccgcgctgtgccttagtgtctacttgcaggacccttcctccttccctagggctgcagggcctgtccacagctcctgtgggggtggaggagactcctctggagaagggtgagaaggtggaggctatgctttggggggacaggccagaatgaagtcctgggtcaggagcccagctggctgggcccagctgcctatgtaaggccttctagtttgttctgagacccccaccccacgaaccaaatccaaataaagtgacattcccagcctg

SEQ ID NO: 3982 - DNA, 1866 bp, Homo sapiens
  source 1..1866: mol_type = genomic DNA
gactcatccgtcgggccggaaccgaaccccaagccccagggagaaagccccggagcaggcgcccttctcagggattgtaggcttagtcacacggcgggggcgccctcggaggcaccggacctcagctctctggacttcccgggaacctggctccccgcgcgtggtcccgggatttagtcgggcgctccccacctctggcagctgcggccccggactccgccagcgctgtcttctctccctcaggtccagccgccgcagggaatgacgccggtgctcctgcagccacggctccgggcggggaaggcgagccccacagccggccctgcgacgcccgcctgggcagcaccgataaggagctgaaggcaggagccgccgccacgggcagcgcccccacagcgccagggaccccctggcagcgggagccgcgggtcgaggttatggatccagcgggcggcccccggggcgtgctcccgcggccctgccgcgtgctggtgctgctgaacccgcgcggcggcaagggcaaggccttgcagctcttccggagtcacgtgcagccccttttggctgaggctgaaatctccttcacgctgatgctcactgagcggcggaaccacgcgcgggagctggtgcggtcggaggagctgggccgctgggacgctctggtggtcatgtctggagacgggctgatgcacgaggtggtgaacgggctcatggagcggcctgactgggagaccgccatccagaagcccctgtgtagcctcccagcaggctctggcaacgcgctggcagcttccttgaaccattatgctggctatgagcaggtcaccaatgaagacctcctgaccaactgcacgctattgctgtgccgccggctgctgtcacccatgaacctgctgtctctgcacacggcttcggggctgcgcctcttctctgtgctcagcctggcctggggcttcattgctgatgtggacctagagagtgagaagtatcggcgtctgggggagatgcgcttcactctgggcaccttcctgcgtctggcagccctgcgcacctaccgcggccgactggcctacctccctgtaggaagagtgggttccaagacacctgcctcccccgttgtggtccagcagggcccggtagatgcacaccttgtgccactggaggagccagtgccctctcactggacagtggtgcccgacgaggactttgtgctagtcctggcactgctgcactcgcacctgggcagtgagatgtttgctgcacccatgggccgctgtgcagctggcgtcatgcatctgttctacgtgcgggcgggagtgtctcgtgccatgctgctgcgcctcttcctggccatggagaagggcaggcatatggagtatgaatgcccctacttggtatatgtgcccgtggtcgccttccgcttggagcccaaggatgggaaaggtgtgtttgcagtggatggggaattgatggttagcgaggccgtgcagggccaggtgcacccaaactacttctggatggtcagcggttgcgtggagcccccgcccagctggaagccccagcagatgccaccgccagaagagcccttatgacccctgggccgcgctgtgccttagtgtctacttgcaggacccttcctccttccctagggctgcagggcctgtccacagctcctgtgggggtggaggagactcctctggagaagggtgagaaggtggaggctatgctttggggggacaggccagaatgaagtcctgggtcaggagcccagctggctgggcccagctgcctatgtaaggccttctagtttgttctgagacccccaccccacgaaccaaatccaaataaagtgacattcccagcctg

SEQ ID NO: 3983 - DNA, 1426 bp, Homo sapiens
  source 1..1426: mol_type = genomic DNA
gagccaacgggcggcccccggggcgtgctcccgcggccctgccgcgtgctggtgctgctgaacccgcgcggcggcaagggcaaggccttgcagctcttccggagtcacgtgcagccccttttggctgaggctgaaatctccttcacgctgatgctcactgagcggcggaaccacgcgcgggagctggtgcggtcggaggagctgggccgctgggacgctctggtggtcatgtctggagacgggctgatgcacgaggtggtgaacgggctcatggagcggcctgactgggagaccgccatccagaagcccctgtgtagcctcccagcaggctctggcaacgcgctggcagcttccttgaaccattatgctggctatgagcaggtcaccaatgaagacctcctgaccaactgcacgctattgctgtgccgccggctgctgtcacccatgaacctgctgtctctgcacacggcttcggggctgcgcctcttctctgtgctcagcctggcctggggcttcattgctgatgtggacctagagagtgagaagtatcggcgtctgggggagatgcgcttcactctgggcaccttcctgcgtctggcagccctgcgcacctaccgcggccgactggcctacctccctgtaggaagagtgggttccaagacacctgcctcccccgttgtggtccagcagggcccggtagatgcacaccttgtgccactggaggagccagtgccctctcactggacagtggtgcccgacgaggactttgtgctagtcctggcactgctgcactcgcacctgggcagtgagatgtttgctgcacccatgggccgctgtgcagctggcgtcatgcatctgttctacgtgcgggcgggagtgtctcgtgccatgctgctgcgcctcttcctggccatggagaagggcaggcatatggagtatgaatgcccctacttggtatatgtgcccgtggtcgccttccgcttggagcccaaggatgggaaaggtgtgtttgcagtggatggggaattgatggttagcgaggccgtgcagggccaggtgcacccaaactacttctggatggtcagcggttgcgtggagcccccgcccagctggaagccccagcagatgccaccgccagaagagcccttatgacccctgggccgcgctgtgccttagtgtctacttgcaggacccttcctccttccctagggctgcagggcctgtccacagctcctgtgggggtggaggagactcctctggagaagggtgagaaggtggaggctatgctttggggggacaggccagaatgaagtcctgggtcaggagcccagctggctgggcccagctgcctatgtaaggccttctagtttgttctgagacccccaccccacgaaccaaatccaaataaagtgacattcccagcctg

SEQ ID NO: 3984 - DNA, 2238 bp, Homo sapiens
  source 1..2238: mol_type = genomic DNA
aatgcagctctgccttcctgctccctgtgcagaggtgccggctcctgcttcctggttcccagctttccttttgggaactgcctgaggtggtttgacacacagctgttgggcttctcttcccttgaggtctctgaaccagggcacccatgcagggagagggccctctgaaggtgaaggcagagacggggacgacgcagcagcaagacacggatgaccaaaggctgtcggcaaaccaccaggacacaggcctgggacagagtcacagcctcagaaggaaccaaccctgccaacaccgtgatcgtagacttcccaacctccaaaactgtgagacagtcaatttctgttgtctacgccaccaggacactaatacaaatgcctatagatgctgggcaggcagctgagacaaatggagtgggtagggctgcagctcgccaccttgagagggctctgaagagaatcaccctgaattgcagccacagtcagcagcctggagatggagtttcgccctgtcacccaggctggagtgcaatgggacgatctcagctcaccacaacctctgcctcctgggtgcaagcaattctcctgcctcagcctcccaagtagctgggactacaggtccagccgccgcagggaatgacgccggtgctcctgcagccacggctccgggcggggaaggcgagccccacagccggccctgcgacgcccgcctgggcagcaccgataaggagctgaaggcaggagccgccgccacgggcagcgcccccacagcgccagggaccccctggcagcgggagccgcgggtcgaggttatggatccagcgggcggcccccggggcgtgctcccgcggccctgccgcgtgctggtgctgctgaacccgcgcggcggcaagggcaaggccttgcagctcttccggagtcacgtgcagccccttttggctgaggctgaaatctccttcacgctgatgctcactgagcggcggaaccacgcgcgggagctggtgcggtcggaggagctgggccgctgggacgctctggtggtcatgtctggagacgggctgatgcacgaggtggtgaacgggctcatggagcggcctgactgggagaccgccatccagaagcccctgtgtagcctcccagcaggctctggcaacgcgctggcagcttccttgaaccattatgctggctatgagcaggtcaccaatgaagacctcctgaccaactgcacgctattgctgtgccgccggctgctgtcacccatgaacctgctgtctctgcacacggcttcggggctgcgcctcttctctgtgctcagcctggcctggggcttcattgctgatgtggacctagagagtgagaagtatcggcgtctgggggagatgcgcttcactctgggcaccttcctgcgtctggcagccctgcgcacctaccgcggccgactggcctacctccctgtaggaagagtgggttccaagacacctgcctcccccgttgtggtccagcagggcccggtagatgcacaccttgtgccactggaggagccagtgccctctcactggacagtggtgcccgacgaggactttgtgctagtcctggcactgctgcactcgcacctgggcagtgagatgtttgctgcacccatgggccgctgtgcagctggcgtcatgcatctgttctacgtgcgggcgggagtgtctcgtgccatgctgctgcgcctcttcctggccatggagaagggcaggcatatggagtatgaatgcccctacttggtatatgtgcccgtggtcgccttccgcttggagcccaaggatgggaaaggtgtgtttgcagtggatggggaattgatggttagcgaggccgtgcagggccaggtgcacccaaactacttctggatggtcagcggttgcgtggagcccccgcccagctggaagccccagcagatgccaccgccagaagagcccttatgacccctgggccgcgctgtgccttagtgtctacttgcaggacccttcctccttccctagggctgcagggcctgtccacagctcctgtgggggtggaggagactcctctggagaagggtgagaaggtggaggctatgctttggggggacaggccagaatgaagtcctgggtcaggagcccagctggctgggcccagctgcctatgtaaggccttctagtttgttctgagacccccaccccacgaaccaaatccaaataaagtgacattcccagcctg

SEQ ID NO: 3985 - DNA, 1851 bp, Homo sapiens
  source 1..1851: mol_type = genomic DNA
gctccgcggcgccggctgcgaagttgagcgaaaagtttgaggccggagggagcgaggccggggagtccgctccagcggggcgctccagtccctcagacgtgggctgagcttgggacgagctgcgttccgccccaggccactgtagggaacggcggtggcgcctccccagcaaaccggaccgactgggtccagccgccgcagggaatgacgccggtgctcctgcagccacggctccgggcggggaaggcgagccccacagccggccctgcgacgcccgcctgggcagcaccgataaggagctgaaggcaggagccgccgccacgggcagcgcccccacagcgccagggaccccctggcagcgggagccgcgggtcgaggttatggatccagtggtcggttgcggacgtggcctctttggttttgttttctcagcgggcggcccccggggcgtgctcccgcggccctgccgcgtgctggtgctgctgaacccgcgcggcggcaagggcaaggccttgcagctcttccggagtcacgtgcagccccttttggctgaggctgaaatctccttcacgctgatgctcactgagcggcggaaccacgcgcgggagctggtgcggtcggaggagctgggccgctgggacgctctggtggtcatgtctggagacgggctgatgcacgaggtggtgaacgggctcatggagcggcctgactgggagaccgccatccagaagcccctgtgtagcctcccagcaggctctggcaacgcgctggcagcttccttgaaccattatgctggctatgagcaggtcaccaatgaagacctcctgaccaactgcacgctattgctgtgccgccggctgctgtcacccatgaacctgctgtctctgcacacggcttcggggctgcgcctcttctctgtgctcagcctggcctggggcttcattgctgatgtggacctagagagtgagaagtatcggcgtctgggggagatgcgcttcactctgggcaccttcctgcgtctggcagccctgcgcacctaccgcggccgactggcctacctccctgtaggaagagtgggttccaagacacctgcctcccccgttgtggtccagcagggcccggtagatgcacaccttgtgccactggaggagccagtgccctctcactggacagtggtgcccgacgaggactttgtgctagtcctggcactgctgcactcgcacctgggcagtgagatgtttgctgcacccatgggccgctgtgcagctggcgtcatgcatctgttctacgtgcgggcgggagtgtctcgtgccatgctgctgcgcctcttcctggccatggagaagggcaggcatatggagtatgaatgcccctacttggtatatgtgcccgtggtcgccttccgcttggagcccaaggatgggaaaggtgtgtttgcagtggatggggaattgatggttagcgaggccgtgcagggccaggtgcacccaaactacttctggatggtcagcggttgcgtggagcccccgcccagctggaagccccagcagatgccaccgccagaagagcccttatgacccctgggccgcgctgtgccttagtgtctacttgcaggacccttcctccttccctagggctgcagggcctgtccacagctcctgtgggggtggaggagactcctctggagaagggtgagaaggtggaggctatgctttggggggacaggccagaatgaagtcctgggtcaggagcccagctggctgggcccagctgcctatgtaaggccttctagtttgttctgagacccccaccccacgaaccaaatccaaataaagtgacattcccagcctg

SEQ ID NO: 3986 - DNA, 1821 bp, Homo sapiens
  source 1..1821: mol_type = genomic DNA
agtgccctccccgctccgcggcgccggctgcgaagttgagcgaaaagtttgaggccggagggagcgaggccggggagtccgctccagcggggcgctccagtccctcagacgtgggctgagcttgggacgagctgcgttccgccccaggccactgtagggaacggcggtggcgcctccccagcaaaccggaccgactgggtccagccgccgcagggaatgacgccggtgctcctgcagccacggctccgggcggggaaggcgagccccacagccggccctgcgacgcccgcctgggcagcaccgataaggagctgaaggcaggagccgccgccacgggcagcgcccccacagcgccagggaccccctggcagcgggagccgcgggtcgaggttatggatccagcgggcggcccccggggcgtgctcccgcggccctgccgcgtgctggtgctgctgaacccgcgcggcggcaagggcaaggccttgcagctcttccggagtcacgtgcagccccttttggctgaggctgaaatctccttcacgctgatgctcactgagcggcggaaccacgcgcgggagctggtgcggtcggaggagctgggccgctgggacgctctggtggtcatgtctggagacgggctgatgcacgaggtggtgaacgggctcatggagcggcctgactgggagaccgccatccagaagcccctgtgtagcctcccagcaggctctggcaacgcgctggcagcttccttgaaccattatgctggctatgagcaggtcaccaatgaagacctcctgaccaactgcacgctattgctgtgccgccggctgctgtcacccatgaacctgctgtctctgcacacggcttcggggctgcgcctcttctctgtgctcagcctggcctggggcttcattgctgatgtggacctagagagtgagaagtatcggcgtctgggggagatgcgcttcactctgggcaccttcctgcgtctggcagccctgcgcacctaccgcggccgactggcctacctccctgtaggaagagtgggttccaagacacctgcctcccccgttgtggtccagcagggcccggtagatgcacaccttgtgccactggaggagccagtgccctctcactggacagtggtgcccgacgaggactttgtgctagtcctggcactgctgcactcgcacctgggcagtgagatgtttgctgcacccatgggccgctgtgcagctggcgtcatgcatctgttctacgtgcgggcgggagtgtctcgtgccatgctgctgcgcctcttcctggccatggagaagggcaggcatatggagtatgaatgcccctacttggtatatgtgcccgtggtcgccttccgcttggagcccaaggatgggaaaggtgtgtttgcagtggatggggaattgatggttagcgaggccgtgcagggccaggtgcacccaaactacttctggatggtcagcggttgcgtggagcccccgcccagctggaagccccagcagatgccaccgccagaagagcccttatgacccctgggccgcgctgtgccttagtgtctacttgcaggacccttcctccttccctagggctgcagggcctgtccacagctcctgtgggggtggaggagactcctctggagaagggtgagaaggtggaggctatgctttggggggacaggccagaatgaagtcctgggtcaggagcccagctggctgggcccagctgcctatgtaaggccttctagtttgttctgagacccccaccccacgaaccaaatccaaataaagtgacattcccagcctg

SEQ ID NO: 3987 - DNA, 2962 bp, Homo sapiens
  source 1..2962: mol_type = genomic DNA
cgactgactagccgggcgataacggcagagagcatagagcgcaggaacaagcgcaacgtccaagagggaagggccagcacgtcgggggcctctctggccctacccaggccgtgttctcgatagctttccggaagaaagggatctgggagcgagatgcgtgtagctagcacgatgcgtcgcgcggtgacgctctggcccgacgccgacggcctctcagtggctcccggaggacccggcgggcccagtgttggagagctgaaggtcaggccaggacagtgagacctgactccttgctcctaccagcctactatggcttaagacccagggccagggtcccgttgatgtaacagagcagaggaccagcagatgaatggacaccttgaagcagaggagcagcaggaccagaggccagaccaggagctgaccgggagctggggccacgggcctaggagcaccctggtcagggctaaggccatggccccgcccccaccgccactggctgccagcaccccgctcctccatggcgagtttggctcctacccagcccgaggcccacgctttgccctcacccttacatcgcaggccctgcacatacagcggctgcgccccaaacctgaagccaggccccggggtggcctggtcccgttggccgaggtctcaggctgctgcaccctgcgaagccgcagcccctcagactcagcggcctacttctgcatctacacctaccctcggggccggcgcggggcccggcgcagagccactcgcaccttccgggcagatggggccgccacctacgaagagaaccgtgccgaggcccagcgctgggccactgccctcacctgtctgctccgaggactgccactgcccggggatggggagatcacccctgacctgctacctcggccgccccggttgcttctattggtcaatccctttgggggtcggggcctggcctggcagtggtgtaagaaccacgtgcttcccatgatctctgaagctgggctgtccttcaacctcatccagacagaacgacagaaccacgcccgggagctggtccaggggctgagcctgagtgagtgggatggcatcgtcacggtctcgggagacgggctgctccatgaggtgctgaacgggctcctagatcgccctgactgggaggaagctgtgaagatgcctgtgggcatcctcccctgcggctcgggcaacgcgctggccggagcagtgaaccagcacgggggatttgagccagccctgggcctcgacctgttgctcaactgctcactgttgctgtgccggggtggtggccacccactggacctgctctccgtgacgctggcctcgggctcccgctgtttctccttcctgtctgtggcctggggcttcgtgtcagatgtggatatccagagcgagcgcttcagggccttgggcagtgcccgcttcacactgggcacggtgctgggcctcgccacactgcacacctaccgcggacgcctctcctacctccccgccactgtggaacctgcctcgcccacccctgcccatagcctgcctcgtgccaagtcggagctgaccctaaccccagacccagccccgcccatggcccactcacccctgcatcgttctgtgtctgacctgcctcttcccctgccccagcctgccctggcctctcctggctcgccagaacccctgcccatcctgtccctcaacggtgggggcccagagctggctggggactggggtggggctggggatgctccgctgtccccggacccactgctgtcttcacctcctggctctcccaaggcagctctacactcacccgtctccgaaggggcccccgtaattcccccatcctctgggctcccacttcccacccctgatgcccgggtaggggcctccacctgcggcccgcccgaccacctgctgcctccgctgggcaccccgctgcccccagactgggtgacgctggagggggactttgtgctcatgttggccatctcgcccagccacctaggcgctgacctggtggcagctccgcatgcgcgcttcgacgacggcctggtgcacctgtgctgggtgcgtagcggcatctcgcgggctgcgctgctgcgccttttcttggccatggagcgtggtagccacttcagcctgggctgtccgcagctgggctacgccgcggcccgtgccttccgcctagagccgctcacaccacgcggcgtgctcacagtggacggggagcaggtggagtatgggccgctacaggcacagatgcaccctggcatcggtacactgctcactgggcctcctggctgcccggggcgggagccctgaaactaaacaagcttggtacccgccgggggcggggcctacattccaatggggcggagcctgagctagggggtgtggcctggctgctagagttgtggtggcaggggccctggccccgtctcaggattgcgctcgctttcatgggaccagacgtgatgctggaaggtgggcgtcgtcacggttaaagagaaatgggctcgtcccgagggtagtgcctgatcaatgagggcggggcctggcgtctgatctggggccgcccttacggggcagggctcagtcctgacgcttgccacctgctcctacccggccaggatggctgagggcggagtctattttacgcgtcgcccaatgacaggacctggaatgtactggctggggtaggcctcagtgagtcggccggtcagggcccgcagcctcgccccatccactccggtgcctccatttagctggccaatcagcccaggaggggcaggttccccggggccggcgctaggatttgcactaatgttcctctccccgcgggtgggggcggggaaattcatatcccctgttcgtctcatgcgcgtcctccgtccccaatctaaaaagcaattgaaaaggtctatgcaataaaggcagtcgcttcattcctctc

SEQ ID NO: 3988 - DNA, 2325 bp, Homo sapiens
  source 1..2325: mol_type = genomic DNA
cgactgactagccgggcgataacggcagagagcatagagcgcaggaacaagcgcaacgtccaagagggaagggccagcacgtcgggggcctctctggccctacccaggccgtgttctcgatagctttccggaagaaagggatctgggagcgagatgcgtgtagctagcacgatgcgtcgcgcggtgacgctctggcccgacgccgacggcctctcagtggctcccggaggacccggcgggcccagtgttggagagctgaaggtcaggccaggacagtgagacctgactccttgctcctaccagcctactatggcttaagacccagggccagggtcccgttgatgtaacagagcagaggaccagcagatgaatggacaccttgaagcagaggagcagcaggaccagaggccagaccaggagctgaccgggagctggggccacgggcctaggagcaccctggtcagggctaaggccatggccccgcccccaccgccactggctgccagcaccccgctcctccatggcgagtttggctcctacccagcccgaggcccacgctttgccctcacccttacatcgcaggccctgcacatacagcggctgcgccccaaacctgaagccaggccccggggtggcctggtcccgttggccgaggtctcaggctgctgcaccctgcgaagccgcagcccctcagactcagcggcctacttctgcatctacacctaccctcggggccggcgcggggcccggcgcagagccactcgcaccttccgggcagatggggccgccacctacgaagagaaccgtgccgaggcccagcgctgggccactgccctcacctgtctgctccgaggactgccactgcccggggatggggagatcacccctgacctgctacctcggccgccccggttgcttctattggtcaatccctttgggggtcggggcctggcctggcagtggtgtaagaaccacgtgcttcccatgatctctgaagctgggctgtccttcaacctcatccagacagaacgacagaaccacgcccgggagctggtccaggggctgagcctgagtgagtgggatggcatcgtcacggtctcgggagacgggctgctccatgaggtgctgaacgggctcctagatcgccctgactgggaggaagctgtgaagatgcctgtgggcatcctcccctgcggctcgggcaacgcgctggccggagcagtgaaccagcacgggggcccctcctggggtgatagggacccctatatctcccactcagccaaacccacagtcagtcaagtaaatcagcctgcctgtgggatgctcacccccagctcctggacatttttgcctgcctgcttcccagctgtatcccgagcgcccagaactctgcctggcatgggaggcactcaggccttgggcagtgcccgcttcacactgggcacggtgctgggcctcgccacactgcacacctaccgcggacgcctctcctacctccccgccactgtggaacctgcctcgcccacccctgcccatagcctgcctcgtgccaagtcggagctgaccctaaccccagacccagccccgcccatggcccactcacccctgcatcgttctgtgtctgacctgcctcttcccctgccccagcctgccctggcctctcctggctcgccagaacccctgcccatcctgtccctcaacggtgggggcccagagctggctggggactggggtggggctggggatgctccgctgtccccggacccactgctgtcttcacctcctggctctcccaaggcagctctacactcacccgtctccgaaggggcccccgtaattcccccatcctctgggctcccacttcccacccctgatgcccgggtaggggcctccacctgcggcccgcccgaccacctgctgcctccgctgggcaccccgctgcccccagactgggtgacgctggagggggactttgtgctcatgttggccatctcgcccagccacctaggcgctgacctggtggcagctccgcatgcgcgcttcgacgacggcctggtgcacctgtgctgggtgcgtagcggcatctcgcgggctgcgctgctgcgccttttcttggccatggagcgtggtagccacttcagcctgggctgtccgcagctgggctacgccgcggcccgtgccttccgcctagagccgctcacaccacgcggcgtgctcacagtggacggggagcaggtggagtatgggccgctacaggcacagatgcaccctggcatcggtacactgctcactgggcctcctggctgcccggggcgggagccctga

SEQ ID NO: 3989 - DNA, 2881 bp, Homo sapiens
  source 1..2881: mol_type = genomic DNA
cgactgactagccgggcgataacggcagagagcatagagcgcaggaacaagcgcaacgtccaagagggaagggccagcacgtcgggggcctctctggccctacccaggccgtgttctcgatagctttccggaagaaagggatctgggagcgagatgcgtgtagctagcacgatgcgtcgcgcggtgacgctctggcccgacgccgacggcctctcagtggctcccggaggacccggcgggcccagtgttggagagctgaaggtcaggccaggacagtgagacctgactccttgctcctaccagcctactatggcttaagacccagggccagggtcccgttgatgtaacagagcagaggaccagcagatgaatggacaccttgaagcagaggagcagcaggaccagaggccagaccaggagctgaccgggagctggggccacgggcctaggagcaccctggtcagggctaaggccatggccccgcccccaccgccactggctgccagcaccccgctcctccatggcgagtttggctcctacccagcccgaggcccacgctttgccctcacccttacatcgcaggccctgcacatacagcggctgcgccccaaacactcagcggcctacttctgcatctacacctaccctcggggccggcgcggggcccggcgcagagccactcgcaccttccgggcagatggggccgccacctacgaagagaaccgtgccgaggcccagcgctgggccactgccctcacctgtctgctccgaggactgccactgcccggggatggggagatcacccctgacctgctacctcggccgccccggttgcttctattggtcaatccctttgggggtcggggcctggcctggcagtggtgtaagaaccacgtgcttcccatgatctctgaagctgggctgtccttcaacctcatccagacagaacgacagaaccacgcccgggagctggtccaggggctgagcctgagtgagtgggatggcatcgtcacggtctcgggagacgggctgctccatgaggtgctgaacgggctcctagatcgccctgactgggaggaagctgtgaagatgcctgtgggcatcctcccctgcggctcgggcaacgcgctggccggagcagtgaaccagcacgggggatttgagccagccctgggcctcgacctgttgctcaactgctcactgttgctgtgccggggtggtggccacccactggacctgctctccgtgacgctggcctcgggctcccgctgtttctccttcctgtctgtggcctggggcttcgtgtcagatgtggatatccagagcgagcgcttcagggccttgggcagtgcccgcttcacactgggcacggtgctgggcctcgccacactgcacacctaccgcggacgcctctcctacctccccgccactgtggaacctgcctcgcccacccctgcccatagcctgcctcgtgccaagtcggagctgaccctaaccccagacccagccccgcccatggcccactcacccctgcatcgttctgtgtctgacctgcctcttcccctgccccagcctgccctggcctctcctggctcgccagaacccctgcccatcctgtccctcaacggtgggggcccagagctggctggggactggggtggggctggggatgctccgctgtccccggacccactgctgtcttcacctcctggctctcccaaggcagctctacactcacccgtctccgaaggggcccccgtaattcccccatcctctgggctcccacttcccacccctgatgcccgggtaggggcctccacctgcggcccgcccgaccacctgctgcctccgctgggcaccccgctgcccccagactgggtgacgctggagggggactttgtgctcatgttggccatctcgcccagccacctaggcgctgacctggtggcagctccgcatgcgcgcttcgacgacggcctggtgcacctgtgctgggtgcgtagcggcatctcgcgggctgcgctgctgcgccttttcttggccatggagcgtggtagccacttcagcctgggctgtccgcagctgggctacgccgcggcccgtgccttccgcctagagccgctcacaccacgcggcgtgctcacagtggacggggagcaggtggagtatgggccgctacaggcacagatgcaccctggcatcggtacactgctcactgggcctcctggctgcccggggcgggagccctgaaactaaacaagcttggtacccgccgggggcggggcctacattccaatggggcggagcctgagctagggggtgtggcctggctgctagagttgtggtggcaggggccctggccccgtctcaggattgcgctcgctttcatgggaccagacgtgatgctggaaggtgggcgtcgtcacggttaaagagaaatgggctcgtcccgagggtagtgcctgatcaatgagggcggggcctggcgtctgatctggggccgcccttacggggcagggctcagtcctgacgcttgccacctgctcctacccggccaggatggctgagggcggagtctattttacgcgtcgcccaatgacaggacctggaatgtactggctggggtaggcctcagtgagtcggccggtcagggcccgcagcctcgccccatccactccggtgcctccatttagctggccaatcagcccaggaggggcaggttccccggggccggcgctaggatttgcactaatgttcctctccccgcgggtgggggcggggaaattcatatcccctgttcgtctcatgcgcgtcctccgtccccaatctaaaaagcaattgaaaaggtctatgcaataaaggcagtcgcttcattcctctc

SEQ ID NO: 3990 - DNA, 1493 bp, Homo sapiens
  source 1..1493: mol_type = genomic DNA
atgaatggacaccttgaagcagaggagcagcaggaccagagatcacccctgacctgctacctcggccgccccggttgcttctattggtcaatccctttgggggtcggggcctggcctggcagtggtgtaagaaccacgtgcttcccatgatctctgaagctgggctgtccttcaacctcatccagacagaacgacagaaccacgcccgggagctggtccaggggctgagcctgagtgagtgggatggcatcgtcacggtctcgggagacgggctgctccatgaggtgctgaacgggctcctagatcgccctgactgggaggaagctgtgaagatgcctgtgggcatcctcccctgcggctcgggcaacgcgctggccggagcagtgaaccagcacgggggatttgagccagccctgggcctcgacctgttgctcaactgctcactgttgctgtgccggggtggtggccacccactggacctgctctccgtgacgctggcctcgggctcccgctgtttctccttcctgtctgtggcctggggcttcgtgtcagatgtggatatccagagcgagcgcttcagggccttgggcagtgcccgcttcacactgggcacggtgctgggcctcgccacactgcacacctaccgcggacgcctctcctacctccccgccactgtggaacctgcctcgcccacccctgcccatagcctgcctcgtgccaagtcggagctgaccctaaccccagacccagccccgcccatggcccactcacccctgcatcgttctgtgtctgacctgcctcttcccctgccccagcctgccctggcctctcctggctcgccagaacccctgcccatcctgtccctcaacggtgggggcccagagctggctggggactggggtggggctggggatgctccgctgtccccggacccactgctgtcttcacctcctggctctcccaaggcagctctacactcacccgtctccgaaggggcccccgtaattcccccatcctctgggctcccacttcccacccctgatgcccgggtaggggcctccacctgcggcccgcccgaccacctgctgcctccgctgggcaccccgctgcccccagactgggtgacgctggagggggactttgtgctcatgttggccatctcgcccagccacctaggcgctgacctggtggcagctccgcatgcgcgcttcgacgacggcctggtgcacctgtgctgggtgcgtagcggcatctcgcgggctgcgctgctgcgccttttcttggccatggagcgtggtagccacttcagcctgggctgtccgcagctgggctacgccgcggcccgtgccttccgcctagagccgctcacaccacgcggcgtgctcacagtggacggggagcaggtggagtatgggccgctacaggcacagatgcaccctggcatcggtacactgctcactgggcctcctggctgcccggggcgggagccctga

SEQ ID NO: 3991 - DNA, 3092 bp, Homo sapiens
  source 1..3092: mol_type = genomic DNA
aggtgagcgaaaggaggaggcagaatccgggcagagggcagggagagggcctgtggggaagggacctcagtcctgctcccacccgctccctggagagcaggcggccagacacccaggtcagtgctcagggaccagctcttggcccctgccccttgcaggcgctcgcatgtggctcctctcggaccccgtagtccctgtcatatcccttctctccagctgtctccatgcctgcctcgtacccctcctatttgctctcccttccactctgtcttgcctttctcgttggggtgaaaaagtcttactctcttaagtatctttcatcgcctgagtttcacctcattgaccctgtttgtctcctctcagtgtttctctggctctcagaccctatctctattgcgtttgtgattgttttgctgttttacccactgcaccgtatggggggtgggggtgtcggggaggtgtgtctttcagtctttgcatgtctgtttctgcatatccaatcccactatccattccccttcctgtgccttcttttcccccaaagcccgttatcatcacccaaccacctgtatatttcaatcctttctcttgtttatctattcctatgaaggcaaggatttggggctattttgtctcctgctgtgtttgctaggcctagcaccgtgattggcacataaagggtactgaatacttactggggaataaatgattggatgtttgcatgcccgggtctccggccccctctgggatgctggcctctgtcccgcatcctcaaggtctgcccacacctgtctgagcctgtctgtctctgatgctcctgtctcacctgccactgcccctcattgtctcctcctgtccacagcccctgcccctccctgcccctgccatggggtcctgaattctcaccccttctctcctcccttcccacagaggccagaccaggagctgaccgggagctggggccacgggcctaggagcaccctggtcagggctaaggccatggccccgcccccaccgccactggctgccagcaccccgctcctccatggcgagtttggctcctacccagcccgaggcccacgctttgccctcacccttacatcgcaggccctgcacatacagcggctgcgccccaaacctgaagccaggccccggggtggcctggtcccgttggccgaggtctcaggctgctgcaccctgcgaagccgcagcccctcagactcagcggcctacttctgcatctacacctaccctcggggccggcgcggggcccggcgcagagccactcgcaccttccgggcagatggggccgccacctacgaagagaaccgtgccgaggcccagcgctgggccactgccctcacctgtctgctccgaggactgccactgcccggggatggggagatcacccctgacctgctacctcggccgccccggttgcttctattggtcaatccctttgggggtcggggcctggcctggcagtggtgtaagaaccacgtgcttcccatgatctctgaagctgggctgtccttcaacctcatccagacagaacgacagaaccacgcccgggagctggtccaggggctgagcctgagtgagtgggatggcatcgtcacggtctcgggagacgggctgctccatgaggtgctgaacgggctcctagatcgccctgactgggaggaagctgtgaagatgcctgtgggcatcctcccctgcggctcgggcaacgcgctggccggagcagtgaaccagcacgggggatttgagccagccctgggcctcgacctgttgctcaactgctcactgttgctgtgccggggtggtggccacccactggacctgctctccgtgacgctggcctcgggctcccgctgtttctccttcctgtctgtggcctggggcttcgtgtcagatgtggatatccagagcgagcgcttcagggccttgggcagtgcccgcttcacactgggcacggtgctgggcctcgccacactgcacacctaccgcggacgcctctcctacctccccgccactgtggaacctgcctcgcccacccctgcccatagcctgcctcgtgccaagtcggagctgaccctaaccccagacccagccccgcccatggcccactcacccctgcatcgttctgtgtctgacctgcctcttcccctgccccagcctgccctggcctctcctggctcgccagaacccctgcccatcctgtccctcaacggtgggggcccagagctggctggggactggggtggggctggggatgctccgctgtccccggacccactgctgtcttcacctcctggctctcccaaggcagctctacactcacccgtctccgaaggggcccccgtaattcccccatcctctgggctcccacttcccacccctgatgcccgggtaggggcctccacctgcggcccgcccgaccacctgctgcctccgctgggcaccccgctgcccccagactgggtgacgctggagggggactttgtgctcatgttggccatctcgcccagccacctaggcgctgacctggtggcagctccgcatgcgcgcttcgacgacggcctggtgcacctgtgctgggtgcgtagcggcatctcgcgggctgcgctgctgcgccttttcttggccatggagcgtggtagccacttcagcctgggctgtccgcagctgggctacgccgcggcccgtgccttccgcctagagccgctcacaccacgcggcgtgctcacagtggacggggagcaggtggagtatgggccgctacaggcacagatgcaccctggcatcgcccgcgggaggactcagactccagcacttccagcagcgcctgccctctatggacgacagcccggagctgcccacgggctgcagccagtatgccagggagctgccctcttcttccacaacagctggctctggggttctcaagatttattcaggatcgtgttaacggaggcggtgggaggatagggtccctgacgtgccggggacacacacagagaaccctccccgcccccgcaagggaggggggaggctcgctttttcttaaaaatataaatgtatttatctgc

SEQ ID NO: 3992 - DNA, 2866 bp, Homo sapiens
  source 1..2866: mol_type = genomic DNA
agtgttggaggtgaggaggcggggctggcagggctagtcggggcatctggaaatttccgaccccacgcttcgggcgtttccttatcaggttcaccgctccctgatctcgcgctgcacttcgtaggcgcagccgctgcttgggaagtcctacttaagagctgaaggtcaggccaggacagtgagacctgactccttgctcctaccagcctactatggcttaagacccagggccagggtcccgttgatgtaacagagcagaggaccagcagatgaatggacaccttgaagcagaggagcagcaggaccagaggccagaccaggagctgaccgggagctggggccacgggcctaggagcaccctggtcagggctaaggccatggccccgcccccaccgccactggctgccagcaccccgctcctccatggcgagtttggctcctacccagcccgaggcccacgctttgccctcacccttacatcgcaggccctgcacatacagcggctgcgccccaaacctgaagccaggccccggggtggcctggtcccgttggccgaggtctcaggctgctgcaccctgcgaagccgcagcccctcagactcagcggcctacttctgcatctacacctaccctcggggccggcgcggggcccggcgcagagccactcgcaccttccgggcagatggggccgccacctacgaagagaaccgtgccgaggcccagcgctgggccactgccctcacctgtctgctccgaggactgccactgcccggggatggggagatcacccctgacctgctacctcggccgccccggttgcttctattggtcaatccctttgggggtcggggcctggcctggcagtggtgtaagaaccacgtgcttcccatgatctctgaagctgggctgtccttcaacctcatccagacagaacgacagaaccacgcccgggagctggtccaggggctgagcctgagtgagtgggatggcatcgtcacggtctcgggagacgggctgctccatgaggtgctgaacgggctcctagatcgccctgactgggaggaagctgtgaagatgcctgtgggcatcctcccctgcggctcgggcaacgcgctggccggagcagtgaaccagcacgggggatttgagccagccctgggcctcgacctgttgctcaactgctcactgttgctgtgccggggtggtggccacccactggacctgctctccgtgacgctggcctcgggctcccgctgtttctccttcctgtctgtggcctggggcttcgtgtcagatgtggatatccagagcgagcgcttcagggccttgggcagtgcccgcttcacactgggcacggtgctgggcctcgccacactgcacacctaccgcggacgcctctcctacctccccgccactgtggaacctgcctcgcccacccctgcccatagcctgcctcgtgccaagtcggagctgaccctaaccccagacccagccccgcccatggcccactcacccctgcatcgttctgtgtctgacctgcctcttcccctgccccagcctgccctggcctctcctggctcgccagaacccctgcccatcctgtccctcaacggtgggggcccagagctggctggggactggggtggggctggggatgctccgctgtccccggacccactgctgtcttcacctcctggctctcccaaggcagctctacactcacccgtctccgaaggggcccccgtaattcccccatcctctgggctcccacttcccacccctgatgcccgggtaggggcctccacctgcggcccgcccgaccacctgctgcctccgctgggcaccccgctgcccccagactgggtgacgctggagggggactttgtgctcatgttggccatctcgcccagccacctaggcgctgacctggtggcagctccgcatgcgcgcttcgacgacggcctggtgcacctgtgctgggtgcgtagcggcatctcgcgggctgcgctgctgcgccttttcttggccatggagcgtggtagccacttcagcctgggctgtccgcagctgggctacgccgcggcccgtgccttccgcctagagccgctcacaccacgcggcgtgctcacagtggacggggagcaggtggagtatgggccgctacaggcacagatgcaccctggcatcggtacactgctcactgggcctcctggctgcccggggcgggagccctgaaactaaacaagcttggtacccgccgggggcggggcctacattccaatggggcggagcctgagctagggggtgtggcctggctgctagagttgtggtggcaggggccctggccccgtctcaggattgcgctcgctttcatgggaccagacgtgatgctggaaggtgggcgtcgtcacggttaaagagaaatgggctcgtcccgagggtagtgcctgatcaatgagggcggggcctggcgtctgatctggggccgcccttacggggcagggctcagtcctgacgcttgccacctgctcctacccggccaggatggctgagggcggagtctattttacgcgtcgcccaatgacaggacctggaatgtactggctggggtaggcctcagtgagtcggccggtcagggcccgcagcctcgccccatccactccggtgcctccatttagctggccaatcagcccaggaggggcaggttccccggggccggcgctaggatttgcactaatgttcctctccccgcgggtgggggcggggaaattcatatcccctgttcgtctcatgcgcgtcctccgtccccaatctaaaaagcaattgaaaaggtctatgcaataaaggcagtcgcttcattcctctca

SEQ ID NO: 3993 - DNA, 2683 bp, Homo sapiens
  source 1..2683: mol_type = genomic DNA
ggggaacaaaggtgagcgaaaggaggaggcagaatccgggcagagggcagggagagggcctgtggggaagggacctcagtcctgctcccacccgctccctggagagcaggcggccagacacccagaggccagaccaggagctgaccgggagctggggccacgggcctaggagcaccctggtcagggctaaggccatggccccgcccccaccgccactggctgccagcaccccgctcctccatggcgagtttggctcctacccagcccgaggcccacgctttgccctcacccttacatcgcaggccctgcacatacagcggctgcgccccaaacctgaagccaggccccggggtggcctggtcccgttggccgaggtctcaggctgctgcaccctgcgaagccgcagcccctcagactcagcggcctacttctgcatctacacctaccctcggggccggcgcggggcccggcgcagagccactcgcaccttccgggcagatggggccgccacctacgaagagaaccgtgccgaggcccagcgctgggccactgccctcacctgtctgctccgaggactgccactgcccggggatggggagatcacccctgacctgctacctcggccgccccggttgcttctattggtcaatccctttgggggtcggggcctggcctggcagtggtgtaagaaccacgtgcttcccatgatctctgaagctgggctgtccttcaacctcatccagacagaacgacagaaccacgcccgggagctggtccaggggctgagcctgagtgagtgggatggcatcgtcacggtctcgggagacgggctgctccatgaggtgctgaacgggctcctagatcgccctgactgggaggaagctgtgaagatgcctgtgggcatcctcccctgcggctcgggcaacgcgctggccggagcagtgaaccagcacgggggatttgagccagccctgggcctcgacctgttgctcaactgctcactgttgctgtgccggggtggtggccacccactggacctgctctccgtgacgctggcctcgggctcccgctgtttctccttcctgtctgtggcctggggcttcgtgtcagatgtggatatccagagcgagcgcttcagggccttgggcagtgcccgcttcacactgggcacggtgctgggcctcgccacactgcacacctaccgcggacgcctctcctacctccccgccactgtggaacctgcctcgcccacccctgcccatagcctgcctcgtgccaagtcggagctgaccctaaccccagacccagccccgcccatggcccactcacccctgcatcgttctgtgtctgacctgcctcttcccctgccccagcctgccctggcctctcctggctcgccagaacccctgcccatcctgtccctcaacggtgggggcccagagctggctggggactggggtggggctggggatgctccgctgtccccggacccactgctgtcttcacctcctggctctcccaaggcagctctacactcacccgtctccgaaggggcccccgtaattcccccatcctctgggctcccacttcccacccctgatgcccgggtaggggcctccacctgcggcccgcccgaccacctgctgcctccgctgggcaccccgctgcccccagactgggtgacgctggagggggactttgtgctcatgttggccatctcgcccagccacctaggcgctgacctggtggcagctccgcatgcgcgcttcgacgacggcctggtgcacctgtgctgggtgcgtagcggcatctcgcgggctgcgctgctgcgccttttcttggccatggagcgtggtagccacttcagcctgggctgtccgcagctgggctacgccgcggcccgtgccttccgcctagagccgctcacaccacgcggcgtgctcacagtggacggggagcaggtggagtatgggccgctacaggcacagatgcaccctggcatcggtacactgctcactgggcctcctggctgcccggggcgggagccctgaaactaaacaagcttggtacccgccgggggcggggcctacattccaatggggcggagcctgagctagggggtgtggcctggctgctagagttgtggtggcaggggccctggccccgtctcaggattgcgctcgctttcatgggaccagacgtgatgctggaaggtgggcgtcgtcacggttaaagagaaatgggctcgtcccgagggtagtgcctgatcaatgagggcggggcctggcgtctgatctggggccgcccttacggggcagggctcagtcctgacgcttgccacctgctcctacccggccaggatggctgagggcggagtctattttacgcgtcgcccaatgacaggacctggaatgtactggctggggtaggcctcagtgagtcggccggtcagggcccgcagcctcgccccatccactccggtgcctccatttagctggccaatcagcccaggaggggcaggttccccggggccggcgctaggatttgcactaatgttcctctccccgcgggtgggggcggggaaattcatatcccctgttcgtctcatgcgcgtcctccgtccccaatctaaaaagcaattgaaaaggtctatgcaataaaggcagtcgcttcattcctctca

SEQ ID NO: 3994 - DNA, 2909 bp, Homo sapiens
  source 1..2909: mol_type = genomic DNA
ggcgcggcgctgggtgacttcgcgtagcaggcagggaactggccgcggcgagcgggactggccattggagtgctccgctgcggagggaggggaccccgactcgagtaagtttgcgagagcactacgcagtcagtcgggggcagcagcaagatgcgaagcgagccgtacagatcccgggctctccgaacgcaacttcgccctgcttgagcgaggctgcggtttccgaggccctctccagccaaggaaaagctacacaaaaagcctggatcactcatcgaaccacccctgaagccagtgaaggctctctcgcctcgccctctagcgttcgtctggagtagcgccaccccggcttcctggggacacagggttggcaccatggggcccaccagcgtcccgctggtcaaggcccaccgcagctcggtctctgactacgtcaactatgatatcatcgtccggcattacaactacacgggaaagctgaatatcagcgcggacaaggagaacagcattaaactgacctcggtggtgttcattctcatctgctgctttatcatcctggagaacatctttgtcttgctgaccatttggaaaaccaagaaattccaccgacccatgtactattttattggcaatctggccctctcagacctgttggcaggagtagcctacacagctaacctgctcttgtctggggccaccacctacaagctcactcccgcccagtggtttctgcgggaagggagtatgtttgtggccctgtcagcctccgtgttcagtctcctcgccatcgccattgagcgctatatcacaatgctgaaaatgaaactccacaacgggagcaataacttccgcctcttcctgctaatcagcgcctgctgggtcatctccctcatcctgggtggcctgcctatcatgggctggaactgcatcagtgcgctgtccagctgctccaccgtgctgccgctctaccacaagcactatatcctcttctgcaccacggtcttcactctgcttctgctctccatcgtcattctgtactgcagaatctactccttggtcaggactcggagccgccgcctgacgttccgcaagaacatttccaaggccagccgcagctctgagaagtcgctggcgctgctcaagaccgtaattatcgtcctgagcgtcttcatcgcctgctgggcaccgctcttcatcctgctcctgctggatgtgggctgcaaggtgaagacctgtgacatcctcttcagagcggagtacttcctggtgttagctgtgctcaactccggcaccaaccccatcatttacactctgaccaacaaggagatgcgtcgggccttcatccggatcatgtcctgctgcaagtgcccgagcggagactctgctggcaaattcaagcgacccatcatcgccggcatggaattcagccgcagcaaatcggacaattcctcccacccccagaaagacgaaggggacaacccagagaccattatgtcttctggaaacgtcaactcttcttcctagaactggaagctgtccacccaccggaagcgctctttacttggtcgctggccaccccagtgtttggaaaaaaatctctgggcttcgactgctgccagggaggagctgctgcaagccagagggaggaagggggagaatacgaacagcctggtggtgtcgggtgttggtgggtagagttagttcctgtgaacaatgcactgggaagggtggagatcaggtcccggcctggaatatattttctacccccctggagctttgattttgcactgagccaaaggtctagcattgtcaagctcctaaagggttcatttggcccctcctcaaagactaatgtccccatgtgaaagcgtctctttgtctggagctttgaggagatgttttccttcactttagtttcaaacccaagtgagtgtgtgcacttctgcttctttagggatgccctgtacatcccacaccccaccctcccttcccttcatacccctcctcaacgttcttttactttatactttaactacctgagagttatcagagctggggttgtggaatgatcgatcatctatagcaaataggctatgttgagtacgtaggctgtgggaagatgaagatggtttggaggtgtaaaacaatgtccttcgctgaggccaaagtttccatgtaagcgggatccgttttttggaatttggttgaagtcactttgatttctttaaaaaacatcttttcaatgaaatgtgttaccatttcatatccattgaagccgaaatctgcataaggaagcccactttatctaaatgatattagccaggatccttggtgtcctaggagaaacagacaagcaaaacaaagtgaaaaccgaatggattaacttttgcaaaccaagggagatttcttagcaaatgagtctaacaaatatgacatctgtctttggcacttttgttgatgtttatttcagaatgttgtgtgattcatttcaagcaacaacatggttgtattttgttgtgttaaaagtacttttcttgatttttgaatgtatttgtttcagcagaagtcattttattggatttttctaacccgtgttaacaccattgaatgtgtatttcttaagaaaataccaccctcttgtgcccttaaaagcattactttaactggtagggaacgccagaaacttttcagtccagctattcattagatagtaattgaagatatgtataaatattacaaagaataaaaatatattactgtctctttagtatggttttcagtgcaattaaaccgagagatgtcttgtttttttaaaaagaatagtatttaataggtttctgacttttgtggatcattttgcacatagctttatcaacttttaaacattaataaactgatttttttaaaga

SEQ ID NO: 3995 - DNA, 2165 bp, Homo sapiens
  source 1..2165: mol_type = genomic DNA
gacttcgcgtagcaggcagggaactggccgcggcgagcgggactggccattggagtgctccgctgcggagggaggggaccccgactcgagctgcggtttccgaggccctctccagccaaggaaaagctacacaaaaagcctggatcactcatcgaaccacccctgaagccagtgaaggctctctcgcctcgccctctagcgttcgtctggagtagcgccaccccggcttcctggggacacagggttggcaccatggggcccaccagcgtcccgctggtcaaggcccaccgcagctcggtctctgactacgtcaactatgatatcatcgtccggcattacaactacacgggaaagctgaatatcagcgcggacaaggagaacagcattaaactgacctcggtggtgttcattctcatctgctgctttatcatcctggagaacatctttgtcttgctgaccatttggaaaaccaagaaattccaccgacccatgtactattttattggcaatctggccctctcagacctgttggcaggagtagcctacacagctaacctgctcttgtctggggccaccacctacaagctcactcccgcccagtggtttctgcgggaagggagtatgtttgtggccctgtcagcctccgtgttcagtctcctcgccatcgccattgagcgctatatcacaatgctgaaaatgaaactccacaacgggagcaataacttccgcctcttcctgctaatcagcgcctgctgggtcatctccctcatcctgggtggcctgcctatcatgggctggaactgcatcagtgcgctgtccagctgctccaccgtgctgccgctctaccacaagcactatatcctcttctgcaccacggtcttcactctgcttctgctctccatcgtcattctgtactgcagaatctactccttggtcaggactcggagccgccgcctgacgttccgcaagaacatttccaaggccagccgcagctctgagaagtcgctggcgctgctcaagaccgtaattatcgtcctgagcgtcttcatcgcctgctgggcaccgctcttcatcctgctcctgctggatgtgggctgcaaggtgaagacctgtgacatcctcttcagagcggagtacttcctggtgttagctgtgctcaactccggcaccaaccccatcatttacactctgaccaacaaggagactctgctggcaaattcaagcgacccatcatcgccggcatggaattcagccgcagcaaatcggacaattcctcccacccccagaaagacgaaggggacaacccagagaccattatgtcttctggaaacgtcaactcttcttcctagaactggaagctgtccacccaccggaagcgctctttacttggtcgctggccaccccagtgtttggaaaaaaatctctgggcttcgactgctgccagggaggagctgctgcaagccagagggaggaagggggagaatacgaacagcctggtggtgtcgggtgttggtgggtagagttagttcctgtgaacaatgcactgggaagggtggagatcaggtcccggcctggaatatattttctacccccctggagctttgattttgcactgagccaaaggtctagcattgtcaagctcctaaagggttcatttggcccctcctcaaagactaatgtccccatgtgaaagcgtctctttgtctggagctttgaggagatgttttccttcactttagtttcaaacccaagtgagtgtgtgcacttctgcttctttagggatgccctgtacatcccacaccccaccctcccttcccttcatacccctcctcaacgttcttttactttatactttaactacctgagagttatcagagctggggttgtggaatgatcgatcatctatagcaaataggctatgttgagtacgtaggctgtgggaagatgaagatggtttggaggtgtaaaacaatgtccttcgctgaggccaaagtttccatgtaagcgggatccgttttttggaatttggttgaagtcactttgatttctttaaaaaacatcttttcaatgaaatgtgttaccatttcatatccattgaagccgaaatctgcataaggaagcccactttatctaaatgatattagccaggatccttggtgtcctag

SEQ ID NO: 3996 - DNA, 1168 bp, Homo sapiens
  source 1..1168: mol_type = genomic DNA
ccgaggcaggggatctgaccgactcggagcccggctggatgttacaggcgtgcaaaatggaagggtttcccctcgtcccccctcagccatcagaagacctggtgccctatgacacggatctataccaacgccaaacgcacgagtattacccctatctcagcagtgatggggagagccatagcgaccattactgggacttccacccccaccacgtgcacagcgagttcgagagcttcgccgagaacaacttcacggagctccagagcgtgcagcccccgcagctgcagcagctctaccgccacatggagctggagcagatgcacgtcctcgatacccccatggtgccaccccatcccagtcttggccaccaggtctcctacctgccccggatgtgcctccagtacccatccctgtccccagcccagcccagctcagatgaggaggagggcgagcggcagagccccccactggaggtgtctgacggcgaggcggatggcctggagcccgggcctgggctcctgcctggggagacaggcagcaagaagaagatccgcctgtaccagttcctgttggacctgctccgcagcggcgacatgaaggacagcatctggtgggtggacaaggacaagggcaccttccagttctcgtccaagcacaaggaggcgctggcgcaccgctggggcatccagaagggcaaccgcaagaagatgacctaccagaagatggcgcgcgcgctgcgcaactacggcaagacgggcgaggtcaagaaggtgaagaagaagctcacctaccagttcagcggcgaagtgctgggccgcgggggcctggccgagcggcgccacccgccccactgagcccgcagcccccgccgggccccgccaggcctccccgctggccatagcattaagccctcgcccggcccggacacagggaggacgctcccggggcccagaggcaggactgtggcgggccgggcctcgcctcacccgccccctccccccactccaggccccctccacatcccgcttcgcctccctccaggactccaccccggctcccggacgccagctgggcgtcagaccccaccggggcaaccttgcagaggacgacccggggtactgccttgggagtctcaagtccgtatgtaaatcagatctcccctctcacc

SEQ ID NO: 3997 - DNA, 1403 bp, Homo sapiens
  source 1..1403: mol_type = genomic DNA
gactatctcccagcggcaggcccttcgataaaatcaggaacttgtgctggccctgcaatgtcaagggagggggctcacccagggctcctgtagctcagggggcaggcctgagccctgcacccgccccacgaccgtccagcccctgacggggcaccccatcctgaggggctctgcattggcccccaccgaggcaggggatctgaccgactcggagcccggctggatgttacaggcgtgcaaaatggaagggtttcccctcgtcccccctccatcagaagacctggtgccctatgacacggatctataccaacgccaaacgcacgagtattacccctatctcagcagtgatggggagagccatagcgaccattactgggacttccacccccaccacgtgcacagcgagttcgagagcttcgccgagaacaacttcacggagctccagagcgtgcagcccccgcagctgcagcagctctaccgccacatggagctggagcagatgcacgtcctcgatacccccatggtgccaccccatcccagtcttggccaccaggtctcctacctgccccggatgtgcctccagtacccatccctgtccccagcccagcccagctcagatgaggaggagggcgagcggcagagccccccactggaggtgtctgacggcgaggcggatggcctggagcccgggcctgggctcctgcctggggagacaggcagcaagaagaagatccgcctgtaccagttcctgttggacctgctccgcagcggcgacatgaaggacagcatctggtgggtggacaaggacaagggcaccttccagttctcgtccaagcacaaggaggcgctggcgcaccgctggggcatccagaagggcaaccgcaagaagatgacctaccagaagatggcgcgcgcgctgcgcaactacggcaagacgggcgaggtcaagaaggtgaagaagaagctcacctaccagttcagcggcgaagtgctgggccgcgggggcctggccgagcggcgccacccgccccactgagcccgcagcccccgccgggccccgccaggcctccccgctggccatagcattaagccctcgcccggcccggacacagggaggacgctcccggggcccagaggcaggactgtggcgggccgggcctcgcctcacccgccccctccccccactccaggccccctccacatcccgcttcgcctccctccaggactccaccccggctcccggacgccagctgggcgtcagaccccaccggggcaaccttgcagaggacgacccggggtactgccttgggagtctcaagtccgtatgtaaatcagatctcccctctcacccctcccacccattaacctcctcccaaaaaacaagtaaagttattctcaatcca

SEQ ID NO: 3998 - DNA, 3293 bp, Homo sapiens
  source 1..3293: mol_type = genomic DNA
aacacgacagcggctgccgagcgacccggaagtattcccattttgcgttgtctgggctcggcggcagccgggctcggagtggacgtgccactatggggtcgtccaagaagcatcgcggagagaaggaggcggccgggacgacggcggcggccggcaccgggggtgccaccgagcagccgccgcggcaccgggaacacaaaaaacacaagcaccggagtggcggcagtggcggtagcggtggcgaacgacggaagcggagccgggaacgtgggggcgagcgcgggagcgggcggcgcggggccgaagctgaggcccggagcagcacgcacgggcgggagcgcagccaggcagagccctccgagcggcgcgtgaagcgggagaagcgcgatgacggctacgaggccgctgccagctccaaaactagctcaggcgatgcctcctcactcagcatcgaggagactaacaaactccgggcaaagttggggctgaaacccttggaggttaatgccatcaagaaggaggcgggcaccaaggaggagcccgtgacagctgatgtcatcaaccctatggccttgcgacagcgagaggagctgcgggagaagctggcggctgccaaggagaagcgcctgctgaaccaaaagctggggaagataaagaccctaggagaggatgacccctggctggacgacactgcagcctggatcgagaggagccggcagctgcagaaggagaaggacctggcagagaagagggccaagttactggaggagatggaccaagagtttggtgtcagcactctggtggaggaggagttcgggcagaggcggcaggacctgtacagtgcccgggacctgcagggcctcaccgtggagcatgccattgattccttccgagaaggggagacaatgattcttaccctcaaggacaaaggcgtgctgcaggaggaggaggacgtgctggtgaacgtgaacctggtggataaggagcgggcagagaaaaatgtggagctgcggaagaagaagcctgactacctgccctatgccgaggacgagagcgtggacgacctggcgcagcaaaaacctcgctctatcctgtccaagtatgacgaagagcttgaaggggagcggccacattccttccgcttggagcagggcggcacggctgatggcctgcgggagcgggagctggaggagatccgggccaagctgcggctgcaggctcagtccctgagcacagtggggccccggctggcctccgaatacctcacgcctgaggagatggtgacctttaaaaagaccaagcggagggtgaagaaaatccgcaagaaggagaaggaggtagtagtgcgggcagatgacttgctgcctctcggggaccagactcaggatggggactttggttccagactgcggggacggggtcgccgccgagtgtccgaagtggaggaggagaaggagcctgtgcctcagcccctgccgtcggacgacacccgagtggagaacatggacatcagtgatgaggaggaaggtggagctccaccgccggggtccccgcaggtgctggaggaggacgaggcggagctggagctgcagaagcagctggagaagggacgccggctgcgacagttacagcagctacagcagctgcgagacagtggcgagaaggtggtggagattgtgaagaagctggagtctcgccagcggggctgggaggaggatgaggatcccgagcggaagggggccatcgtgttcaacgccacgtccgagttctgccgcaccttgggggagatccccacctacgggctggctggcaatcgcgaggagcaggaggagctcatggactttgaacgggatgaggagcgctcagccaacggtggctccgaatctgacggggaggagaacatcggctggagcacggtgaacctggacgaggagaagcagcagcaggatttctctgcttcctccaccaccatcctggacgaggaaccgatcgtgaatagggggctggcagctgccctgctcctgtgtcagaacaaagggctgctggagaccacagtgcagaaggtggcccgggtgaaggcccccaacaagtcgctgccctcagccgtgtactgcatcgaggataagatggccatcgatgacaagtacagccggagggaggaataccgaggcttcacacaggacttcaaggagaaggacggctacaaacccgacgttaagatcgaatacgtggatgagacgggccggaaactcacacccaaggaggctttccggcagctgtcgcaccgcttccatggcaagggctcaggcaagatgaagacagagcggcggatgaagaagctggacgaggaggcgctcctgaagaagatgagctccagcgacacgcccctgggcaccgtggccctgctccaggagaagcagaaggctcagaagaccccctacatcgtgctcagcggcagcggcaagagcatgaacgcgaacaccatcaccaagtgacagcgccctcccgccccggccctgcctcaaccttcatattaaataaagctccctccttattttttcctccctggtcgtggtacagattccagggttggatctttggttgggtgtggcacagagtctggctcctgctaggtgagacctggccatcaaatgacacaaacaactaaacgatggaagagagagcgagcccgggtcctctaaggctccttccttctcccctggctgtcggtcacacctctgcagggccggctctctgatagaaagtggaaggcggttttagaaactcatcaccctgctctctcctggcctcgggggctgcacaggtcactgtcctgtaatgtctcccggtcagggcagcccaggactgcccagcctggtgggctggggattgggctttgggtagggcacaggtgccaccttctgtcctggctgtcctgtgccaccctggtctgtgtctagaggagtgaaactcccagggttgggctgggagtatttggtgcacgcggtatggggagggctgagctcagtgcctcctgggagacttgtcccgtgtacagtgacccagaaagatgagattccttggcctgaactctgtgatagagtgtgactgagctgctgggggacatgtgagcctcaaatccatagaaagacaaacggccaccttgggtgcccaggatactggtgcctggccccacgtacacccacatacttctcagatggctcccacattttaagattttaaaaatgaaaccaaaaaataaattgaagaaaactgtaaactttaaagaataa

SEQ ID NO: 3999 - DNA, 2420 bp, Homo sapiens
  source 1..2420: mol_type = genomic DNA
attttgcgttgtctgggctcggcggcagccgggctcggagtggacgtgccactatggggtcgtccaagaagcatcgcggagagaaggaggcggccgggacgacggcggcggccggcaccgggggtgccaccgagcagccgccgcggcaccgggaacacaaaaaacacaagcaccggagtggcggcagtggcggtagcggtggcgaacgacggaagcggagccctccgagcggcgcgtgaagcgggagaagcgcgatgacggctacgaggccgctgccagctccaaaactagctcaggcgatgcctcctcactcagcatcgaggagactaacaaactccgggcaaagttggggctgaaacccttggaggttaatgccatcaagaaggaggcgggcaccaaggaggagcccgtgacagctgatgtcatcaaccctatggccttgcgacagcgagaggagctgcgggagaagctggcggctgccaaggagaagcgcctgctgaaccaaaagctggggaagataaagaccctaggagaggatgacccctggctggacgacactgcagcctggatcgagaggagccggcagctgcagaaggagaaggacctggcagagaagagggccaagttactggaggagatggaccaagagtttggtgtcagcactctggtggaggaggagttcgggcagaggcggcaggacctgtacagtgcccgggacctgcagggcctcaccgtggagcatgccattgattccttccgagaaggggagacaatgattcttaccctcaaggacaaaggcgtgctgcaggaggaggaggacgtgctggtgaacgtgaacctggtggataaggagcgggcagagaaaaatgtggagctgcggaagaagaagcctgactacctgccctatgccgaggacgagagcgtggacgacctggcgcagcaaaaacctcgctctatcctgtccaagtatgacgaagagcttgaaggggagcggccacattccttccgcttggagcagggcggcacggctgatggcctgcgggagcgggagctggaggagatccgggccaagctgcggctgcaggctcagtccctgagcacagtggggccccggctggcctccgaatacctcacgcctgaggagatggtgacctttaaaaagaccaagcggagggtgaagaaaatccgcaagaaggagaaggaggtagtagtgcgggcagatgacttgctgcctctcggggaccagactcaggatggggactttggttccagactgcggggacggggtcgccgccgagtgtccgaagtggaggaggagaaggagcctgtgcctcagcccctgccgtcggacgacacccgagtggagaacatggacatcagtgatgaggaggaaggtggagctccaccgccggggtccccgcaggtgctggaggaggacgaggcggagctggagctgcagaagcagctggagaagggacgccggctgcgacagttacagcagctacagcagctgcgagacagtggcgagaaggtggtggagattgtgaagaagctggagtctcgccagcggggctgggaggaggatgaggatcccgagcggaagggggccatcgtgttcaacgccacgtccgagttctgccgcaccttgggggagatccccacctacgggctggctggcaatcgcgaggagcaggaggagctcatggactttgaacgggatgaggagcgctcagccaacggtggctccgaatctgacggggaggagaacatcggctggagcacggtgaacctggacgaggagaagcagcagcaggatttctctgcttcctccaccaccatcctggacgaggaaccgatcgtgaatagggggctggcagctgccctgctcctgtgtcagaacaaagggctgctggagaccacagtgcagaaggtggcccgggtgaaggcccccaacaagtcgctgccctcagccgtgtactgcatcgaggataagatggccatcgatgacaagtacagccggagggaggaataccgaggcttcacacaggacttcaaggagaaggacggctacaaacccgacgttaagatcgaatacgtggatgagacgggccggaaactcacacccaaggaggctttccggcagctgtcgcaccgcttccatggcaagggctcaggcaagatgaagacagagcggcggatgaagaagctggacgaggaggcgctcctgaagaagatgagctccagcgacacgcccctgggcaccgtggccctgctccaggagaagcagaaggctcagaagaccccctacatcgtgctcagcggcagcggcaagagcatgaacgcgaacaccatcaccaagtgacagcgccctcccgccccggccctgcctcaaccttcatattaaataaagctccctcctt

SEQ ID NO: 4000 - DNA, 5265 bp, Homo sapiens
  source 1..5265: mol_type = genomic DNA
tggcttaagccgcgcggagcagcgcaacctgggtcgctccctgcttcgccgccgcctccggaccgagccagcggagtcagtgtcctagagaccctgtaacaccacaaagcggacgaaggagtccatgttggggaacttggcagcggagtgactgggacctgggaacctactgtggggccgcggccggaccgagcgcctcgacctcggtctgaggaaacccttttccaaagagaaatgaagaagaaaactgtatgtaccctaaatatgggagataagaagtatgaagacatggaaggtgaagaaaacggagataatactatttccactggtctgttgtacagtgaggctgacagatgcccaatatgtcttaattgtctattagaaaaggaagttggttttccagaaagctgtaatcatgtcttctgtatgacttgtattcttaaatgggcagagacactggcttcatgtcctattgaccgtaaaccttttcaggcagtgtttaaattcagtgcattggaaggttatgttaaggttcaagtaaaaaaacagctgagagaaacaaaagacaagaaaaatgaaaactcatttgagaaacaggtctcctgtcatgaaaattctaaaagctgtataagaagaaaagccatcgtaagagaagatctattaagtgcaaaagtttgtgacttgaagtggatacatagaaactctttatacagtgaaacaggaggaaagaaaaatgcagcaataaagataaataagcctcagagatcaaattggagtacaaatcagtgcttcagaaattttttctccaatatgttttcttctgttagccactctggagaatcttcctttacctatagagcttattgtacagaatttatagaagccagtgaaatcagtgcattgattaggcagaagagacatgaactggaattgtcatggtttcctgatacattacctggaattggaagaattggttttataccctggaatgttgaaacagaagtccttcctctcatttcttctgtgttgccaagaactatttttccaacaagtaccatatctttcgaacattttggtacttcttgcaagggatatgcattagcacatactcaagaaggggaagaaaagaagcaaacttctggtacatcaaataccagaggatcaagacgaaaacctgcaatgacaactcctacaaggaggtctacacgtaacacaagagctgaaacagccagtcagtctcagagatccccaatatcagacaattctgggtgtgatgccccaggtaacagtaatccatctttaagtgttccctcttcagctgagtcagaaaagcaaacaagacaggctccaaaacggaagtctgtaagaagaggaagaaaaccacctttactgaaaaagaaacttcggagctctgtagctgcccctgaaaaatcatcttccaatgattcagtagatgaagaaacagcagaatctgacacatcacctgtgttagaaaaagagcaccaaccagatgtagacagtagtaacatttgtactgtgcagactcatgtagaaaaccagtctgctaattgcttgaaaagttgcaatgagcaaatagaagaaagtgagaagcatactgcaaattatgatacagaggaaagagtaggatcttcatcttctgagtcttgtgctcaagatcttcctgtgctagttggtgaggaaggggaagttaaaaaactcgagaatacaggtatagaggctaatgttttgtgtttggaaagtgagatttctgaaaatattcttgaaaaaggaggtgatccattggaaaagcaagaccagatatctggactttcacaatcagaggtaaagacagatgtatgtacagttcatcttccaaatgattttcctacatgtttaacatctgaaagcaaagtgtaccaacctgtatcttgtcccctaagtgacttatctgagaatgtagagtcagtggttaatgaagaaaaaataacagagagttccctagtagaaattactgaacataaagattttacactaaaaacagaggagcttatagagagccccaagttagaatcttctgagggtgaaattatacagacagtggacagacaatctgttaagagcccagaggttcaattgcttgggcatgttgaaactgaagatgtagaaataattgcaacatgtgatacttttgggaatgaagatttcaataatattcaagactctgaaaataacttactaaaaaataatcttctgaacaccaaattggaaaaatctttagaagaaaagaatgaatcgctgaccgaacatcctagatctacagagttgcctaaaacacacattgaacagattcagaagcattttagtgaggacaacaatgaaatgatacctatggagtgtgattcattttgcagtgaccaaaatgaatctgaagttgaaccatctgtaaatgctgatcttaaacaaatgaatgaaaattctgtgacacactgttctgaaaataatatgccgtcttctgatcttgcggatgaaaaggttgaaactgtttctcaaccatctgaaagcccaaaagataccatagataaaaccaaaaagcctcgtactcgaagatctagatttcattctccatctacaacttggtcacccaacaaagacactccacaagaaaagaagcggccccagtctccatctcccagaagagaaactgggaaagaaagcaggaagtctcaatcaccatctcctaagaatgagtcagccagaggccggaaaaaatcccgttctcagtccccaaaaaaggatattgcaagagaaaggaggcaatctcagtctcggtctccaaaaagggatactactagggaaagcagaagatctgaatcactgtccccaagaagagaaacttctagagagaacaaaagatctcagccaagagtgaaagattcttccccaggagaaaaatccaggtcccagagcagagaacgagaaagtgatagagatgggcagaggagagagagagaaaggagaaccagaaagtggtctaggtccagatctcattctaggtccccctcaagatgtagaacaaaaagtaagagttcatcatttggtagaattgacagagatagttactctccccggtggaagggaagatgggcaaatgatggttggagatgtccacgaggaaatgatcggtacagaaagaatgacccagagaaacagaatgaaaatacaagaaaagaaaaaaatgacatccatctagatgctgatgatccaaattctgctgacaaacatagaaatgactgtcccaattggataacagaaaaaataaactctgggcctgatccaagaaccagaaatccagaaaagttgaaagagtctcattgggaagaaaatagaaatgaaaattcaggaaattcttggaataaaaactttggttctggttgggtatctaaccgtggtagaggcagaggcaaccgtggcagaggcacttacagaagtagttttgcctataaagatcagaatgaaaatcggtggcaaaatcgaaaacccctctcagggaattcaaacagttcagggagtgaatctttcaagtttgtggaacagcaatcctataagcgaaaaagtgaacaggagttctcatttgatacaccagcagatagatctggatggacatctgcatccagctgggccgtgagaaagactttgccagcagatgtacaaaactactactcacgacgaggcagaaattcttcaggtccacagtctggatggatgaaacaagaggaggaaacatctggacaggattctagcctaaaagaccaaacaaaccagcaagttgatggttctcagctacctataaatatgatgcaaccgcaaatgaatgtaatgcagcaacaaatgaatgcacaacaccagcctatgaatatcttcccatatccagtgggtgttcatgctcctttgatgaacatccaacgcaatccatttaacattcatcctcagctacccttgcatctccacacaggagtgcccctcatgcaggtagccactcctaccagtgtatctcagggactaccaccaccaccaccccctcccccaccatcccaacaagtcaactacattgcttcacaaccagatggaaagcaattgcagggtattcctagttcttctcatgtaagtaataacatgagtacaccagttttgcctgctccgacagcagccccaggaaatacgggaatggttcagggaccaagttctggtaatacttcgtcatcaagtcacagcaaagcctctaatgctgctgtaaaattggcagaaagcaaagtaagtgttgcagtggaagccagcgcagatagctcgaagacagacaagaaattgcaaattcaagaaaaagcagcacaagaggtaaaattggccatcaagccattttaccaaaataaagatatcaccaaggaagaatataaagaaattgtacggaaagcagtagataaagtttgtcatagtaagagtggagaagtaaattctactaaagtggcaaatctggttaaagcctatgtagacaaatacaaatattcacggaaggggagccaaaagaaaactctggaagaacctgtgtctactgaaaaaaacataggctgaaatggggaacgctgtcaaggacattatcaggatatctgcaaagtgcaatttcaacatgtaccattaactgaaaatcatacataactgtgattgaaatttggttttgataaaattatttttttaacataggatatgatgttttgttctaaataaatataggtctgcactgcaacttctgtatccttccttcccctccaccctcccccacaaaattcaagggaaagtaaagggtttaaaggaatgtgcatctttactaggactgtgttatagtgtggatactggaaaatgtatagctttttgattagggcaatggagtgcataaattagaaacttctaagtgcactggttttcaaagagatatatataatgcatttattctgtcaggttaaaatgtaaagtatgatctttatgattttttccctctaattatagaaagttaaataatgtattaccatgaaaaatgtttctaatattaaatagaacatatcagttgcaaagttcctaatgtgtatttttaaagcacatatctgaataaattgcctagatagaaaaaaaattatcacgagtaaaatttagtgttcaaaacattgagacactcttcacctattgtatgaccaaataaaggttatgctgcttgtt

SEQ ID NO: 4001 - DNA, 4649 bp, Homo sapiens
  source 1..4649: mol_type = genomic DNA
gaaagtgccagaaaagcgacgtcctcagggcgggagcaggggacgccgcaacgtagtctgcgagaatgcaggaaggcggcagtgaagcggtcggtcggcggggccgcggcaaagtggggaggaaactcatcccgggcaggcgtcagggtggctggagagcgcagcacgcgcgaacagaacgggggcaggcgacaggaaaacgtgtgagcgcgcggctgaaagcgactgggacctgggaaacccttttccaaagagaaatgaagaagaaaactgtatgtaccctaaatatgggagataagaagtatgaagacatggaaggtgaagaaaacggagataatactatttccactggtctgttgtacagtgaggctgacagatgcccaatatgtcttaattgtctattagaaaaggaagttggttttccagaaagctgtaatcatgtcttctgtatgacttgtattcttaaatgggcagagacactggcttcatgtcctattgaccgtaaaccttttcaggcagtgtttaaattcagtgcattggaaggttatgttaaggttcaagtaaaaaaacagctgagagaaacaaaagacaagaaaaatgaaaactcatttgagaaacaggtctcctgtcatgaaaattctaaaagctgtataagaagaaaagccatcgtaagagaagatctattaagtgcaaaagtttgtgacttgaagtggatacatagaaactctttatacagtgaaacaggaggaaagaaaaatgcagcaataaagataaataagcctcagagatcaaattggagtacaaatcagtgcttcagaaattttttctccaatatgttttcttctgttagccactctggagaatcttcctttacctatagagcttattgtacagaatttatagaagccagtgaaatcagtgcattgattaggcagaagagacatgaactggaattgtcatggtttcctgatacattacctggaattggaagaattggttttataccctggaatgttgaaacagaagtccttcctctcatttcttctgtgttgccaagaactatttttccaacaagtaccatatctttcgaacattttggtacttcttgcaagggatatgcattagcacatactcaagaaggggaagaaaagaagcaaacttctggtacatcaaataccagaggatcaagacgaaaacctgcaatgacaactcctacaaggaggtctacacgtaacacaagagctgaaacagccagtcagtctcagagatccccaatatcagacaattctgggtgtgatgccccaggtaacagtaatccatctttaagtgttccctcttcagctgagtcagaaaagcaaacaagacaggctccaaaacggaagtctgtaagaagaggaagaaaaccacctttactgaaaaagaaacttcggagctctgtagctgcccctgaaaaatcatcttccaatgattcagtagatgaagaaacagcagaatctgacacatcacctgtgttagaaaaagagcaccaaccagatgtagacagtagtaacatttgtactgtgcagactcatgtagaaaaccagtctgctaattgcttgaaaagttgcaatgagcaaatagaagaaagtgagaagcatactgcaaattatgatacagaggaaagagtaggatcttcatcttctgagtcttgtgctcaagatcttcctgtgctagttggtgaggaaggggaagttaaaaaactcgagaatacaggtatagaggctaatgttttgtgtttggaaagtgagatttctgaaaatattcttgaaaaaggaggtgatccattggaaaagcaagaccagatatctggactttcacaatcagaggtaaagacagatgtatgtacagttcatcttccaaatgattttcctacatgtttaacatctgaaagcaaagtgtaccaacctgtatcttgtcccctaagtgacttatctgagaatgtagagtcagtggttaatgaagaaaaaataacagagagttccctagtagaaattactgaacataaagattttacactaaaaacagaggagcttatagagagccccaagttagaatcttctgagggtgaaattatacagacagtggacagacaatctgttaagagcccagaggttcaattgcttgggcatgttgaaactgaagatgtagaaataattgcaacatgtgatacttttgggaatgaagatttcaataatattcaagactctgaaaataacttactaaaaaataatcttctgaacaccaaattggaaaaatctttagaagaaaagaatgaatcgctgaccgaacatcctagatctacagagttgcctaaaacacacattgaacagattcagaagcattttagtgaggacaacaatgaaatgatacctatggagtgtgattcattttgcagtgaccaaaatgaatctgaagttgaaccatctgtaaatgctgatcttaaacaaatgaatgaaaattctgtgacacactgttctgaaaataatatgccgtcttctgatcttgcggatgaaaaggttgaaactgtttctcaaccatctgaaagcccaaaagataccatagataaaaccaaaaagcctcgtactcgaagatctagatttcattctccatctacaacttggtcacccaacaaagacactccacaagaaaagaagcggccccagtctccatctcccagaagagaaactgggaaagaaagcaggaagtctcaatcaccatctcctaagaatgagtcagccagaggccggaaaaaatcccgttctcagtccccaaaaaaggatattgcaagagaaaggaggcaatctcagtctcggtctccaaaaagggatactactagggaaagcagaagatctgaatcactgtccccaagaagagaaacttctagagagaacaaaagatctcagccaagagtgaaagattcttccccaggagaaaaatccaggtcccagagcagagaacgagaaagtgatagagatgggcagaggagagagagagaaaggagaaccagaaagtggtctaggtccagatctcattctaggtccccctcaagatgtagaacaaaaagtaagagttcatcatttggtagaattgacagagatagttactctccccggtggaagggaagatgggcaaatgatggttggagatgtccacgaggaaatgatcggtacagaaagaatgacccagagaaacagaatgaaaatacaagaaaagaaaaaaatgacatccatctagatgctgatgatccaaattctgctgacaaacatagaaatgactgtcccaattggataacagaaaaaataaactctgggcctgatccaagaaccagaaatccagaaaagttgaaagagtctcattgggaagaaaatagaaatgaaaattcaggaaattcttggaataaaaactttggttctggttgggtatctaaccgtggtagaggcagaggcaaccgtggcagaggcacttacagaagtagttttgcctataaagatcagaatgaaaatcggtggcaaaatcgaaaacccctctcagggaattcaaacagttcagggagtgaatctttcaagtttgtggaacagcaatcctataagcgaaaaagtgaacaggagttctcatttgatacaccagcagatagatctggatggacatctgcatccagctgggccgtgagaaagactttgccagcagatgtacaaaactactactcacgacgaggcagaaattcttcaggtccacagtctggatggatgaaacaagaggaggaaacatctggacaggattctagcctaaaagaccaaacaaaccagcaagttgatggttctcagctacctataaatatgatgcaaccgcaaatgaatgtaatgcagcaacaaatgaatgcacaacaccagcctatgaatatcttcccatatccagtgggtgttcatgctcctttgatgaacatccaacgcaatccatttaacattcatcctcagctacccttgcatctccacacaggagtgcccctcatgcaggtagccactcctaccagtgtatctcagggactaccaccaccaccaccccctcccccaccatcccaacaagtcaactacattgcttcacaaccagatggaaagcaattgcagggtattcctagttcttctcatgtaagtaataacatgagtacaccagttttgcctgctccgacagcagccccaggaaatacgggaatggttcagggaccaagttctggtaatacttcgtcatcaagtcacagcaaagcctctaatgctgctgtaaaattggcagaaagcaaagtaagtgttgcagtggaagccagcgcagatagctcgaagacagacaagaaattgcaaattcaagaaaaagcagcacaagaggtaaaattggccatcaagccattttaccaaaataaagatatcaccaaggaagaatataaagaaattgtacggaaagcagtagataaagtttgtcatagtaagagtggagaagtaaattctactaaagtggcaaatctggttaaagcctatgtagacaaatacaaatattcacggaaggggagccaaaagaaaactctggaagaacctgtgtctactgaaaaaaacataggctga

SEQ ID NO: 4002 - DNA, 5296 bp, Homo sapiens
  source 1..5296: mol_type = genomic DNA
gaataacagttaagttttggggagtaaaaactgtttcaatttttgactgtgttgggggttggtgctcctaatccctgtgttgttaaagggtcgactatattgtatttttgaaaattgctagagagtggacgtaaagtgttctcactaaacaaattataactatgtgaggtagtgcatatattaagtagctagatttggtcattccacaatgtatatgtacttcaaaacatcatgttgtacatgagaaacacagttttatctgttagtcagttttaaaaataaaaaatattccaactagaaactctgttgtagtttttgaaattacaacttggaggctttgaggaactgattagaagtctcctttctgtttcaggctttcatatccaaaccatagatctttagaagtaacatctgttaattaattattaataaatagtttgagtctttattaattcatggataacttgaccattttctctctccttttgcttagataatcccagatcatggccgggcacagtagctcacgcctgtattcccagcagtttgggaggccgaggcaggcagatcacttgaactcaggagtttgagaccagcttgggcaacatggcaaaaccctgtctctattaaaaatacaaaaattagctgggcatggtagtgcatgcctgtagtcccagctacctgggaggctgaggtgggaggatcgcttgagcctgggaggttgaggcttctgtgcgcgatgattgctccagtgatcacgccattgcactccagcctgggtgacagagtgagaccctgtctccaaaaaaaaaaaaaattaagcaagtagcagttacaagaccaaaagttattttcctttttttttttctctataaaattgcccatttggaccaaatctagttataacttatttcagtgtcattaagaaagttgatgaataagtcatattactcagatgttagtagctatgcatttattaatagttttatttataagtatttagtttcactctgttgcagactattttatgctaaaattagctaaagccaaattactatttcttaaaacatattttttactttttttttttttttaaatattattaggtacttcttgcaagggatatgcattagcacatactcaagaaggggaagaaaagaagcaaacttctggtacatcaaataccagaggatcaagacgaaaacctgcaatgacaactcctacaaggaggtctacacgtaacacaagagctgaaacagccagtcagtctcagagatccccaatatcagacaattctgggtgtgatgccccaggtaacagtaatccatctttaagtgttccctcttcagctgagtcagaaaagcaaacaagacaggctccaaaacggaagtctgtaagaagaggaagaaaaccacctttactgaaaaagaaacttcggagctctgtagctgcccctgaaaaatcatcttccaatgattcagtagatgaagaaacagcagaatctgacacatcacctgtgttagaaaaagagcaccaaccagatgtagacagtagtaacatttgtactgtgcagactcatgtagaaaaccagtctgctaattgcttgaaaagttgcaatgagcaaatagaagaaagtgagaagcatactgcaaattatgatacagaggaaagagtaggatcttcatcttctgagtcttgtgctcaagatcttcctgtgctagttggtgaggaaggggaagttaaaaaactcgagaatacaggtatagaggctaatgttttgtgtttggaaagtgagatttctgaaaatattcttgaaaaaggaggtgatccattggaaaagcaagaccagatatctggactttcacaatcagaggtaaagacagatgtatgtacagttcatcttccaaatgattttcctacatgtttaacatctgaaagcaaagtgtaccaacctgtatcttgtcccctaagtgacttatctgagaatgtagagtcagtggttaatgaagaaaaaataacagagagttccctagtagaaattactgaacataaagattttacactaaaaacagaggagcttatagagagccccaagttagaatcttctgagggtgaaattatacagacagtggacagacaatctgttaagagcccagaggttcaattgcttgggcatgttgaaactgaagatgtagaaataattgcaacatgtgatacttttgggaatgaagatttcaataatattcaagactctgaaaataacttactaaaaaataatcttctgaacaccaaattggaaaaatctttagaagaaaagaatgaatcgctgaccgaacatcctagatctacagagttgcctaaaacacacattgaacagattcagaagcattttagtgaggacaacaatgaaatgatacctatggagtgtgattcattttgcagtgaccaaaatgaatctgaagttgaaccatctgtaaatgctgatcttaaacaaatgaatgaaaattctgtgacacactgttctgaaaataatatgccgtcttctgatcttgcggatgaaaaggttgaaactgtttctcaaccatctgaaagcccaaaagataccatagataaaaccaaaaagcctcgtactcgaagatctagatttcattctccatctacaacttggtcacccaacaaagacactccacaagaaaagaagcggccccagtctccatctcccagaagagaaactgggaaagaaagcaggaagtctcaatcaccatctcctaagaatgagtcagccagaggccggaaaaaatcccgttctcagtccccaaaaaaggatattgcaagagaaaggaggcaatctcagtctcggtctccaaaaagggatactactagggaaagcagaagatctgaatcactgtccccaagaagagaaacttctagagagaacaaaagatctcagccaagagtgaaagattcttccccaggagaaaaatccaggtcccagagcagagaacgagaaagtgatagagatgggcagaggagagagagagaaaggagaaccagaaagtggtctaggtccagatctcattctaggtccccctcaagatgtagaacaaaaagtaagagttcatcatttggtagaattgacagagatagttactctccccggtggaagggaagatgggcaaatgatggttggagatgtccacgaggaaatgatcggtacagaaagaatgacccagagaaacagaatgaaaatacaagaaaagaaaaaaatgacatccatctagatgctgatgatccaaattctgctgacaaacatagaaatgactgtcccaattggataacagaaaaaataaactctgggcctgatccaagaaccagaaatccagaaaagttgaaagagtctcattgggaagaaaatagaaatgaaaattcaggaaattcttggaataaaaactttggttctggttgggtatctaaccgtggtagaggcagaggcaaccgtggcagaggcacttacagaagtagttttgcctataaagatcagaatgaaaatcggtggcaaaatcgaaaacccctctcagggaattcaaacagttcagggagtgaatctttcaagtttgtggaacagcaatcctataagcgaaaaagtgaacaggagttctcatttgatacaccagcagatagatctggatggacatctgcatccagctgggccgtgagaaagactttgccagcagatgtacaaaactactactcacgacgaggcagaaattcttcaggtccacagtctggatggatgaaacaagaggaggaaacatctggacaggattctagcctaaaagaccaaacaaaccagcaagttgatggttctcagctacctataaatatgatgcaaccgcaaatgaatgtaatgcagcaacaaatgaatgcacaacaccagcctatgaatatcttcccatatccagtgggtgttcatgctcctttgatgaacatccaacgcaatccatttaacattcatcctcagctacccttgcatctccacacaggagtgcccctcatgcaggtagccactcctaccagtgtatctcagggactaccaccaccaccaccccctcccccaccatcccaacaagtcaactacattgcttcacaaccagatggaaagcaattgcagggtattcctagttcttctcatgtaagtaataacatgagtacaccagttttgcctgctccgacagcagccccaggaaatacgggaatggttcagggaccaagttctggtaatacttcgtcatcaagtcacagcaaagcctctaatgctgctgtaaaattggcagaaagcaaagtaagtgttgcagtggaagccagcgcagatagctcgaagacagacaagaaattgcaaattcaagaaaaagcagcacaagaggtaaaattggccatcaagccattttaccaaaataaagatatcaccaaggaagaatataaagaaattgtacggaaagcagtagataaagtttgtcatagtaagagtggagaagtaaattctactaaagtggcaaatctggttaaagcctatgtagacaaatacaaatattcacggaaggggagccaaaagaaaactctggaagaacctgtgtctactgaaaaaaacataggctgaaatggggaacgctgtcaaggacattatcaggatatctgcaaagtgcaatttcaacatgtaccattaactgaaaatcatacataactgtgattgaaatttggttttgataaaattatttttttaacataggatatgatgttttgttctaaataaatataggtctgcactgcaacttctgtatccttccttcccctccaccctcccccacaaaattcaagggaaagtaaagggtttaaaggaatgtgcatctttactaggactgtgttatagtgtggatactggaaaatgtatagctttttgattagggcaatggagtgcataaattagaaacttctaagtgcactggttttcaaagagatatatataatgcatttattctgtcaggttaaaatgtaaagtatgatctttatgattttttccctctaattatagaaagttaaataatgtattaccatgaaaaatgtttctaatattaaatagaacatatcagttgcaaagttcctaatgtgtatttttaaagcacatatctgaataaattgcctagatagaaaaaaaattatcacgagtaaaatttagtgttcaaaacattgagacactcttcacctattgtatgaccaaataaaggttatgctgcttgtt

SEQ ID NO: 4003 - DNA, 2861 bp, Homo sapiens
  source 1..2861: mol_type = genomic DNA
ggggggtgaagggtcactgctgaccggaggcagctctgccaggcagtgtcatcagtgggcttcacgtttgactgacagcccaccagcgtcacctcccagccccgagctggaccgcacaccttgggacacggttttccacttcctaaggacgagccccagactggaggagaggtccgaggaggtgggcgttggactctttgcgaggaccccggcggctggcccgggggaggcggccgaggcggcggcggcggcggccgggggcgacatggcggaggagcaggacctatcggaggtggagctgagccccgtgggctcggaggagccccgctgcctgtccccggggagcgcgccctcgctagggcccgacggcggcggcggcggatcgggcctgcgagccagcccggggccaggcgagctgggcaaggtcaagaaggagcagcaggacggcgaggcggacgatgacaagttccccgtgtgcatccgcgaggccgtcagccaggtgctcagcggctacgactggacgctggtgcccatgcccgtgcgcgtcaacggcgccagcaaaagcaagccgcacgtcaagcggcccatgaacgccttcatggtgtgggctcaggcagcgcgcaggaagctcgcggaccagtacccgcacctgcacaacgctgagctcagcaagacgctgggcaagctctggaggctgctgaacgaaagtgacaagcgccccttcatcgaggaggctgagcggctccgtatgcagcacaagaaagaccacccggactacaagtaccagcccaggcggcggaagaacgggaaggccgcccagggcgaggcggagtgccccggtggggaggccgagcaaggtgggaccgccgccatccaggcccactacaagagcgcccacttggaccaccggcacccaggagagggctcccccatgtcagatgggaaccccgagcacccctcaggccagagccatggcccacccacccctccaaccaccccgaagacagagctgcagtcgggcaaggcagacccgaagcgggacgggcgctccatgggggagggcgggaagcctcacatcgacttcggcaacgtggacattggtgagatcagccacgaggtaatgtccaacatggagacctttgatgtggctgagttggaccagtacctgccgcccaatgggcacccaggccatgtgagcagctactcagcagccggctatgggctgggcagtgccctggccgtggccagtggacactccgcctggatctccaagccaccaggcgtggctctgcccacggtctcaccacctggtgtggatgccaaagcccaggtgaagacagagaccgcggggccccaggggcccccacactacaccgaccagccatccacctcacagatcgcctacacctccctcagcctgccccactatggctcagccttcccctccatctcccgcccccagtttgactactctgaccatcagccctcaggaccctattatggccactcgggccaggcctctggcctctactcggccttctcctatatggggccctcgcagcggcccctctacacggccatctctgaccccagcccctcagggccccagtcccacagccccacacactgggagcagccagtatatacgacactgtcccggccctaaagggggccctgtcgccaccaccccccgcccagcccctgcccccagcctgtgtgccctgttccttgcccacctcaggcctggtggtggcagtggaggaggctgaggaggctgaagaggctgacaggtcggggggctttctgtctggctcactgccctgatgacccacccgccccatccaggctccagcagcaaagccccaggagaacaggctggacagaggagaaggaggttgactgttgcacccacactgaaagatgaggggctgcaccttcccccaggaatgaccctctatcccaggacctgagaagggcctgctcaccctcctcggggaggggaagcaccagggttggtggcatcggaggccttaccactcctatgactcctgttttctctctcacagatagtgagggtctgacatgcccatgccacctatgccacagtgcctaagggctaggccacccagagactgtgcccggagctggccgtgtctcccactcaggggctgagagtagctttgaggagcctcattggggagtggggggttcgagggacttagtggagttctcatcccttcaatgccccctccctttctgaaggcaggaaggagttggcacagaggccccctgatccaattctgtgccaataacctcattctttgtctgagaaacagcccccagtcctcctccactacaacctccatgaccttgagacgcatcccaggaggtgacgaggcaggggctccaggaaaggaatcagagacaattcacagagcctccctccctgggctccttgccagctccctcttcccttactaggctctatggcccctgctcagtcagccccactccctgggcttcccagagagtgacagctgctcaggccctaacccttggctccaggagacacagggcccagcacccaggttgctgtcggcaggctgaagacactagaatcctgacctgtacattctgcccttgcctcttaccccttgcctcccagtggtatttgaataaagtatgtagctatatctgcccctattttcctgttctgcagccccccaaatccacatgtaactcattactgtctcctgttatttatctcagtagtcccctctcctagccactctagcccctattaactctgcattaagcattccacataataaaattaaaggttccggttacctgcttggtga

SEQ ID NO: 4004 - DNA, 2879 bp, Homo sapiens
  source 1..2879: mol_type = genomic DNA
gggctgtccggccagggtggttggtggtaaggattcaggctccgtcctaacgaggccgtggcctgaggctcagggccccccgcccctccctcccagcccaccagcgtcacctcccagccccgagctggaccgcacaccttgggacacggttttccacttcctaaggacgagccccagactggaggagaggtccgaggaggtgggcgttggactctttgcgaggaccccggcggctggcccgggggaggcggccgaggcggcggcggcggcggccgggggcgacatggcggaggagcaggacctatcggaggtggagctgagccccgtgggctcggaggagccccgctgcctgtccccggggagcgcgccctcgctagggcccgacggcggcggcggcggatcgggcctgcgagccagcccggggccaggcgagctgggcaaggtcaagaaggagcagcaggacggcgaggcggacgatgacaagttccccgtgtgcatccgcgaggccgtcagccaggtgctcagcggctacgactggacgctggtgcccatgcccgtgcgcgtcaacggcgccagcaaaagcaagccgcacgtcaagcggcccatgaacgccttcatggtgtgggctcaggcagcgcgcaggaagctcgcggaccagtacccgcacctgcacaacgctgagctcagcaagacgctgggcaagctctggaggctgctgaacgaaagtgacaagcgccccttcatcgaggaggctgagcggctccgtatgcagcacaagaaagaccacccggactacaagtaccagcccaggcggcggaagaacgggaaggccgcccagggcgaggcggagtgccccggtggggaggccgagcaaggtgggaccgccgccatccaggcccactacaagagcgcccacttggaccaccggcacccaggagagggctcccccatgtcagatgggaaccccgagcacccctcaggccagagccatggcccacccacccctccaaccaccccgaagacagagctgcagtcgggcaaggcagacccgaagcgggacgggcgctccatgggggagggcgggaagcctcacatcgacttcggcaacgtggacattggtgagatcagccacgaggtaatgtccaacatggagacctttgatgtggctgagttggaccagtacctgccgcccaatgggcacccaggccatgtgagcagctactcagcagccggctatgggctgggcagtgccctggccgtggccagtggacactccgcctggatctccaagccaccaggcgtggctctgcccacggtctcaccacctggtgtggatgccaaagcccaggtgaagacagagaccgcggggccccaggggcccccacactacaccgaccagccatccacctcacagatcgcctacacctccctcagcctgccccactatggctcagccttcccctccatctcccgcccccagtttgactactctgaccatcagccctcaggaccctattatggccactcgggccaggcctctggcctctactcggccttctcctatatggggccctcgcagcggcccctctacacggccatctctgaccccagcccctcagggccccagtcccacagccccacacactgggagcagccagtatatacgacactgtcccggccctaaagggggccctgtcgccaccaccccccgcccagcccctgcccccagcctgtgtgccctgttccttgcccacctcaggcctggtggtggcagtggaggaggctgaggaggctgaagaggctgacaggtcggggggctttctgtctggctcactgccctgatgacccacccgccccatccaggctccagcagcaaagccccaggagaacaggctggacagaggagaaggaggttgactgttgcacccacactgaaagatgaggggctgcaccttcccccaggaatgaccctctatcccaggacctgagaagggcctgctcaccctcctcggggaggggaagcaccagggttggtggcatcggaggccttaccactcctatgactcctgttttctctctcacagatagtgagggtctgacatgcccatgccacctatgccacagtgcctaagggctaggccacccagagactgtgcccggagctggccgtgtctcccactcaggggctgagagtagctttgaggagcctcattggggagtggggggttcgagggacttagtggagttctcatcccttcaatgccccctccctttctgaaggcaggaaggagttggcacagaggccccctgatccaattctgtgccaataacctcattctttgtctgagaaacagcccccagtcctcctccactacaacctccatgaccttgagacgcatcccaggaggtgacgaggcaggggctccaggaaaggaatcagagacaattcacagagcctccctccctgggctccttgccagctccctcttcccttactaggctctatggcccctgctcagtcagccccactccctgggcttcccagagagtgacagctgctcaggccctaacccttggctccaggagacacagggcccagcacccaggttgctgtcggcaggctgaagacactagaatcctgacctgtacattctgcccttgcctcttaccccttgcctcccagtggtatttgaataaagtatgtagctatatctgcccctattttcctgttctgcagccccccaaatccacatgtaactcattactgtctcctgttatttatctcagtagtcccctctcctagccactctagcccctattaactctgcattaagcattccacataataaaattaaaggttccggttacctgcttggtga

SEQ ID NO: 4005 - DNA, 1139 bp, Homo sapiens
  source 1..1139: mol_type = genomic DNA
gtccggccagggtggttggtggtaaggattcaggctccgtcctaacgaggccgtggcctgaggctcagggccccccgcccctccctcccagcccaccagcgtcacctcccagccccgagctggaccgcacaccttgggacacggttttccacttcctaaggacgagccccagactggaggagaggtccgaggaggtgggcgttggactctttgcgaggaccccggcggctggcccgggggaggcggccgaggcggcggcggcggcggccgggggcgacatggcggaggagcaggacctatcggaggtggagctgagccccgtgggctcggaggagccccgctgcctgtccccggggagcgcgccctcgctagggcccgacggcggcggcggcggatcgggcctgcgagccagcccggggccaggcgagctgggcaaggtcaagaaggagcagcaggacggcgaggcggacgatgacaagttccccgtgtgcatccgcgaggccgtcagccaggtgctcagcggctacgactggacgctggtgcccatgcccgtgcgcgtcaacggcgccagcaaaagcaagccgcacgtcaagcggcccatgaacgccttcatggtgtgggctcaggcagcgcgcaggaagctcgcggaccagtacccgcacctgcacaacgctgagctcagcaagacgctgggcaagctctggaggctgctgaacgaaagtgacaagcgccccttcatcgaggaggctgagcggctccgtatgcagcacaagaaagaccacccggactacaagtaccagcccaggcggcggaagaacgggaaggccgcccagggcgaggcggagtgccccggtggggaggccgagcaaggtgggaccgccgccatccaggcccactacaagagcgcccacttggaccaccggcacccaggagagggctcccccatgtcagatgggaaccccgagcacccctcaggccagagccatggcccacccacccctccaaccaccccgaagacagagctgcagtcgggcaaggcagacccgaagcgggacgggcgccccagcccctcagggccccagtcccacagccccacacactgggagcagccagtatatacgacactgtcccggccctaa

SEQ ID NO: 4006 - DNA, 873 bp, Homo sapiens
  source 1..873: mol_type = genomic DNA
ccgaggaggtgagtgcgcagcctgctcctccctggcccgcccaggcctgggaccctgctgtgaggtggagagaggcgacaccccgcccttgccccccacctggctctcctctaaaccccgttggggcaggctgagggaagaaggaaaggtgggcgttggactctttgcgaggaccccggcggctggcccgggggaggcggccgaggcggcggcggcggcggccgggggcgacatggcggaggagcaggacctatcggaggtggagctgagccccgtgggctcggaggagccccgctgcctgtccccggggagcgcgccctcgctagggcccgacggcggcggcggcggatcgggcctgcgagccagcccggggccaggcgagctgggcaaggtcaagaaggagcagcaggacggcgaggcggacgatgacaagttccccgtgtgcatccgcgaggccgtcagccaggtgctcagcggctacgactggacgctggtgcccatgcccgtgcgcgtcaacggcgccagcaaaagcaagccgcacgtcaagcggcccatgaacgccttcatggtgtgggctcaggcagcgcgcaggaagctcgcggaccagtacccgcacctgcacaacgctgagctcagcaagacgctgggcaagctctggaggctgctgaacgaaagtgacaagcgccccttcatcgaggaggctgagcggctccgtatgcagcacaagaaagaccacccggactacaagtaccagcccaggcggcggaagaacgggaaggccgcccagggcgaggcggagtgccccggtggggaggccgagcaaggtgggaccgccgccatccaggcccactacaagagcgcccacttggacca

SEQ ID NO: 4007 - DNA, 4876 bp, Homo sapiens
  source 1..4876: mol_type = genomic DNA
attggggtctgctctaagctgcagcaagagaaactgtgtgtgaggggaagaggcctgtttcgctgtcgggtctctagttcttgcacgctctttaagagtctgcactggaggaactcctgccattaccagctcccttcttgcagaagggagggggaaacatacatttattcatgccagtctgttgcatgcaggctttttggcttcctaccttgcaacaaaataattgcaccaactccttagtgccgattccgcccacagagagtcctggagccacagtcttttttgctttgcattgtaggagagggactaagtgctagagactatgtcgctttcctgagctaccgagagcgctcgtgaactggaatcaactgcttcagggaaaaagaaaaaaaaaaaaaaaagacttgcctgggaggccgcgagaaacttgcattggaagcttcagcaaccagcattcgagaaactcctctctactttagcacggtctccagactcagccgagagacagcaaactgcagcgcggtgagagagcgagagagagggagagagagactctccagcctgggaactataactcctctgcgagaggcggagaactccttccccaaatcttttggggacttttctctctttacccacctccgcccctgcgaggagttgaggggccagttcggccgccgcgcgcgtcttcccgttcggcgtgtgcttggcccggggaaccgggagggcccggcgatcgcgcggcggccgccgcgagggtgtgagcgcgcgtgggcgcccgccgagccgaggccatggtgcagcaaaccaacaatgccgagaacacggaagcgctgctggccggcgagagctcggactcgggcgccggcctcgagctgggaatcgcctcctcccccacgcccggctccaccgcctccacgggcggcaaggccgacgacccgagctggtgcaagaccccgagtgggcacatcaagcgacccatgaacgccttcatggtgtggtcgcagatcgagcggcgcaagatcatggagcagtcgcccgacatgcacaacgccgagatctccaagcggctgggcaaacgctggaagctgctcaaagacagcgacaagatccctttcattcgagaggcggagcggctgcgcctcaagcacatggctgactaccccgactacaagtaccggcccaggaagaaggtgaagtccggcaacgccaactccagctcctcggccgccgcctcctccaagccgggggagaagggagacaaggtcggtggcagtggcgggggcggccatgggggcggcggcggcggcgggagcagcaacgcggggggaggaggcggcggtgcgagtggcggcggcgccaactccaaaccggcgcagaaaaagagctgcggctccaaagtggcgggcggcgcgggcggtggggttagcaaaccgcacgccaagctcatcctggcaggcggcggcggcggcgggaaagcagcggctgccgccgccgcctccttcgccgccgaacaggcgggggccgccgccctgctgcccctgggcgccgccgccgaccaccactcgctgtacaaggcgcggactcccagcgcctcggcctccgcctcctcggcagcctcggcctccgcagcgctcgcggccccgggcaagcacctggcggagaagaaggtgaagcgcgtctacctgttcggcggcctgggcacgtcgtcgtcgcccgtgggcggcgtgggcgcgggagccgaccccagcgaccccctgggcctgtacgaggaggagggcgcgggctgctcgcccgacgcgcccagcctgagcggccgcagcagcgccgcctcgtcccccgccgccggccgctcgcccgccgaccaccgcggctacgccagcctgcgcgccgcctcgcccgccccgtccagcgcgccctcgcacgcgtcctcctcggcctcgtcccactcctcctcttcctcctcctcgggctcctcgtcctccgacgacgagttcgaagacgacctgctcgacctgaaccccagctcaaactttgagagcatgtccctgggcagcttcagttcgtcgtcggcgctcgaccgggacctggattttaacttcgagcccggctccggctcgcacttcgagttcccggactactgcacgcccgaggtgagcgagatgatctcgggagactggctcgagtccagcatctccaacctggttttcacctactgaagggcgcgcaggcagggagaagggccggggggggtaggagaggagaaaaaaaaagtgaaaaaaagaaacgaaaaggacagacgaagagtttaaagagaaaagggaaaaaagaaagaaaaagtaagcagggctggcttcgcccgcgttctcgtcgtcggatcaaggagcgcggcggcgttttggacccgcgctcccatcccccaccttcccgggccggggacccactctgcccagccggagggacgcggaggaggaagagggtagacaggggcgacctgtgattgttgttattgatgttgttgttgatggcaaaaaaaaaaaagcgacttcgagtttgctcccctttgcttgaagagaccccctcccccttccaacgagcttccggacttgtctgcacccccagcaagaaggcgagttagttttctagagacttgaaggagtctcccccttcctgcatcaccaccttggttttgttttattttgcttcttggtcaagaaaggaggggagaacccagcgcacccctccccccctttttttaaacgcgtgatgaagacagaaggctccggggtgacgaatttggccgatggcagatgttttgggggaacgccgggactgagagactccacgcaggcgaattcccgtttggggcttttttttcctccctcttttccccttgccccctctgcagccggaggaggagatgttgaggggaggaggccagccagtgtgaccggcgctaggaaatgacccgagaaccccgttggaagcgcagcagcgggagctaggggcgggggcggaggaggacacgaactggaagggggttcacggtcaaactgaaatggatttgcacgttggggagctggcggcggcggctgctgggcctccgccttcttttctacgtgaaatcagtgaggtgagacttcccagaccccggaggcgtggaggagaggagactgtttgatgtggtacaggggcagtcagtggagggcgagtggtttcggaaaaaaaaaaagaaaaaaagaaaaaaaaagaaaaaaaaaagatttttttcttctcttaatcggaatcgtgatggtgttggattatttcaatggtggggttaatatagcatgttatcctgtctatcttttaaagatttctgtataagactgttgagcagtttttaaaatagtgtaggataatataaaaagcagatagatggcgctatgtttgattcctacaacgaaattatcaccagctttttttcattcttaactctttaaaggattcaaacgcaactcaaatctgtgctggactttaaaaaaacaattcaggaccaaattttttctcagtgtgtgtgtttattccttataggtgtaaatgagaagacgtgtttttttccttcaccgatgctccatcctcgtatttctttttccttgtaaatgtaatcagatgccattttatatgtggacgtatttatactggccaaacatattttttcttttgtccctttttttctttcctttctttttacttcctttatttctttattccttccttttcctttttttcttttttttttctttttttttttttttttttggtagttgttgttacccacgccattttacgtctccttcactgaagggctagagttttaacttttaattttttatatttaaatgtagacttttgacacttttaaaaaacaaaaaaagacaagagagatgaaaacgtttgattattttctcagtgtatttttgtaaaaaatatataaagggggtgttaatcggtgtaaatcgctgtttggatttcctgattttataacagggcggctggttaatatctcacacagtttaaaaaatcagcccctaatttctccatgtttacacttcaatctgcaggcttcttaaagtgacagtatcccttaacctgccaccagtgtccaccctccggcccccgtcttgtaaaaaggggaggagaattagccaaacactgtaagcttttaagaaaaacaaagttttaaacgaaatactgctctgtccagaggctttaaaactggtgcaattacagcaaaaagggattctgtagctttaacttgtaaaccacatcttttttgcactttttttataagcaaaaacgtgccgtttaaaccactggatctatctaaatgccgatttgagttcgcgacactatgtactgcgtttttcattcttgtatttgactatttaatcctttctacttgtcgctaaatataattgttttagtcttatggcatgatgatagcatatgtgttcaggtttatagctgttgtgtttaaaaattgaaaaaagtggaaaacatctttgtacatttaagtctgtattataataagcaaaaagattgtgtgtatgtatgtttaatataacatgacaggcactaggacgtctgcctttttaaggcagttccgttaagggtttttgtttttaaacttttttttgccatccatcctgtgcaatatgccgtgtagaatatttgtcttaaaattcaaggccacaaaaacaatgtttgggggaaaaaaaagaaaaaatcatgccagctaatcatgtcaagttcactgcctgtcagattgttgatatataccttctgtaaataactttttttgagaaggaaataaaatcagctggaactgaaccct

SEQ ID NO: 4008 - DNA, 2082 bp, Homo sapiens
  source 1..2082: mol_type = genomic DNA
ctgcactggaggaactcctgccattaccagctcccttcttgcagaagggagggggaaacatacatttattcatgccagtctgttgcatgcaggctttttggcttcctaccttgcaacaaaataattgcaccaactccttagtgccgattccgcccacagagagtcctggagccacagtcttttttgctttgcattgtaggagagggactaagtgctagagactatgtcgctttcctgagctaccgagagcgctcgtgaactggaatcaactgcttcagggaaaaagaaaaaaaaaaaaaaaagacttgcctgggaggccgcgagaaacttgcattggaagcttcagcaaccagcattcgagaaactcctctctactttagcacggtctccagactcagccgagagacagcaaactgcagcgcggtgagagagcgagagagagggagagagagactctccagcctgggaactataactcctctgcgagaggcggagaactccttccccaaatcttttggggacttttctctctttacccacctccgcccctgcgaggagttgaggcggccgccgcgagggtgtgagcgcgcgtgggcgcccgccgagccgaggccatggtgcagcaaaccaacaatgccgagaacacggaagcgctgctggccggcgagagctcggactcgggcgccggcctcgagctgggaatcgcctcctcccccacgcccggctccaccgcctccacgggcggcaaggccgacgacccgagctggtgcaagaccccgagtgggcacatcaagcgacccatgaacgccttcatggtgtggtcgcagatcgagcggcgcaagatcatggagcagtcgcccgacatgcacaacgccgagatctccaagcggctgggcaaacgctggaagctgctcaaagacagcgacaagatccctttcattcgagaggcggagcggctgcgcctcaagcacatggctgactaccccgactacaagtaccggcccaggaagaaggtgaagtccggcaacgccaactccagctcctcggccgccgcctcctccaagccgggggagaagggagacaaggtcggtggcagtggcgggggcggccatgggggcggcggcggcggcgggagcagcaacgcggggggaggaggcggcggtgcgagtggcggcggcgccaactccaaaccggcgcagaaaaagagctgcggctccaaagtggcgggcggcgcgggcggtggggttagcaaaccgcacgccaagctcatcctggcaggcggcggcggcggcgggaaagcagcggctgccgccgccgcctccttcgccgccgaacaggcgggggccgccgccctgctgcccctgggcgccgccgccgaccaccactcgctgtacaaggcgcggactcccagcgcctcggcctccgcctcctcggcagcctcggcctccgcagcgctcgcggccccgggcaagcacctggcggagaagaaggtgaagcgcgtctacctgttcggcggcctgggcacgtcgtcgtcgcccgtgggcggcgtgggcgcgggagccgaccccagcgaccccctgggcctgtacgaggaggagggcgcgggctgctcgcccgacgcgcccagcctgagcggccgcagcagcgccgcctcgtcccccgccgccggccgctcgcccgccgaccaccgcggctacgccagcctgcgcgccgcctcgcccgccccgtccagcgcgccctcgcacgcgtcctcctcggcctcgtcccactcctcctcttcctcctcctcgggctcctcgtcctccgacgacgagttcgaagacgacctgctcgacctgaaccccagctcaaactttgagagcatgtccctgggcagcttcagttcgtcgtcggcgctcgaccgggacctggattttaacttcgagcccggctccggctcgcacttcgagttcccggactactgcacgcccgaggtgagcgagatgatctcgggagactggctcgagtccagcatctccaacctggttttcacctactgaagggcgcgcaggcagggagaagggccggggggggtaggagagg

SEQ ID NO: 4009 - DNA, 5798 bp, Homo sapiens
  source 1..5798: mol_type = genomic DNA
cggaaacatgagagaggactatcatctgctccttgctctgaatttctttgaacctccatgctggaaccctcctcagttctccatgcaaacgttaaccaggcccctttgtggtgcttggtgctgcgctggtgcagagaatgcaaagacactgtctgtggtgggaaacagaaaagcagagtgaaccacacattccagcgccgggaaattgaggcaaaagaagcatgtgactggctccgtgctgccgggttcccgcaatacgctcagttatatgaggattcacaatttcccatcaacattgtggctgtcaagaatgatcatgattttcttgaaaaggaccttgtagaacctctttgcagacgactaaatacgttgaacaagtgtgcctcaatgaaacttgatgtgaacttccaaaggaaaaagggtgacgactccgatgaggaagatctttgtatcagcaacaaatggactttccaaagaaccagtcgcaggtggtctcgtgtggacgacctctacacgctgctccctcgaggagacagaaatgggtcaccgggaggcacggggatgaggaacacgaccagcagtgagagcgtcctcacagacctgagcgagcctgaggtctgctccattcacagcgaaagcagtggaggcagcgacagtcgcagccagccgggccagtgctgtacagacaacccggtcatgctggatgccccactcgtcagcagcagcctcccacagccccccagagatgtcctcaaccaccccttccaccccaagaatgagaagcccacgagggctagggccaaatcatttttgaaacgcatggaaacactccgagggaagggagcccacgggaggcataaggggtctgggcggacaggtggcctggtgatcagtgggcccatgttgcagcaggagccagagtcctttaaggctatgcagtgcatccaaataccaaatggagatctccagaattcgccgccacctgcctgcagaaaagggctcccatgctctggcaagtcgagtggcgagagcagcccgtcggagcacagcagcagcggggtgagcacgccctgcctgaaggaacgcaagtgccacgaggccaacaagcgcgggggcatgtacttggaggacctagatgtgctggcggggacagcactgccggatgcaggggaccaaagccgtatgcatgaatttcactcccaagagaatttggtggtgcatattcccaaggatcacaaaccaggaacattccccaaggcactttctattgaaagcctctctcccacagatagtagcaatggggttaattggaggaccggtagcatctccctgggcagagagcaggtccctggtgccagggagccccggctcatggcgtcctgccacagagccagccgagtcagtatctatgacaatgtccctggctcccatctgtatgccagcacaggagatcttttggacttggagaaagatgaccttttccctcacttggatgacattctgcagcatgtcaatgggctccaagaggtagtcgatgactggtccaaagatgtcttgcctgaactgcaaactcatgatacattggttggggaacctggcttatccacctttccatctcctaatcagatcaccttagattttgaaggtaactctgtctcagaaggtcggacgacacccagtgatgtggaaagagatgtaacatctcttaatgaatctgagcctcctggggtcagagacaggagggattctggtgtaggggcctctctgaccaggccaaacaggcgactccgatggaacagtttccagctgtcgcaccagccccggccggccccagcatcgccccacatcagcagccagacggccagccagctgagcctgctccagcgcttctcactgctccgcctcacggccatcatggagaagcactccatgtccaacaagcacggctggacatggtcagttccaaagttcatgaagaggatgaaagttcccgactacaaagacaaggctgtctttggcgttcctctcatagtccacgtccaaagaacgggacagcccctgcctcaaagtattcagcaagcactgagatatctacgcagcaactgcctcgatcaggtgggtctttttcgcaaatcaggagtgaagtctcgaatccatgcccttcgccaaatgaatgaaaacttccctgagaacgtcaactatgaagaccagtctgcttatgatgtggcggatatggtgaaacagttcttccgggacctccctgagcctcttttcaccaacaagctcagtgagacctttctccatatctatcagtatgtctccaaagagcagcggctgcaggccgtgcaggctgccatcctgctactggccgatgagaacagggaggtcctgcagacgctcttgtgtttcctgaacgacgtcgtcaacttggtggaagagaatcagatgacgcccatgaacctggcagtgtgtctggccccctccctctttcatcttaatttattgaagaaagaaagctctccacgagtcatacagaagaaatatgccactgggaagccagatcaaaaggacctcaacgagaatctggcagcagctcaggggctagcgcacatgatcatggaatgcgacagactttttgaggttccacacgagttggtggcccagtctcgtaactcgtatgtggaggctgagatccacgtgccaaccctggaagaattggggacacagctggaggagagtggggcaactttccacacttacctgaaccatctcatccagggcctccagaaagaagccaaggagaagttcaaaggatgggtcacgtgctccagcacggacaatacagatcttgctttcaaaaaggtgggcgacgggaacccgctgaagctgtggaaggcttctgtggaggtggaagcacccccctcagtggtcctgaaccgcgtgctgagagagcgccacctgtgggacgaggactttgtgcagtggaaggttgtggaaactctagacaggcaaacagagatctaccagtatgtgctgaacagcatggctccccatccttccagagactttgtggttctcaggacctggaaaactgatttgcccaaaggaatgtgtaccctggtgtccctctccgtggagcatgaggaagcccagctcctgggtggtgtgcgagcagtggtgatggactcgcagtacttgatagaaccgtgtggctctggcaagtcaagactgactcacatctgcaggatagacctgaaaggtcactccccagaatggtacagcaaaggctttggacatctgtgtgcagcagaagttgccaggattagaaactctttccagcccctcattgctgagggcccagaaactaaaatctgagttttgcccagtgtgacatcaaactcagggaagaggaagctaaagtgacgagtgtggcagagagtgtgcatgtgagaaagcgagagaaagaggaactgaaggacgcggttaatgcctaaaaatggaaacgttaagaagttggaatgttggagatgcaagaatttccaagaactttcttagccttcctggagatggctacatccctactaatataattttaaaatgagaactttatatatattacttaaaattaaatggactattccttgtgcattgcctaatttgctatttaaaggcttctaagaagcgtatacctaactgtaaataaatgtatgtatagcatatgtacatatgtgtgtatatctccatctttactgtatatatgtaaaataccaattttatatagaattgtgtgttttgaaaatgacggtgtctgactcagtgagtcccttcctcacacagttctttccaagtggctctgggccccatctctccactgtcctgtaagctgtgcagaacctgctgctaacaccaaggtgtgaacatgccctgatgcctaaccaaagatgagttaaccaaaggaaaataacattaaaggagacttatgtgttaacgctttgtttctgctattcaaaaactgagagtggagatctgggataaagcaaggaaataataattactcctccttaaagcaaatgggggggtgagaagtcattaccaaatttaaagctagatgaggagttgccactgggcccagtaagatggaatttcagtgagatatggaccaccggagtcagcgagagtgactgaaacagaagcgatacctctcgctcccatgcccatcactacagaccccaagtcaagatgaatatcatagcctttacttcttcacagccaaagggagcccctgtgttgtctcaagtttttataaatacatttcataatgttattaaatgtcattctatttgaccagtggcctatttggtcacagttaattggtgttttcttattgcactgaattcaactccagacaccatacaaagggagatgatggccattccgttcaaatcctagatcgttacagcttcagggaattcatattttgttatgtgtaggatactcttaaaatgtaattcattaaacttttacaatctgaaagacagggtttttaactaacatgagaccaaaactatgttctttgattagttttagatagtataatcgggtttattaattcttctgtgtttcttcactagccagtccaagctacctatgcatttgacccaaccttatttattattgtacagatgaagcgaattgactccctttagccaactgctaatggatcgaatgtgctttttattgtaattcaacagctatagagagaaagataacttattgtgtgtttgatttcagggagagagattttctttggtcatccataatagagattgataagatttagcaactggtgttggagaaaaaaagaaaagcaaatgagtgttttcaggtttttttgcattatatgcatttatgtaatgtttctgttatcagcaatgtgcaattattttattgagaggaataaaaaagctttctatgagtttggtatggtgcgaggaaaatcttacagtttgaattatgacctagaaatttttcattcccatatctacctaagaaggaagcagtaaatccataatttaccttttgggcaatgctttgtgagcaaaacaaagtcacttctgccataacatcttgaatttaaccatatatgccagattactttatatgcatcaacaagatcaccagtgaagtttaatctagctaaacactggtcctgctcctgagatgggatcctatgtgtttggaaaacgtgataggcacacgaggatgagtggctttgtatcgcccagagaggtgcttgtccagatttcacatgcacatgaattgcctggggatcttgtgaaactgcagactctgctccaagtaatctgggctgggcctgagattctgcatttctaaggagtctcagggatgcctatgctgctggcctaaaaccacactcagaaacgaggacctagaagatccctaaaacagaataagaacaaatgtgattgtatttctgattctccctctcttcgaattatctgacttttttgtttttgtgcacatagtaatcatatcaccgctgcataacaacacagtgcatctttttaaaacaaggaaaagggaaaaaaaggagaaaaaacgatgcatcaagcttgtttgtcaaataccacagtattttattcattgttatcttgccaatggaaataaagtatgatattgcatttaaatattatatttatacctcatgtatatttttacctcaattgttgatatcaatcatcaattgtaaataaataattgccaaggcaaataaattt

SEQ ID NO: 4010 - DNA, 5882 bp, Homo sapiens
  source 1..5882: mol_type = genomic DNA
aaaaatcgctgggtctgttgagctgtcctgggctgggtgccttgctctttgactgagactggagacagacggcaacagccacaggcagactgaggtggcaataggaaatctgccgagatgttcagtcaggtgcccaggaccccagcctcaggctgctactacctaaattccatgacacctgagggccaggagatgtacttgcgatttgatcagactacaagacgctctccttacaggatgagccggattctagcacgccatcagctagtgactaaaattcaacaagaaattgaggcaaaagaagcatgtgactggctccgtgctgccgggttcccgcaatacgctcagttatatgaggattcacaatttcccatcaacattgtggctgtcaagaatgatcatgattttcttgaaaaggaccttgtagaacctctttgcagacgactaaatacgttgaacaagtgtgcctcaatgaaacttgatgtgaacttccaaaggaaaaagggtgacgactccgatgaggaagatctttgtatcagcaacaaatggactttccaaagaaccagtcgcaggtggtctcgtgtggacgacctctacacgctgctccctcgaggagacagaaatgggtcaccgggaggcacggggatgaggaacacgaccagcagtgagagcgtcctcacagacctgagcgagcctgaggtctgctccattcacagcgaaagcagtggaggcagcgacagtcgcagccagccgggccagtgctgtacagacaacccggtcatgctggatgccccactcgtcagcagcagcctcccacagccccccagagatgtcctcaaccaccccttccaccccaagaatgagaagcccacgagggctagggccaaatcatttttgaaacgcatggaaacactccgagggaagggagcccacgggaggcataaggggtctgggcggacaggtggcctggtgatcagtgggcccatgttgcagcaggagccagagtcctttaaggctatgcagtgcatccaaataccaaatggagatctccagaattcgccgccacctgcctgcagaaaagggctcccatgctctggcaagtcgagtggcgagagcagcccgtcggagcacagcagcagcggggtgagcacgccctgcctgaaggaacgcaagtgccacgaggccaacaagcgcgggggcatgtacttggaggacctagatgtgctggcggggacagcactgccggatgcaggggaccaaagccgtatgcatgaatttcactcccaagagaatttggtggtgcatattcccaaggatcacaaaccaggaacattccccaaggcactttctattgaaagcctctctcccacagatagtagcaatggggttaattggaggaccggtagcatctccctgggcagagagcaggtccctggtgccagggagccccggctcatggcgtcctgccacagagccagccgagtcagtatctatgacaatgtccctggctcccatctgtatgccagcacaggagatcttttggacttggagaaagatgaccttttccctcacttggatgacattctgcagcatgtcaatgggctccaagaggtagtcgatgactggtccaaagatgtcttgcctgaactgcaaactcatgatacattggttggggaacctggcttatccacctttccatctcctaatcagatcaccttagattttgaaggtaactctgtctcagaaggtcggacgacacccagtgatgtggaaagagatgtaacatctcttaatgaatctgagcctcctggggtcagagacaggagggattctggtgtaggggcctctctgaccaggccaaacaggcgactccgatggaacagtttccagctgtcgcaccagccccggccggccccagcatcgccccacatcagcagccagacggccagccagctgagcctgctccagcgcttctcactgctccgcctcacggccatcatggagaagcactccatgtccaacaagcacggctggacatggtcagttccaaagttcatgaagaggatgaaagttcccgactacaaagacaaggctgtctttggcgttcctctcatagtccacgtccaaagaacgggacagcccctgcctcaaagtattcagcaagcactgagatatctacgcagcaactgcctcgatcaggtgggtctttttcgcaaatcaggagtgaagtctcgaatccatgcccttcgccaaatgaatgaaaacttccctgagaacgtcaactatgaagaccagtctgcttatgatgtggcggatatggtgaaacagttcttccgggacctccctgagcctcttttcaccaacaagctcagtgagacctttctccatatctatcagtatgtctccaaagagcagcggctgcaggccgtgcaggctgccatcctgctactggccgatgagaacagggaggtcctgcagacgctcttgtgtttcctgaacgacgtcgtcaacttggtggaagagaatcagatgacgcccatgaacctggcagtgtgtctggccccctccctctttcatcttaatttattgaagaaagaaagctctccacgagtcatacagaagaaatatgccactgggaagccagatcaaaaggacctcaacgagaatctggcagcagctcaggggctagcgcacatgatcatggaatgcgacagactttttgaggttccacacgagttggtggcccagtctcgtaactcgtatgtggaggctgagatccacgtgccaaccctggaagaattggggacacagctggaggagagtggggcaactttccacacttacctgaaccatctcatccagggcctccagaaagaagccaaggagaagttcaaaggatgggtcacgtgctccagcacggacaatacagatcttgctttcaaaaaggtgggcgacgggaacccgctgaagctgtggaaggcttctgtggaggtggaagcacccccctcagtggtcctgaaccgcgtgctgagagagcgccacctgtgggacgaggactttgtgcagtggaaggttgtggaaactctagacaggcaaacagagatctaccagtatgtgctgaacagcatggctccccatccttccagagactttgtggttctcaggacctggaaaactgatttgcccaaaggaatgtgtaccctggtgtccctctccgtggagcatgaggaagcccagctcctgggtggtgtgcgagcagtggtgatggactcgcagtacttgatagaaccgtgtggctctggcaagtcaagactgactcacatctgcaggatagacctgaaaggtcactccccagaatggtacagcaaaggctttggacatctgtgtgcagcagaagttgccaggattagaaactctttccagcccctcattgctgagggcccagaaactaaaatctgagttttgcccagtgtgacatcaaactcagggaagaggaagctaaagtgacgagtgtggcagagagtgtgcatgtgagaaagcgagagaaagaggaactgaaggacgcggttaatgcctaaaaatggaaacgttaagaagttggaatgttggagatgcaagaatttccaagaactttcttagccttcctggagatggctacatccctactaatataattttaaaatgagaactttatatatattacttaaaattaaatggactattccttgtgcattgcctaatttgctatttaaaggcttctaagaagcgtatacctaactgtaaataaatgtatgtatagcatatgtacatatgtgtgtatatctccatctttactgtatatatgtaaaataccaattttatatagaattgtgtgttttgaaaatgacggtgtctgactcagtgagtcccttcctcacacagttctttccaagtggctctgggccccatctctccactgtcctgtaagctgtgcagaacctgctgctaacaccaaggtgtgaacatgccctgatgcctaaccaaagatgagttaaccaaaggaaaataacattaaaggagacttatgtgttaacgctttgtttctgctattcaaaaactgagagtggagatctgggataaagcaaggaaataataattactcctccttaaagcaaatgggggggtgagaagtcattaccaaatttaaagctagatgaggagttgccactgggcccagtaagatggaatttcagtgagatatggaccaccggagtcagcgagagtgactgaaacagaagcgatacctctcgctcccatgcccatcactacagaccccaagtcaagatgaatatcatagcctttacttcttcacagccaaagggagcccctgtgttgtctcaagtttttataaatacatttcataatgttattaaatgtcattctatttgaccagtggcctatttggtcacagttaattggtgttttcttattgcactgaattcaactccagacaccatacaaagggagatgatggccattccgttcaaatcctagatcgttacagcttcagggaattcatattttgttatgtgtaggatactcttaaaatgtaattcattaaacttttacaatctgaaagacagggtttttaactaacatgagaccaaaactatgttctttgattagttttagatagtataatcgggtttattaattcttctgtgtttcttcactagccagtccaagctacctatgcatttgacccaaccttatttattattgtacagatgaagcgaattgactccctttagccaactgctaatggatcgaatgtgctttttattgtaattcaacagctatagagagaaagataacttattgtgtgtttgatttcagggagagagattttctttggtcatccataatagagattgataagatttagcaactggtgttggagaaaaaaagaaaagcaaatgagtgttttcaggtttttttgcattatatgcatttatgtaatgtttctgttatcagcaatgtgcaattattttattgagaggaataaaaaagctttctatgagtttggtatggtgcgaggaaaatcttacagtttgaattatgacctagaaatttttcattcccatatctacctaagaaggaagcagtaaatccataatttaccttttgggcaatgctttgtgagcaaaacaaagtcacttctgccataacatcttgaatttaaccatatatgccagattactttatatgcatcaacaagatcaccagtgaagtttaatctagctaaacactggtcctgctcctgagatgggatcctatgtgtttggaaaacgtgataggcacacgaggatgagtggctttgtatcgcccagagaggtgcttgtccagatttcacatgcacatgaattgcctggggatcttgtgaaactgcagactctgctccaagtaatctgggctgggcctgagattctgcatttctaaggagtctcagggatgcctatgctgctggcctaaaaccacactcagaaacgaggacctagaagatccctaaaacagaataagaacaaatgtgattgtatttctgattctccctctcttcgaattatctgacttttttgtttttgtgcacatagtaatcatatcaccgctgcataacaacacagtgcatctttttaaaacaaggaaaagggaaaaaaaggagaaaaaacgatgcatcaagcttgtttgtcaaataccacagtattttattcattgttatcttgccaatggaaataaagtatgatattgcatttaaatattatatttatacctcatgtatatttttacctcaattgttgatatcaatcatcaattgtaaataaataattgccaaggcaaataaattt

SEQ ID NO: 4011 - DNA, 2118 bp, Homo sapiens
  source 1..2118: mol_type = genomic DNA
cggaaacatgagagaggactatcatctgctccttgctctgaatttctttgaacctccatgctggaaccctcctcagttctccatgcaaacgttaaccaggcccctttgtggtgcttggtgctgcgctggtgcagagaatgcaaagacactgtctgtggtgggaaacagaaaagcagagtgaaccacacattccagcgccgggaaattgaggcaaaagaagcatgtgactggctccgtgctgccgggttcccgcaatacgctcagttatatgaggattcacaatttcccatcaacattgtggctgtcaagaatgatcatgattttcttgaaaaggaccttgtagaacctctttgcagacgactaaatacgttgaacaagtgtgcctcaatgaaacttgatgtgaacttccaaaggaaaaagggtgacgactccgatgaggaagatctttgtatcagcaacaaatggactttccaaagaaccagtcgcaggtggtctcgtgtggacgacctctacacgctgctccctcgaggagacagaaatgggtcaccgggaggcacggggatgaggaacacgaccagcagtgagagcgtcctcacagacctgagcgagcctgaggtctgctccattcacagcgaaagcagtggaggcagcgacagtcgcagccagccgggccagtgctgtacagacaacccggtcatgctggatgccccactcgtcagcagcagcctcccacagccccccagagatgtcctcaaccaccccttccaccccaagaatgagaagcccacgagggctagggccaaatcatttttgaaacgcatggaaacactccgagggaagggagcccacgggaggcataaggggtctgggcggacaggtggcctggtgatcagtgggcccatgttgcagcaggagccagagtcctttaaggctatgcagtgcatccaaataccaaatggagatctccagaattcgccgccacctgcctgcagaaaagggctcccatgctctggcaagtcgagtggcgagagcagcccgtcggagcacagcagcagcggggtgagcacgccctgcctgaaggaacgcaagtgccacgaggccaacaagcgcgggggcatgtacttggaggacctagatgtgctggcggggacagcactgccggatgcaggggaccaaagccgtatgcatgaatttcactcccaagagaatttggtggtgcatattcccaaggatcacaaaccaggaacattccccaaggcactttctattgaaagcctctctcccacagatagtagcaatggggttaattggaggaccggtagcatctccctgggcagagagcaggtccctggtgccagggagccccggctcatggcgtcctgccacagagccagccgagtcagtatctatgacaatgtccctggctcccatctgtatgccagcacaggagatcttttggacttggagaaagatgaccttttccctcacttggatgacattctgcagcatgtcaatgggctccaagaggtagtcgatgactggtccaaagatgtcttgcctgaactgcaaactcatgatacattggttggggaacctggcttatccacctttccatctcctaatcagatcaccttagattttgaaggtaactctgtctcagaaggtcggacgacacccagtgatgtggaaagagatgtaacatctcttaatgaatctgagcctcctggggtcagagacaggagggattctggtgtaggggcctctctgaccaggccaaacaggcgactccgatggaacagtttccagctgtcgcaccagccccggccggccccagcatcgccccacatcagcagccagacggccagccagctgagcctgctccagcgcttctcactgctccgcctcacggccatcatggagaagcactccatgtccaacaagcacggctggacatggtcagttccaaagttcatgaagaggatgaaagttcccgactacaaagacaaggctgtctttggcgttcctctcatagtccacgtccaaagaacgggacagcccctgcctcaaagtattcagcaagcactgagatatctacgcagcaactgcctcgatcaggaa

SEQ ID NO: 4012 - DNA, 5784 bp, Homo sapiens
  source 1..5784: mol_type = genomic DNA
ctcacagacaacagccaagcacagaggaaatattagctggcagagataacgaagagaaaacactcggtgacagatgcaccatctgtcagtttctgaggagcagttttcaagaaagctgaaaatgaattgaagaagagaggggttttgtttgaaaggtacagcacagcctaaggacaattttaaacaaaaaattgaggcaaaagaagcatgtgactggctccgtgctgccgggttcccgcaatacgctcagttatatgaggattcacaatttcccatcaacattgtggctgtcaagaatgatcatgattttcttgaaaaggaccttgtagaacctctttgcagacgactaaatacgttgaacaagtgtgcctcaatgaaacttgatgtgaacttccaaaggaaaaagggtgacgactccgatgaggaagatctttgtatcagcaacaaatggactttccaaagaaccagtcgcaggtggtctcgtgtggacgacctctacacgctgctccctcgaggagacagaaatgggtcaccgggaggcacggggatgaggaacacgaccagcagtgagagcgtcctcacagacctgagcgagcctgaggtctgctccattcacagcgaaagcagtggaggcagcgacagtcgcagccagccgggccagtgctgtacagacaacccggtcatgctggatgccccactcgtcagcagcagcctcccacagccccccagagatgtcctcaaccaccccttccaccccaagaatgagaagcccacgagggctagggccaaatcatttttgaaacgcatggaaacactccgagggaagggagcccacgggaggcataaggggtctgggcggacaggtggcctggtgatcagtgggcccatgttgcagcaggagccagagtcctttaaggctatgcagtgcatccaaataccaaatggagatctccagaattcgccgccacctgcctgcagaaaagggctcccatgctctggcaagtcgagtggcgagagcagcccgtcggagcacagcagcagcggggtgagcacgccctgcctgaaggaacgcaagtgccacgaggccaacaagcgcgggggcatgtacttggaggacctagatgtgctggcggggacagcactgccggatgcaggggaccaaagccgtatgcatgaatttcactcccaagagaatttggtggtgcatattcccaaggatcacaaaccaggaacattccccaaggcactttctattgaaagcctctctcccacagatagtagcaatggggttaattggaggaccggtagcatctccctgggcagagagcaggtccctggtgccagggagccccggctcatggcgtcctgccacagagccagccgagtcagtatctatgacaatgtccctggctcccatctgtatgccagcacaggagatcttttggacttggagaaagatgaccttttccctcacttggatgacattctgcagcatgtcaatgggctccaagaggtagtcgatgactggtccaaagatgtcttgcctgaactgcaaactcatgatacattggttggggaacctggcttatccacctttccatctcctaatcagatcaccttagattttgaaggtaactctgtctcagaaggtcggacgacacccagtgatgtggaaagagatgtaacatctcttaatgaatctgagcctcctggggtcagagacaggagggattctggtgtaggggcctctctgaccaggccaaacaggcgactccgatggaacagtttccagctgtcgcaccagccccggccggccccagcatcgccccacatcagcagccagacggccagccagctgagcctgctccagcgcttctcactgctccgcctcacggccatcatggagaagcactccatgtccaacaagcacggctggacatggtcagttccaaagttcatgaagaggatgaaagttcccgactacaaagacaaggctgtctttggcgttcctctcatagtccacgtccaaagaacgggacagcccctgcctcaaagtattcagcaagcactgagatatctacgcagcaactgcctcgatcaggtgggtctttttcgcaaatcaggagtgaagtctcgaatccatgcccttcgccaaatgaatgaaaacttccctgagaacgtcaactatgaagaccagtctgcttatgatgtggcggatatggtgaaacagttcttccgggacctccctgagcctcttttcaccaacaagctcagtgagacctttctccatatctatcagtatgtctccaaagagcagcggctgcaggccgtgcaggctgccatcctgctactggccgatgagaacagggaggtcctgcagacgctcttgtgtttcctgaacgacgtcgtcaacttggtggaagagaatcagatgacgcccatgaacctggcagtgtgtctggccccctccctctttcatcttaatttattgaagaaagaaagctctccacgagtcatacagaagaaatatgccactgggaagccagatcaaaaggacctcaacgagaatctggcagcagctcaggggctagcgcacatgatcatggaatgcgacagactttttgaggttccacacgagttggtggcccagtctcgtaactcgtatgtggaggctgagatccacgtgccaaccctggaagaattggggacacagctggaggagagtggggcaactttccacacttacctgaaccatctcatccagggcctccagaaagaagccaaggagaagttcaaaggatgggtcacgtgctccagcacggacaatacagatcttgctttcaaaaaggtgggcgacgggaacccgctgaagctgtggaaggcttctgtggaggtggaagcacccccctcagtggtcctgaaccgcgtgctgagagagcgccacctgtgggacgaggactttgtgcagtggaaggttgtggaaactctagacaggcaaacagagatctaccagtatgtgctgaacagcatggctccccatccttccagagactttgtggttctcaggacctggaaaactgatttgcccaaaggaatgtgtaccctggtgtccctctccgtggagcatgaggaagcccagctcctgggtggtgtgcgagcagtggtgatggactcgcagtacttgatagaaccgtgtggctctggcaagtcaagactgactcacatctgcaggatagacctgaaaggtcactccccagaatggtacagcaaaggctttggacatctgtgtgcagcagaagttgccaggattagaaactctttccagcccctcattgctgagggcccagaaactaaaatctgagttttgcccagtgtgacatcaaactcagggaagaggaagctaaagtgacgagtgtggcagagagtgtgcatgtgagaaagcgagagaaagaggaactgaaggacgcggttaatgcctaaaaatggaaacgttaagaagttggaatgttggagatgcaagaatttccaagaactttcttagccttcctggagatggctacatccctactaatataattttaaaatgagaactttatatatattacttaaaattaaatggactattccttgtgcattgcctaatttgctatttaaaggcttctaagaagcgtatacctaactgtaaataaatgtatgtatagcatatgtacatatgtgtgtatatctccatctttactgtatatatgtaaaataccaattttatatagaattgtgtgttttgaaaatgacggtgtctgactcagtgagtcccttcctcacacagttctttccaagtggctctgggccccatctctccactgtcctgtaagctgtgcagaacctgctgctaacaccaaggtgtgaacatgccctgatgcctaaccaaagatgagttaaccaaaggaaaataacattaaaggagacttatgtgttaacgctttgtttctgctattcaaaaactgagagtggagatctgggataaagcaaggaaataataattactcctccttaaagcaaatgggggggtgagaagtcattaccaaatttaaagctagatgaggagttgccactgggcccagtaagatggaatttcagtgagatatggaccaccggagtcagcgagagtgactgaaacagaagcgatacctctcgctcccatgcccatcactacagaccccaagtcaagatgaatatcatagcctttacttcttcacagccaaagggagcccctgtgttgtctcaagtttttataaatacatttcataatgttattaaatgtcattctatttgaccagtggcctatttggtcacagttaattggtgttttcttattgcactgaattcaactccagacaccatacaaagggagatgatggccattccgttcaaatcctagatcgttacagcttcagggaattcatattttgttatgtgtaggatactcttaaaatgtaattcattaaacttttacaatctgaaagacagggtttttaactaacatgagaccaaaactatgttctttgattagttttagatagtataatcgggtttattaattcttctgtgtttcttcactagccagtccaagctacctatgcatttgacccaaccttatttattattgtacagatgaagcgaattgactccctttagccaactgctaatggatcgaatgtgctttttattgtaattcaacagctatagagagaaagataacttattgtgtgtttgatttcagggagagagattttctttggtcatccataatagagattgataagatttagcaactggtgttggagaaaaaaagaaaagcaaatgagtgttttcaggtttttttgcattatatgcatttatgtaatgtttctgttatcagcaatgtgcaattattttattgagaggaataaaaaagctttctatgagtttggtatggtgcgaggaaaatcttacagtttgaattatgacctagaaatttttcattcccatatctacctaagaaggaagcagtaaatccataatttaccttttgggcaatgctttgtgagcaaaacaaagtcacttctgccataacatcttgaatttaaccatatatgccagattactttatatgcatcaacaagatcaccagtgaagtttaatctagctaaacactggtcctgctcctgagatgggatcctatgtgtttggaaaacgtgataggcacacgaggatgagtggctttgtatcgcccagagaggtgcttgtccagatttcacatgcacatgaattgcctggggatcttgtgaaactgcagactctgctccaagtaatctgggctgggcctgagattctgcatttctaaggagtctcagggatgcctatgctgctggcctaaaaccacactcagaaacgaggacctagaagatccctaaaacagaataagaacaaatgtgattgtatttctgattctccctctcttcgaattatctgacttttttgtttttgtgcacatagtaatcatatcaccgctgcataacaacacagtgcatctttttaaaacaaggaaaagggaaaaaaaggagaaaaaacgatgcatcaagcttgtttgtcaaataccacagtattttattcattgttatcttgccaatggaaataaagtatgatattgcatttaaatattatatttatacctcatgtatatttttacctcaattgttgatatcaatcatcaattgtaaataaataattgccaaggcaaataaattt

SEQ ID NO: 4013 - DNA, 1137 bp, Homo sapiens
  source 1..1137: mol_type = genomic DNA
cgccggtgtcggtgtagggtgccgggggcagggggccctgcaggggcgtggagtggcattgtgctgtcacaggggctcgggcgtcttaggcacccatgtgggtggcgcactagaaggggcactgctctgtccgagtgctgcccttggggcgaggcgggcatgtggctctacaaggtggagtccaggcggccaaagtttggaaaggactttccttatcccagttgattgtgcagaatacactgcctgtcgcttgtcttctattcaccatggcttcttctgatatccaggtgaaagaactggagaagcgtgcctcaggccaggcttttgagctgattctcagccctcggtcaaaagaatctgttccagaattccccctttcccctccaaagaagaaggatctttccctggaggaaattcagaagaaattagaagctgcagaagaaagacgcaagtcccatgaagctgaggtcttgaagcagctggctgagaaacgagagcacgagaaagaagtgcttcagaaggcaatagaagagaacaacaacttcagtaaaatggcagaagagaaactgacccacaaaatggaagctaataaagagaaccgagaggcacaaatggctgccaaactggaacgtttgcgagagaaggataagcacattgaagaagtgcggaagaacaaagaatccaaagaccctgctgacgagactgaagctgactaatttgttctgagaactgactttctccccatccccttcctaaatatccaaagactgtactggccagtgtcattttattttttccctcctgacaaatattttagaagctaatgtaggactgtataggtagatccagatccagactgtaagatgttgttttaggggctaaaggggagaaactgaaagtgttttactctttttctaaagtgttggtctttctaatgtagctatttttcttgttgcatcttttctacttcagtacacttggtgtactgggttaatggctagtactgtattggctctgtgaaaacatatttgtgaaaagagtatgtagtggcttcttttgaactgttagatgctgaatatctgttcacttttcaatcccaattctgtcccaatcttaccagatgctactggacttgaa

SEQ ID NO: 4014 - DNA, 867 bp, Homo sapiens
  source 1..867: mol_type = genomic DNA
gcacaatgagttgtaggcagtattaagatggctccgggggcactgttgagttgaatctggaatatcttcttacagtttcggactttccttatcccagttgattgtgcagaatacactgcctgtcgcttgtcttctattcaccatggcttcttctgatatccaggtgaaagaactggagaagcgtgcctcaggccaggcttttgagctgattctcagccctcggtcaaaagaatctgttccagaattccccctttcccctccaaagaagaaggatctttccctggaggaaattcagaagaaattagaagctgcagaagaaagacgcaagtcccatgaagctgaggtcttgaagcagctggctgagaaacgagagcacgagaaagaagtgcttcagaaggcaatagaagagaacaacaacttcagtaaaatggcagaagagaaactgacccacaaaatggaagctaataaagagaaccgagaggcacaaatggctgccaaactggaacgtttgcgagagaaggataagcacattgaagaagtgcggaagaacaaagaatccaaagaccctgctgacgagactgaagctgactaatttgttctgagaactgactttctccccatccccttcctaaatatccaaagactgtactggccagtgtcattttattttttccctcctgacaaatattttagaagctaatgtaggactgtataggtagatccagatccagactgtaagatgttgttttaggggctaaaggggagaaactgaaagtgttttactctttttctaaagtgttggtctttctaatgtagctatttttcttgttgcatcttttctacttcagtacacttggtgtactgggt

SEQ ID NO: 4015 - DNA, 1712 bp, Homo sapiens
  source 1..1712: mol_type = genomic DNA
atcaccgggcgtccgctccggggtgccgtcgaggagacaatagggggcgtgggccctcgtttacctccctccctccctcccttccctgcgggccccgccgggttccccattgtctgaagggacggggcggtgccccagggaccagcggctttaggaccaaactgcgggcagccagggccgcgaccctccctgcgaccgtcccctggcgaccgcagctggtgattgaggggcggcgctcccgggccccacgagggttcttctgtcttcgcggccggacgcgcggacagcgtgggtggcggcaggactttccttatcccagttgattgtgcagaatacactgcctgtcgcttgtcttctattcaccatggcttcttctgatatccaggtgaaagaactggagaagcgtgcctcaggccaggcttttgagctgattctcagccctcggtcaaaagaatctgttccagaattccccctttcccctccaaagaagaaggatctttccctggaggaaattcagaagaaattagaagctgcagaagaaagacgcaagtcccatgaagctgaggtcttgaagcagctggctgagaaacgagagcacgagaaagaagtgcttcagaaggcaatagaagagaacaacaacttcagtaaaatggcagaagagaaactgacccacaaaatggaagctaataaagagaaccgagaggcacaaatggctgccaaactggaacgtttgcgagagaaggataagcacattgaagaagtgcggaagaacaaagaatccaaagaccctgctgacgagactgaagctgactaatttgttctgagaactgactttctccccatccccttcctaaatatccaaagactgtactggccagtgtcattttattttttccctcctgacaaatattttagaagctaatgtaggactgtataggtagatccagatccagactgtaagatgttgttttaggggctaaaggggagaaactgaaagtgttttactctttttctaaagtgttggtctttctaatgtagctatttttcttgttgcatcttttctacttcagtacacttggtgtactgggttaatggctagtactgtattggctctgtgaaaacatatttgtgaaaagagtatgtagtggcttcttttgaactgttagatgctgaatatctgttcacttttcaatcccaattctgtcccaatcttaccagatgctactggacttgaatggttaataaaactgcacagtgctgttggtggcagtgacttcttttgagttaggttaataaatcaagccatagagcccctcctggttgatacttgttccagatggggcctttggggctggtagaaatacccaacgcacaaatgaccgcacgttctctgccccgtttcttgccccagtgtggtttgcattgtctccttccacaatgactgctttgtttggatgcctcagcccaggtcagctgttactttctttcagatgtttatttgcaaacaaccattttttgttctgtgtcccttttaaaaggcagattaaaagcacaagcgtgtttctagagaacagttgagagagaatctcaagattctacttggtggtttgcttgctctacgttacaggtggggcatgtcctcatcctttcctgccataaaagctatgacacgagaatcagaatattaataaaactttatgtactgctgtagc

SEQ ID NO: 4016 - DNA, 948 bp, Homo sapiens
  source 1..948: mol_type = genomic DNA
gtgcctctgtttggcgcttttgtgcgcgcccgggtctgttggtgctcagagtgtggtcaggcggctcggactgagcaggactttccttatcccagttgattgtgcagaatacactgcctgtcgcttgtcttctattcaccatggcttcttctgatatccaggtgaaagaactggagaagcgtgcctcaggccaggcttttgagctgattctcagccctcggtcaaaagaatctgttccagaattccccctttcccctccaaagaagaaggatctttccctggaggaaattcagaagaaattagaagctgcagaagaaagacgcaagtcccatgaagctgaggtcttgaagcagctggctgagaaacgagagcacgagaaagaagtgcttcagaaggcaatagaagagaacaacaacttcagtaaaatggcagaagagaaactgacccacaaaatggaagctaataaagagaaccgagaggcacaaatggctgccaaactggaacgtttgcgagagaagatgtacttctggactcacgggcctggggcccacccagcacagatctctgctgagcaatcttgtctccactctgttcctgccctttgcccagccctgggcctccaatctgcattgattacctggtctgatctctctcaccatcactaggtacttaataaatatttgctgttgatgatagcaatgaccttgagactgatgaacagtctggccaagaggatccttgatgtggaagatagaaaaagcctttggggtcaggcagacttggattctaataccagccagttctgcttgctgtgtctgagcctcagtttactcatctgtgaagaggaggtagcaagaatgaaaatgcctgccttgtggtttgttgtaaggacagacactgccaacgtagagggcccagcagctcacagaccagttgctctgagagcag

SEQ ID NO: 4017 - DNA, 665 bp, Homo sapiens
  source 1..665: mol_type = genomic DNA
ggccacgcccatcctgggtccggtgctgcgtctaattctctgcttttcttaaatcttgtcgctgcctctgattttaattcctagcttttgggaacctgtcatcctacgtttttggtactagctggcgtctacaaaagtcataatgttaaaaagatcaacaagagatacagcatttttcatgacataacggcagcaaatataagtcaaaatctagaggttcataaacattttgcttgctgttgggcaaggaagcttaaacctgagggacaataggagttcaacattattggttactattagcttgggcgttttcttatccaccacgtcagacacagacaaagcaggggactttccttatcccagttgattgtgcagaatacactgcctgtcgcttgtcttctattcaccatggcttcttctgatatccaggtgaaagaactggagaagcgtgcctcaggccaggcttttgagctgattctcagccctcggtcaaaagaatctgttccagaattccccctttcccctccaaagaagaaggatctttccctggaggaaattcagaagaaattagaagctgcagaagaaagacgcaagtcccatgaagctgaggtcttgaagcagctggctgagaaacgagagcacgagaaagaagtgcttcagaaggc

SEQ ID NO: 4018 - DNA, 1504 bp, Homo sapiens
  source 1..1504: mol_type = genomic DNA
gtgcctctgtttggcgcttttgtgcgcgcccgggtctgttggtgctcagagtgtggtcaggcggctcggactgagcaggactttccttatcccagttgattgtgcagaatacactgcctgtcgcttgtcttctattcaccatggcttcttctgatatccaggtgaaagaactggagaagcgtgcctcaggccaggcttttgagctgattctcagccctcggtcaaaagaatctgttccagaattccccctttcccctccaaagaagaaggatctttccctggaggaaattcagaagaaattagaagctgcagaagaaagacgcaagtcccatgaagctgaggtcttgaagcagctggctgagaaacgagagcacgagaaagaagtgcttcagaaggcaatagaagagaacaacaacttcagtaaaatggcagaagagaaactgacccacaaaatggaagctaataaagagaaccgagaggcacaaatggctgccaaactggaacgtttgcgagagaaggataagcacattgaagaagtgcggaagaacaaagaatccaaagaccctgctgacgagactgaagctgactaatttgttctgagaactgactttctccccatccccttcctaaatatccaaagactgtactggccagtgtcattttattttttccctcctgacaaatattttagaagctaatgtaggactgtataggtagatccagatccagactgtaagatgttgttttaggggctaaaggggagaaactgaaagtgttttactctttttctaaagtgttggtctttctaatgtagctatttttcttgttgcatcttttctacttcagtacacttggtgtactgggttaatggctagtactgtattggctctgtgaaaacatatttgtgaaaagagtatgtagtggcttcttttgaactgttagatgctgaatatctgttcacttttcaatcccaattctgtcccaatcttaccagatgctactggacttgaatggttaataaaactgcacagtgctgttggtggcagtgacttcttttgagttaggttaataaatcaagccatagagcccctcctggttgatacttgttccagatggggcctttggggctggtagaaatacccaacgcacaaatgaccgcacgttctctgccccgtttcttgccccagtgtggtttgcattgtctccttccacaatgactgctttgtttggatgcctcagcccaggtcagctgttactttctttcagatgtttatttgcaaacaaccattttttgttctgtgtcccttttaaaaggcagattaaaagcacaagcgtgtttctagagaacagttgagagagaatctcaagattctacttggtggtttgcttgctctacgttacaggtggggcatgtcctcatcctttcctgccataaaagctatgacacgagaatcagaatattaataaaactttatgtactgctgtagcaactcctgtgaaatga

SEQ ID NO: 4019 - DNA, 7673 bp, Homo sapiens
  source 1..7673: mol_type = genomic DNA
gcggcggcggcgccccagacccgaggggacgcgcgggccttgcgccgcgggagcggacggcggcggaggagaccctaggctcgcggcccgaggcgggagggctcggcttctcgactgcccgcctccgaggccgccggccgcttctctctcccagagtggccgccgcccctggagactcgccgtgacacgggcctaagccgccgccgcgggagtcctgaccgctcggacccgtcggatcaggccgggtgggagcgagcttgcgggcaggtgccgctcccggagggtgggccggaggcgaggcgcccaccgcgcggctcgcgggccgggctcggcggaggggccgctcgcgcagcacccccaccgcgggccggagcccgggtcgccgccccgccttctcccgggaccgcccggccggagctgcgggggccgagggacgccgcgcccgccgccgccagccgggctcgcgcgggagagcagggaagagaaactttgccttttattgtttttagtccttaagtgcaaggaactctgtgttgggaggaaaaatgtccttcttcaatttccgtaagatcttcaagttggggagcgagaagaagaagaagcagtacgaacacgtgaagagggacctgaaccccgaagacttttgggagattataggagaactgggcgacggagcctttgggaaagtgtacaaggcccagaataaagagaccagtgttttagctgctgcaaaagtgattgacactaaatctgaagaagaacttgaagattacatggtagagattgacatattagcatcttgtgatcacccaaatatagtcaagcttctagatgccttctattatgagaacaatctttggatcctcattgaattttgtgcaggtggagcagtagatgctgtgatgcttgaacttgagagaccattaactgagtcccaaatacaagtagtttgcaagcagactttagatgcattgaactacttacatgataataagatcatccacagagatctgaaggctggcaacattctctttaccttagatggagatatcaaattggcggattttggagtatcagctaaaaacacgaggacaattcaaagaagagattcctttattggtacaccatattggatggctcctgaagtagtcatgtgtgaaacatctaaggacagaccctatgactacaaagctgatgtttggtccctgggtatcactttaatagaaatggctgagatagaaccacctcatcatgaattaaatccaatgcgagtgctgctaaaaatagcaaaatctgagccacctacattagcacagccatccagatggtcttcaaattttaaggactttctaaagaaatgcttagaaaagaatgtggatgccaggtggactacatctcagctgctgcagcatccctttgttactgttgattccaacaaacccatccgagaattgattgcagaggcgaaggctgaagtaacagaagaagttgaagatggcaaagaggaagatgaagaggaggaaacagaaaattctctgccaatacctgcaagtaagcgtgcatcttctgaccttagtatcgccagctctgaagaagataaactttcacaaaatgcttgtattttggagtctgtctcagaaaaaacagaacgtagtaactctgaagataaactcaacagcaaaattcttaatgaaaaacccaccactgatgaacctgaaaaggctgtggaggatattaatgaacatattaccgatgctcagttagaagcaatgactgaactccatgacagaacagcagtaatcaaggagaatgaaagagagaagaggcccaagcttgaaaatctgcctgacacagaagaccaagaaactgtggacattaattcagtcagtgaaggaaaagagaataatataatgataaccttagaaacaaatattgaacataatctaaaatctgaggaagaaaaggatcaggaaaagcaacagatgtttgaaaataagcttataaaatctgaagaaattaaagatactattttgcaaacagtagatttagtttctcaagagactggagaaaaagaggcaaatattcaggcagttgatagtgaagttgggcttacaaaggaagacacccaagagaaattgggggaagacgacaaaactcaaaaagatgtgatcagcaatacaagtgatgtgataggaacatgtgaggcagcagatgtggctcagaaagtggatgaagacagtgctgaggatacgcagagtaatgatgggaaagaagtggtcgaagtaggccagaaattaattaataagcccatggtgggtcctgaggctggtggtactaaggaagttcctattaaagaaatagttgaaatgaatgaaatagaagaaggtaaaaataaggaacaagcaataaacagttcagagaacataatggacatcaatgaggaaccaggaacaactgaaggtgaagaaatcactgagtcaagtagcactgaagaaatggaggtcagaagtgtggtggctgatactgaccaaaaggctttaggaagtgaagttcaggatgcttctaaagtcactactcagatagataaagagaaaaaagaaattccagtgtcaattaaaaaagagcctgaagttactgtagtttcacagcccactgaacctcagcctgttctaatacccagtattaatatcaactctgacagtggagaaaataaagaagaaataggttctttatcaaaaactgaaactattctgccaccagaatctgagaatccaaaggaaaatgataatgattcaggcactggttccactgctgatactagcagtattgacttgaatttatccatctctagctttctaagtaaaactaaagacagtggatcgatatctttacaagaaacaagaagacaaaagaaaacattgaagaaaacacgcaaatttattgttgatggtgtagaagtgagtgtaacaacatcaaagatagttacagatagtgattccaaaactgaagaattgcggtttcttagacgtcaggaacttcgggaattaagatttcttcagaaagaagagcaaagagcccaacaacagctcaatagcaaactacagcaacaacgagaacaaattttccggcgctttgagcaggaaatgatgagtaaaaagcgacaatatgaccaggaaattgagaatctagaaaaacagcagaaacagactatcgaacgcctggaacaagagcacacaaatcgcttgcgagatgaagccaaacgcatcaaaggagaacaagagaaagagttgtccaaatttcagaatatgctgaagaaccgaaagaaggaggaacaagagtttgttcagaaacaacagcaagaattagatggctctctgaaaaagatcatccagcagcagaaggcagagttagctaatattgagagagagtgcctgaataacaagcaacagctcatgagagctcgagaagctgcaatttgggagctcgaagaacgacacttacaagaaaaacaccagctgctcaaacagcagcttaaagatcagtatttcatgcaaagacatcagctacttaagcgccacgagaaggaaacagagcaaatgcagcgttacaatcaaagacttattgaggaattgaaaaacagacagactcaagaaagagcaagactgcccaagattcagcgcagtgaagccaagactcgaatggccatgtttaagaagagtttgagaattaactcaacagccacaccagatcaggaccgtgataaaattaaacagtttgctgcacaagaagaaaagaggcagaaaaatgagagaatggctcagcatcagaaacatgagaatcaaatgcgagatcttcagttgcagtgtgaagccaatgtccgcgaactgcatcagctgcagaatgaaaaatgccacttgttggttgagcatgagactcagaaactgaaggagttagatgaggaacatagccaagaattaaaggagtggagagagaaattgagacctaggaaaaagacactggaagaagagtttgccaggaaactacaggaacaggaagtattctttaaaatgactggggagtctgaatgccttaacccatcaacacagagccggatttccaaattttatcctattcccagcttgcattccaccggatcataacaaagggaagcattctgtgcgtgggtttggctctttcagtatgtcattctgttctcatcttctgccacagtctctcagatagctcatgaagacaatcacctgcctcaccttctaggtgttttccttttttgttttttttgttttgttttgtttttaagcaaagatgaagggaaaacgaactaagacagacgctaggccatgttggcaaagtagcatcttggtgactaaggtgactttgtatattcatcttaaaaattatgttctttagacactgctacctgaaaactgttggagaaataatgtttaaagttatttaagaaaaactgttacatcactaagtattaataaattcttcttacctgacgtaacttctcaatgcctaaattctgtagttgaagctctgctgcagagagttgggataattttcttttggtggatcagctctcataaaaaagctatgatttgctcaaatatgctgttgactcagtaaatgaatatatttttttctttaaataggaacaacctcttttaaaagagaaaaattatttcagtgatttgtcaaaacgaattacctcttttggcatgagctaataattgagggtgctaattttcttaagatagtgcctaaaacactaaatttcagtcaagtcgtaagtaggattttctttttgatcaacagggacaaaaacatctttagaattaaaaacatggttgttttggaatttttgcttctcttaccgtttgatagaaattttcatcctaaaatacatgtacaaagtttggaaagatgaaaaaaagaggtagcttttagattgcaaactggaaatgtaaaactcatgaaatttaagcaatataggtttagctatctgtgtttattttctaaaataatacctgagctggttaaatgatttctctccatcttagctaattctgtttaaaactctgtcagaggcctgcaggctgtgagttatatttataaatatatcttcagaaattaatcttaaaagaggcattagttcagaatacttttttaaaagtttaaattaaatatttaggcacgtcaggaattacttttccttattttgaaatgaggctacttatgtcttggttttattttgttccatgtttaaatcattcactttgatttgagtgggaaaagcctgaagcctttatcatgtggttgctggtgtgtgtaattattaatgaaatgttcactcctagtcccttatgaggcttagaatttcaaccacgtgtcaggtcagacagtattataaactgtactttgctgtctgagacagcacatttgtgaatgatgcttgctgcctgccattttcaacctattctctcttaagagtgctaggtaccaaattgtgaaagtttgttttcagttatattacttttgaggctggtgaaaaatttaaatgtaactttgtgggaacactgattcatatttagaaaatgtaaatgtctgtagcactttcttgcagttaatttgaaaactttggatgctgaaccttgtttgtcagtgatttagatgatttaaaaatgcatgtgtgatttgaattttataattgttttgacaagcataatttacttggacaacttcgtaggtagccttaacttctggccaagtttgttttttatataaatatatatacatatatacatattatgtatggttgtaaattcatacacttatcacatgaatgtgttactgtatacaaaactcttaatgctttattctcaaatgctgggttgaaaaatgttttgaaagccttttaaaatatatatctttataaagtaatattcaggatgatgataaaaattgtttatattgttatgataaaaatgacagtataatgttgcccagtgtatttaatgatttatttgaagagggattgggaaggaacgtcttcataccactttctcctttgaaattttcagtttattgacttttaaaaaatgaatacctcaggcagtagacattttttttctagtatcatttaattgataccctgtgcgctaaatagtgtgtggtgcctgattaatttggtctgaatatttgattctttctgttcctttcaacttgacattcagattattgactcaaggagagaggctcagagtggaatggttggcgctgtgggtaaggttggatctcccttaaaactgccttttggattcagtgtttgtgcttgagttcgctttcaaatatgaccataatcgtgtgggtgcaagactgtacagtgatacatatgtagaggtaaagcattcattttaatacttaaagttatataaatcttttcaaaaagtgttttgttataaaatacgctgtttgtacccataccagcccacctcttctgaggccctgtattcaaatagatgatagtgatctatctttcctgcatgaagtgtaggtggcgagtgggcgaggggcgcagacttctttgaaatcgaagggtacagtcaaatctactgctgatttggttgttttgttgctgtggcagaatatgccatgaaacacatacagacttctccgaacgtgcaccctcatcagccacctcctcccctctttccctgagtgctgtgaacacagcagacctgcacacttctgcagatccagctcctacagcttggggcactaggctgcctttcctagtcctgtcaacaaccatacagtgcgaattgctgaattagctgctattctatgtggagtcacattaagctttttcttatctttttctatggggaagctatagggtgggtaaggaaaaaatgttgaatgcttttactttgctgaaaatattagaactctcttgtgacaggatacagcaaattataattaaatataaattaccagaaccagagctacctctaagtcatacttcctcaagcacaaagctctcaggcatatgagacccaccttaatgaagggtctctgatttcttgagcatcagcgagtttcagaagtgactatttttttgtactcttctagtttccttgtaactatacactttttcccattccacactgtgcttaaatgacaaagactcttctgagaagccaaattctgtccaagtattaactagagatattgttgattaaagaaaatctagaactgaagtgaaagaagagagttccagttctaatagtcttttgattaacaattcttttctgagaaatgatttttataagaaatggggtgattctttaaatgcttttcttaagttgaaggcacaacagttaatggctgtattgttgctattccgttgctgacatgtttttgataaagctttaacattcctgctactaattttggcggagagtgtttgccaggtttcaatgtgggctgcagctttttgtgctccttctctggtttgcagtgtaatgagttcataagctaaattttcagaaagaattttgtttaagattatgcctcttatctacttgagagcaacatgtcttttcaatcatgggattgacacatgaaaaataaagttatttcttaatcaa

SEQ ID NO: 4020 - DNA, 7766 bp, Homo sapiens
  source 1..7766: mol_type = genomic DNA
gcggcggcggcgccccagacccgaggggacgcgcgggccttgcgccgcgggagcggacggcggcggaggagaccctaggctcgcggcccgaggcgggagggctcggcttctcgactgcccgcctccgaggccgccggccgcttctctctcccagagtggccgccgcccctggagactcgccgtgacacgggcctaagccgccgccgcgggagtcctgaccgctcggacccgtcggatcaggccgggtgggagcgagcttgcgggcaggtgccgctcccggagggtgggccggaggcgaggcgcccaccgcgcggctcgcgggccgggctcggcggaggggccgctcgcgcagcacccccaccgcgggccggagcccgggtcgccgccccgccttctcccgggaccgcccggccggagctgcgggggccgagggacgccgcgcccgccgccgccagccgggctcgcgcgggagagcagggaagagaaactttgccttttattgtttttagtccttaagtgcaaggaactctgtgttgggaggaaaaatgtccttcttcaatttccgtaagatcttcaagttggggagcgagaagaagaagaagcagtacgaacacgtgaagagggacctgaaccccgaagacttttgggagattataggagaactgggcgacggagcctttgggaaagtgtacaaggcccagaataaagagaccagtgttttagctgctgcaaaagtgattgacactaaatctgaagaagaacttgaagattacatggtagagattgacatattagcatcttgtgatcacccaaatatagtcaagcttctagatgccttctattatgagaacaatctttggatcctcattgaattttgtgcaggtggagcagtagatgctgtgatgcttgaacttgagagaccattaactgagtcccaaatacaagtagtttgcaagcagactttagatgcattgaactacttacatgataataagatcatccacagagatctgaaggctggcaacattctctttaccttagatggagatatcaaattggcggattttggagtatcagctaaaaacacgaggacaattcaaagaagagattcctttattggtacaccatattggatggctcctgaagtagtcatgtgtgaaacatctaaggacagaccctatgactacaaagctgatgtttggtccctgggtatcactttaatagaaatggctgagatagaaccacctcatcatgaattaaatccaatgcgagtgctgctaaaaatagcaaaatctgagccacctacattagcacagccatccagatggtcttcaaattttaaggactttctaaagaaatgcttagaaaagaatgtggatgccaggtggactacatctcagctgctgcagcatccctttgttactgttgattccaacaaacccatccgagaattgattgcagaggcgaaggctgaagtaacagaagaagttgaagatggcaaagaggaagatgaagaggaggaaacagaaaattctctgccaatacctgcaagtaagcgtgcatcttctgaccttagtatcgccagctctgaagaagataaactttcacaaaatgcttgtattttggagtctgtctcagaaaaaacagaacgtagtaactctgaagataaactcaacagcaaaattcttaatgaaaaacccaccactgatgaacctgaaaaggctgtggaggatattaatgaacatattaccgatgctcagttagaagcaatgactgaactccatgacagaacagcagtaatcaaggagaatgaaagagagaagaggcccaagcttgaaaatctgcctgacacagaagaccaagaaactgtggacattaattcagtcagtgaaggaaaagagaataatataatgataaccttagaaacaaatattgaacataatctaaaatctgaggaagaaaaggatcaggaaaagcaacagatgtttgaaaataagcttataaaatctgaagaaattaaagatactattttgcaaacagtagatttagtttctcaagagactggagaaaaagaggcaaatattcaggcagttgatagtgaagttgggcttacaaaggaagacacccaagagaaattgggggaagacgacaaaactcaaaaagatgtgatcagcaatacaagtgatgtgataggaacatgtgaggcagcagatgtggctcagaaagtggatgaagacagtgctgaggatacgcagagtaatgatgggaaagaagtggtcgaagtaggccagaaattaattaataagcccatggtgggtcctgaggctggtggtactaaggaagttcctattaaagaaatagttgaaatgaatgaaatagaagaaggtaaaaataaggaacaagcaataaacagttcagagaacataatggacatcaatgaggaaccaggaacaactgaaggtgaagaaatcactgagtcaagtagcactgaagaaatggaggtcagaagtgtggtggctgatactgaccaaaaggctttaggaagtgaagttcaggatgcttctaaagtcactactcagatagataaagagaaaaaagaaattccagtgtcaattaaaaaagagcctgaagttactgtagtttcacagcccactgaacctcagcctgttctaatacccagtattaatatcaactctgacagtggagaaaataaagaagaaataggttctttatcaaaaactgaaactattctgccaccagaatctgagaatccaaaggaaaatgataatgattcaggcactggttccactgctgatactagcagtattgacttgaatttatccatctctagctttctaagtaaaactaaagacagtggatcgatatctttacaagaaacaagaagacaaaagaaaacattgaagaaaacacgcaaatttattgttgatggtgtagaagtgagtgtaacaacatcaaagatagttacagatagtgattccaaaactgaagaattgcggtttcttagacgtcaggaacttcgggaattaagatttcttcagaaagaagagcaaagagcccaacaacagctcaatagcaaactacagcaacaacgagaacaaattttccggcgctttgagcaggaaatgatgagtaaaaagcgacaatatgaccaggaaattgagaatctagaaaaacagcagaaacagactatcgaacgcctggaacaagagcacacaaatcgcttgcgagatgaagccaaacgcatcaaaggagaacaagagaaagagttgtccaaatttcagaatatgctgaagaaccgaaagaaggaggttataaatgaagtggagaaagcacccaaagagctgagaaaagagctcatgaaacgcaggaaagaggagcttgcacaaagccagcatgctcaggaacaagagtttgttcagaaacaacagcaagaattagatggctctctgaaaaagatcatccagcagcagaaggcagagttagctaatattgagagagagtgcctgaataacaagcaacagctcatgagagctcgagaagctgcaatttgggagctcgaagaacgacacttacaagaaaaacaccagctgctcaaacagcagcttaaagatcagtatttcatgcaaagacatcagctacttaagcgccacgagaaggaaacagagcaaatgcagcgttacaatcaaagacttattgaggaattgaaaaacagacagactcaagaaagagcaagactgcccaagattcagcgcagtgaagccaagactcgaatggccatgtttaagaagagtttgagaattaactcaacagccacaccagatcaggaccgtgataaaattaaacagtttgctgcacaagaagaaaagaggcagaaaaatgagagaatggctcagcatcagaaacatgagaatcaaatgcgagatcttcagttgcagtgtgaagccaatgtccgcgaactgcatcagctgcagaatgaaaaatgccacttgttggttgagcatgagactcagaaactgaaggagttagatgaggaacatagccaagaattaaaggagtggagagagaaattgagacctaggaaaaagacactggaagaagagtttgccaggaaactacaggaacaggaagtattctttaaaatgactggggagtctgaatgccttaacccatcaacacagagccggatttccaaattttatcctattcccagcttgcattccaccggatcataacaaagggaagcattctgtgcgtgggtttggctctttcagtatgtcattctgttctcatcttctgccacagtctctcagatagctcatgaagacaatcacctgcctcaccttctaggtgttttccttttttgttttttttgttttgttttgtttttaagcaaagatgaagggaaaacgaactaagacagacgctaggccatgttggcaaagtagcatcttggtgactaaggtgactttgtatattcatcttaaaaattatgttctttagacactgctacctgaaaactgttggagaaataatgtttaaagttatttaagaaaaactgttacatcactaagtattaataaattcttcttacctgacgtaacttctcaatgcctaaattctgtagttgaagctctgctgcagagagttgggataattttcttttggtggatcagctctcataaaaaagctatgatttgctcaaatatgctgttgactcagtaaatgaatatatttttttctttaaataggaacaacctcttttaaaagagaaaaattatttcagtgatttgtcaaaacgaattacctcttttggcatgagctaataattgagggtgctaattttcttaagatagtgcctaaaacactaaatttcagtcaagtcgtaagtaggattttctttttgatcaacagggacaaaaacatctttagaattaaaaacatggttgttttggaatttttgcttctcttaccgtttgatagaaattttcatcctaaaatacatgtacaaagtttggaaagatgaaaaaaagaggtagcttttagattgcaaactggaaatgtaaaactcatgaaatttaagcaatataggtttagctatctgtgtttattttctaaaataatacctgagctggttaaatgatttctctccatcttagctaattctgtttaaaactctgtcagaggcctgcaggctgtgagttatatttataaatatatcttcagaaattaatcttaaaagaggcattagttcagaatacttttttaaaagtttaaattaaatatttaggcacgtcaggaattacttttccttattttgaaatgaggctacttatgtcttggttttattttgttccatgtttaaatcattcactttgatttgagtgggaaaagcctgaagcctttatcatgtggttgctggtgtgtgtaattattaatgaaatgttcactcctagtcccttatgaggcttagaatttcaaccacgtgtcaggtcagacagtattataaactgtactttgctgtctgagacagcacatttgtgaatgatgcttgctgcctgccattttcaacctattctctcttaagagtgctaggtaccaaattgtgaaagtttgttttcagttatattacttttgaggctggtgaaaaatttaaatgtaactttgtgggaacactgattcatatttagaaaatgtaaatgtctgtagcactttcttgcagttaatttgaaaactttggatgctgaaccttgtttgtcagtgatttagatgatttaaaaatgcatgtgtgatttgaattttataattgttttgacaagcataatttacttggacaacttcgtaggtagccttaacttctggccaagtttgttttttatataaatatatatacatatatacatattatgtatggttgtaaattcatacacttatcacatgaatgtgttactgtatacaaaactcttaatgctttattctcaaatgctgggttgaaaaatgttttgaaagccttttaaaatatatatctttataaagtaatattcaggatgatgataaaaattgtttatattgttatgataaaaatgacagtataatgttgcccagtgtatttaatgatttatttgaagagggattgggaaggaacgtcttcataccactttctcctttgaaattttcagtttattgacttttaaaaaatgaatacctcaggcagtagacattttttttctagtatcatttaattgataccctgtgcgctaaatagtgtgtggtgcctgattaatttggtctgaatatttgattctttctgttcctttcaacttgacattcagattattgactcaaggagagaggctcagagtggaatggttggcgctgtgggtaaggttggatctcccttaaaactgccttttggattcagtgtttgtgcttgagttcgctttcaaatatgaccataatcgtgtgggtgcaagactgtacagtgatacatatgtagaggtaaagcattcattttaatacttaaagttatataaatcttttcaaaaagtgttttgttataaaatacgctgtttgtacccataccagcccacctcttctgaggccctgtattcaaatagatgatagtgatctatctttcctgcatgaagtgtaggtggcgagtgggcgaggggcgcagacttctttgaaatcgaagggtacagtcaaatctactgctgatttggttgttttgttgctgtggcagaatatgccatgaaacacatacagacttctccgaacgtgcaccctcatcagccacctcctcccctctttccctgagtgctgtgaacacagcagacctgcacacttctgcagatccagctcctacagcttggggcactaggctgcctttcctagtcctgtcaacaaccatacagtgcgaattgctgaattagctgctattctatgtggagtcacattaagctttttcttatctttttctatggggaagctatagggtgggtaaggaaaaaatgttgaatgcttttactttgctgaaaatattagaactctcttgtgacaggatacagcaaattataattaaatataaattaccagaaccagagctacctctaagtcatacttcctcaagcacaaagctctcaggcatatgagacccaccttaatgaagggtctctgatttcttgagcatcagcgagtttcagaagtgactatttttttgtactcttctagtttccttgtaactatacactttttcccattccacactgtgcttaaatgacaaagactcttctgagaagccaaattctgtccaagtattaactagagatattgttgattaaagaaaatctagaactgaagtgaaagaagagagttccagttctaatagtcttttgattaacaattcttttctgagaaatgatttttataagaaatggggtgattctttaaatgcttttcttaagttgaaggcacaacagttaatggctgtattgttgctattccgttgctgacatgtttttgataaagctttaacattcctgctactaattttggcggagagtgtttgccaggtttcaatgtgggctgcagctttttgtgctccttctctggtttgcagtgtaatgagttcataagctaaattttcagaaagaattttgtttaagattatgcctcttatctacttgagagcaacatgtcttttcaatcatgggattgacacatgaaaaataaagttatttcttaatcaa

SEQ ID NO: 4021 - DNA, 4178 bp, Homo sapiens
  source 1..4178: mol_type = genomic DNA
gcggccgggggaacccagtttccgaggaacttttcgccggcgccgggccgcctctgaggccagggcaggacacgaacgcgcggagcggcggcggcgactgagagccggggccgcggcggcgctccctaggaagggccgtacgaggcggcgggcccggcgggcctcccggaggaggcggctgcgccatggacgagccacccttcagcgaggcggctttggagcaggcgctgggcgagccgtgcgatctggacgcggcgctgctgaccgacatcgaagacatgcttcagcttatcaacaaccaagacagtgacttccctggcctatttgacccaccctatgctgggagtggggcagggggcacagaccctgccagccccgataccagctccccaggcagcttgtctccacctcctgccacattgagctcctctcttgaagccttcctgagcgggccgcaggcagcgccctcacccctgtcccctccccagcctgcacccactccattgaagatgtacccgtccatgcccgctttctcccctgggcctggtatcaaggaagagtcagtgccactgagcatcctgcagacccccaccccacagcccctgccaggggccctcctgccacagagcttcccagccccagccccaccgcagttcagctccacccctgtgttaggctaccccagccctccgggaggcttctctacaggaagccctcccgggaacacccagcagccgctgcctggcctgccactggcttccccgccaggggtcccgcccgtctccttgcacacccaggtccagagtgtggtcccccagcagctactgacagtcacagctgcccccacggcagcccctgtaacgaccactgtgacctcgcagatccagcaggtcccggtcctgctgcagccccacttcatcaaggcagactcgctgcttctgacagccatgaagacagacggagccactgtgaaggcggcaggtctcagtcccctggtctctggcaccactgtgcagacagggcctttgccgaccctggtgagtggcggaaccatcttggcaacagtcccactggtcgtagatgcggagaagctgcctatcaaccggctcgcagctggcagcaaggccccggcctctgcccagagccgtggagagaagcgcacagcccacaacgccattgagaagcgctaccgctcctccatcaatgacaaaatcattgagctcaaggatctggtggtgggcactgaggcaaagctgaataaatctgctgtcttgcgcaaggccatcgactacattcgctttctgcaacacagcaaccagaaactcaagcaggagaacctaagtctgcgcactgctgtccacaaaagcaaatctctgaaggatctggtgtcggcctgtggcagtggagggaacacagacgtgctcatggagggcgtgaagactgaggtggaggacacactgaccccacccccctcggatgctggctcacctttccagagcagccccttgtcccttggcagcaggggcagtggcagcggtggcagtggcagtgactcggagcctgacagcccagtctttgaggacagcaaggcaaagccagagcagcggccgtctctgcacagccggggcatgctggaccgctcccgcctggccctgtgcacgctcgtcttcctctgcctgtcctgcaaccccttggcctccttgctgggggcccgggggcttcccagcccctcagataccaccagcgtctaccatagccctgggcgcaacgtgctgggcaccgagagcagagatggccctggctgggcccagtggctgctgcccccagtggtctggctgctcaatgggctgttggtgctcgtctccttggtgcttctctttgtctacggtgagccagtcacacggccccactcaggccccgccgtgtacttctggaggcatcgcaagcaggctgacctggacctggcccggggagactttgcccaggctgcccagcagctgtggctggccctgcgggcactgggccggcccctgcccacctcccacctggacctggcttgtagcctcctctggaacctcatccgtcacctgctgcagcgtctctgggtgggccgctggctggcaggccgggcagggggcctgcagcaggactgtgctctgcgagtggatgctagcgccagcgcccgagacgcagccctggtctaccataagctgcaccagctgcacaccatggggaagcacacaggcgggcacctcactgccaccaacctggcgctgagtgccctgaacctggcagagtgtgcaggggatgccgtgtctgtggcgacgctggccgagatctatgtggcggctgcattgagagtgaagaccagtctcccacgggccttgcattttctgacacgcttcttcctgagcagtgcccgccaggcctgcctggcacagagtggctcagtgcctcctgccatgcagtggctctgccaccccgtgggccaccgtttcttcgtggatggggactggtccgtgctcagtaccccatgggagagcctgtacagcttggccgggaacccagtggaccccctggcccaggtgactcagctattccgggaacatctcttagagcgagcactgaactgtgtgacccagcccaaccccagccctgggtcagctgatggggacaaggaattctcggatgccctcgggtacctgcagctgctgaacagctgttctgatgctgcgggggctcctgcctacagcttctccatcagttccagcatggccaccaccaccggcgtagacccggtggccaagtggtgggcctctctgacagctgtggtgatccactggctgcggcgggatgaggaggcggctgagcggctgtgcccgctggtggagcacctgccccgggtgctgcaggagtctgagagacccctgcccagggcagctctgcactccttcaaggctgcccgggccctgctgggctgtgccaaggcagagtctggtccagccagcctgaccatctgtgagaaggccagtgggtacctgcaggacagcctggctaccacaccagccagcagctccattgacaaggccgtgcagctgttcctgtgtgacctgcttcttgtggtgcgcaccagcctgtggcggcagcagcagcccccggccccggccccagcagcccagggcaccagcagcaggccccaggcttccgcccttgagctgcgtggcttccaacgggacctgagcagcctgaggcggctggcacagagcttccggcccgccatgcggagggtgttcctacatgaggccacggcccggctgatggcgggggccagccccacacggacacaccagctcctcgaccgcagtctgaggcggcgggcaggccccggtggcaaaggaggcgcggtggcggagctggagccgcggcccacgcggcgggagcacgcggaggccttgctgctggcctcctgctacctgccccccggcttcctgtcggcgcccgggcagcgcgtgggcatgctggctgaggcggcgcgcacactcgagaagcttggcgatcgccggctgctgcacgactgtcagcagatgctcatgcgcctgggcggtgggaccactgtcacttccagctagaccccgtgtccccggcctcagcacccctgtctctagccactttggtcccgtgcagcttctgtcctgcgtcgaagctttgaaggccgaaggcagtgcaagagactctggcctccacagttcgacctgcggctgctgtgtgccttcgcggtggaaggcccgaggggcgcgatcttgaccctaagaccggcggccatgatggtgctgacctctggtggccgatcggggcactgcaggggccgagccattttggggggcccccctccttgctctgcaggcaccttagtggcttttttcctcctgtgtacagggaagagaggggtacatttccctgtgctgacggaagccaacttggctttcccggactgcaagcagggctctgccccagaggcctctctctccgtcgtgggagagagacgtgtacatagtgtaggtcagcgtgcttagcctcctgacctgaggctcctgtgctactttgccttttgcaaactttattttcatagattgagaagttttgtacagagaattaaaaatgaaattatttataatctg

SEQ ID NO: 4022 - DNA, 3410 bp, Homo sapiens
  source 1..3410: mol_type = genomic DNA
agcagagctgcggccgggggaacccagtttccgaggaacttttcgccggcgccgggccgcctctgaggccagggcaggacacgaacgcgcggagcggcggcggcgactgagagccggggccgcggcggcgctccctaggaagggccgtacgaggcggcgggcccggcgggcctcccggaggaggcggctgcgccatggacgagccacccttcagcgaggcggctttggagcaggcgctgggcgagccgtgcgatctggacgcggcgctgctgaccgacatcgaagacatgcttcagcttatcaacaaccaagacagtgacttccctggcctatttgacccaccctatgctgggagtggggcagggggcacagaccctgccagccccgataccagctccccaggcagcttgtctccacctcctgccacattgagctcctctcttgaagccttcctgagcgggccgcaggcagcgccctcacccctgtcccctccccagcctgcacccactccattgaagatgtacccgtccatgcccgctttctcccctgggcctggtatcaaggaagagtcagtgccactgagcatcctgcagacccccaccccacagcccctgccaggggccctcctgccacagagcttcccagccccagccccaccgcagttcagctccacccctgtgttaggctaccccagccctccgggaggcttctctacaggaagccctcccgggaacacccagcagccgctgcctggcctgccactggcttccccgccaggggtcccgcccgtctccttgcacacccaggtccagagtgtggtcccccagcagctactgacagtcacagctgcccccacggcagcccctgtaacgaccactgtgacctcgcagatccagcaggtcccggtcctgctgcagccccacttcatcaaggcagactcgctgcttctgacagccatgaagacagacggagccactgtgaaggcggcaggtctcagtcccctggtctctggcaccactgtgcagacagggcctttgccgaccctggtgagtggcggaaccatcttggcaacagtcccactggtcgtagatgcggagaagctgcctatcaaccggctcgcagctggcagcaaggccccggcctctgcccagagccgtggagagaagcgcacagcccacaacgccattgagaagcgctaccgctcctccatcaatgacaaaatcattgagctcaaggatctggtggtgggcactgaggcaaagctgaataaatctgctgtcttgcgcaaggccatcgactacattcgctttctgcaacacagcaaccagaaactcaagcaggagaacctaagtctgcgcactgctgtccacaaaagcaaatctctgaaggatctggtgtcggcctgtggcagtggagggaacacagacgtgctcatggagggcgtgaagactgaggtggaggacacactgaccccacccccctcggatgctggctcacctttccagagcagccccttgtcccttggcagcaggggcagtggcagcggtggcagtggcagtgactcggagcctgacagcccagtctttgaggacagcaaggcaaagccagagcagcggccgtctctgcacagccggggcatgctggaccgctcccgcctggccctgtgcacgctcgtcttcctctgcctgtcctgcaaccccttggcctccttgctgggggcccgggggcttcccagcccctcagataccaccagcgtctaccatagccctgggcgcaacgtgctgggcaccgagagcagagatggccctggctgggcccagtggctgctgcccccagtggtctggctgctcaatgggctgttggtgctcgtctccttggtgcttctctttgtctacggtgagccagtcacacggccccactcaggccccgccgtgtacttctggaggcatcgcaagcaggctgacctggacctggcccggggagactttgcccaggctgcccagcagctgtggctggccctgcgggcactgggccggcccctgcccacctcccacctggacctggcttgtagcctcctctggaacctcatccgtcacctgctgcagcgtctctgggtgggccgctggctggcaggccgggcagggggcctgcagcaggactgtgctctgcgagtggatgctagcgccagcgcccgagacgcagccctggtctaccataagctgcaccagctgcacaccatggggaagcacacaggcgggcacctcactgccaccaacctggcgctgagtgccctgaacctggcagagtgtgcaggggatgccgtgtctgtggcgacgctggccgagatctatgtggcggctgcattgagagtgaagaccagtctcccacgggccttgcattttctgacacgcttcttcctgagcagtgcccgccaggcctgcctggcacagagtggctcagtgcctcctgccatgcagtggctctgccaccccgtgggccaccgtttcttcgtggatggggactggtccgtgctcagtaccccatgggagagcctgtacagcttggccgggaacccagtggaccccctggcccaggtgactcagctattccgggaacatctcttagagcgagcactgaactgtgtgacccagcccaaccccagccctgggtcagctgatggggacaaggaattctcggatgccctcgggtacctgcagctgctgaacagctgttctgatgctgcgggggctcctgcctacagcttctccatcagttccagcatggccaccaccaccggcgtagacccggtggccaagtggtgggcctctctgacagctgtggtgatccactggctgcggcgggatgaggaggcggctgagcggctgtgcccgctggtggagcacctgccccgggtgctgcaggagtctgagagacccctgcccagggcagctctgcactccttcaaggctgcccgggccctgctgggctgtgccaaggcagagtctggtccagccagcctgaccatctgtgagaaggccagtgggtacctgcaggacagcctggctaccacaccagccagcagctccattgacaaggccgtgcagctgttcctgtgtgacctgcttcttgtggtgcgcaccagcctgtggcggcagcagcagcccccggccccggccccagcagcccagggcaccagcagcaggccccaggcttccgcccttgagctgcgtggcttccaacgggacctgagcagcctgaggcggctggcacagagcttccggcccgccatgcggaggctgatggatgtgctgactagtgagagtgcttgggccctcccccagcacctagggaaaggcttcccctccccctccggccacaaggtccctgggtggcacgggaggatggactga

SEQ ID NO: 4023 - DNA, 4252 bp, Homo sapiens
  source 1..4252: mol_type = genomic DNA
agtttccgaggaacttttcgccggcgccgggccgcctctgaggccagggcaggacacgaacgcgcggagcggcggcggcgactgagagccggggccgcggcggcgctccctaggaagggccgtacgaggcggcgggcccggcgggcctcccggaggaggcggctgcgccatggacgagccacccttcagcgaggcggctttggagcaggcgctgggcgagccgtgcgatctggacgcggcgctgctgaccgacatcgaaggtgaagtcggcgcggggaggggtagggccaacggcctggacgccccaagggcgggcgcagatcgcggagccatggattgcactttcgaagacatgcttcagcttatcaacaaccaagacagtgacttccctggcctatttgacccaccctatgctgggagtggggcagggggcacagaccctgccagccccgataccagctccccaggcagcttgtctccacctcctgccacattgagctcctctcttgaagccttcctgagcgggccgcaggcagcgccctcacccctgtcccctccccagcctgcacccactccattgaagatgtacccgtccatgcccgctttctcccctgggcctggtatcaaggaagagtcagtgccactgagcatcctgcagacccccaccccacagcccctgccaggggccctcctgccacagagcttcccagccccagccccaccgcagttcagctccacccctgtgttaggctaccccagccctccgggaggcttctctacaggaagccctcccgggaacacccagcagccgctgcctggcctgccactggcttccccgccaggggtcccgcccgtctccttgcacacccaggtccagagtgtggtcccccagcagctactgacagtcacagctgcccccacggcagcccctgtaacgaccactgtgacctcgcagatccagcaggtcccggtcctgctgcagccccacttcatcaaggcagactcgctgcttctgacagccatgaagacagacggagccactgtgaaggcggcaggtctcagtcccctggtctctggcaccactgtgcagacagggcctttgccgaccctggtgagtggcggaaccatcttggcaacagtcccactggtcgtagatgcggagaagctgcctatcaaccggctcgcagctggcagcaaggccccggcctctgcccagagccgtggagagaagcgcacagcccacaacgccattgagaagcgctaccgctcctccatcaatgacaaaatcattgagctcaaggatctggtggtgggcactgaggcaaagctgaataaatctgctgtcttgcgcaaggccatcgactacattcgctttctgcaacacagcaaccagaaactcaagcaggagaacctaagtctgcgcactgctgtccacaaaagcaaatctctgaaggatctggtgtcggcctgtggcagtggagggaacacagacgtgctcatggagggcgtgaagactgaggtggaggacacactgaccccacccccctcggatgctggctcacctttccagagcagccccttgtcccttggcagcaggggcagtggcagcggtggcagtggcagtgactcggagcctgacagcccagtctttgaggacagcaaggcaaagccagagcagcggccgtctctgcacagccggggcatgctggaccgctcccgcctggccctgtgcacgctcgtcttcctctgcctgtcctgcaaccccttggcctccttgctgggggcccgggggcttcccagcccctcagataccaccagcgtctaccatagccctgggcgcaacgtgctgggcaccgagagcagagatggccctggctgggcccagtggctgctgcccccagtggtctggctgctcaatgggctgttggtgctcgtctccttggtgcttctctttgtctacggtgagccagtcacacggccccactcaggccccgccgtgtacttctggaggcatcgcaagcaggctgacctggacctggcccggggagactttgcccaggctgcccagcagctgtggctggccctgcgggcactgggccggcccctgcccacctcccacctggacctggcttgtagcctcctctggaacctcatccgtcacctgctgcagcgtctctgggtgggccgctggctggcaggccgggcagggggcctgcagcaggactgtgctctgcgagtggatgctagcgccagcgcccgagacgcagccctggtctaccataagctgcaccagctgcacaccatggggaagcacacaggcgggcacctcactgccaccaacctggcgctgagtgccctgaacctggcagagtgtgcaggggatgccgtgtctgtggcgacgctggccgagatctatgtggcggctgcattgagagtgaagaccagtctcccacgggccttgcattttctgacacgcttcttcctgagcagtgcccgccaggcctgcctggcacagagtggctcagtgcctcctgccatgcagtggctctgccaccccgtgggccaccgtttcttcgtggatggggactggtccgtgctcagtaccccatgggagagcctgtacagcttggccgggaacccagtggaccccctggcccaggtgactcagctattccgggaacatctcttagagcgagcactgaactgtgtgacccagcccaaccccagccctgggtcagctgatggggacaaggaattctcggatgccctcgggtacctgcagctgctgaacagctgttctgatgctgcgggggctcctgcctacagcttctccatcagttccagcatggccaccaccaccggcgtagacccggtggccaagtggtgggcctctctgacagctgtggtgatccactggctgcggcgggatgaggaggcggctgagcggctgtgcccgctggtggagcacctgccccgggtgctgcaggagtctgagagacccctgcccagggcagctctgcactccttcaaggctgcccgggccctgctgggctgtgccaaggcagagtctggtccagccagcctgaccatctgtgagaaggccagtgggtacctgcaggacagcctggctaccacaccagccagcagctccattgacaaggccgtgcagctgttcctgtgtgacctgcttcttgtggtgcgcaccagcctgtggcggcagcagcagcccccggccccggccccagcagcccagggcaccagcagcaggccccaggcttccgcccttgagctgcgtggcttccaacgggacctgagcagcctgaggcggctggcacagagcttccggcccgccatgcggagggtgttcctacatgaggccacggcccggctgatggcgggggccagccccacacggacacaccagctcctcgaccgcagtctgaggcggcgggcaggccccggtggcaaaggaggcgcggtggcggagctggagccgcggcccacgcggcgggagcacgcggaggccttgctgctggcctcctgctacctgccccccggcttcctgtcggcgcccgggcagcgcgtgggcatgctggctgaggcggcgcgcacactcgagaagcttggcgatcgccggctgctgcacgactgtcagcagatgctcatgcgcctgggcggtgggaccactgtcacttccagctagaccccgtgtccccggcctcagcacccctgtctctagccactttggtcccgtgcagcttctgtcctgcgtcgaagctttgaaggccgaaggcagtgcaagagactctggcctccacagttcgacctgcggctgctgtgtgccttcgcggtggaaggcccgaggggcgcgatcttgaccctaagaccggcggccatgatggtgctgacctctggtggccgatcggggcactgcaggggccgagccattttggggggcccccctccttgctctgcaggcaccttagtggcttttttcctcctgtgtacagggaagagaggggtacatttccctgtgctgacggaagccaacttggctttcccggactgcaagcagggctctgccccagaggcctctctctccgtcgtgggagagagacgtgtacatagtgtaggtcagcgtgcttagcctcctgacctgaggctcctgtgctactttgccttttgcaaactttattttcatagattgagaagttttgtacagagaattaaaaatgaaattatttataatctg

SEQ ID NO: 4024 - DNA, 4015 bp, Homo sapiens
  source 1..4015: mol_type = genomic DNA
aaaaatccgccgcgccttgacaggtgaagtcggcgcggggaggggtagggccaacggcctggacgccccaagggcgggcgcagatcgcggagccatggattgcactttcgaagacatgcttcagcttatcaacaaccaagacagtgacttccctggcctatttgacccaccctatgctgggagtggggcagggggcacagaccctgccagccccgataccagctccccaggcagcttgtctccacctcctgccacattgagctcctctcttgaagccttcctgagcgggccgcaggcagcgccctcacccctgtcccctccccagcctgcacccactccattgaagatgtacccgtccatgcccgctttctcccctgggcctggtatcaaggaagagtcagtgccactgagcatcctgcagacccccaccccacagcccctgccaggggccctcctgccacagagcttcccagccccagccccaccgcagttcagctccacccctgtgttaggctaccccagccctccgggaggcttctctacaggaagccctcccgggaacacccagcagccgctgcctggcctgccactggcttccccgccaggggtcccgcccgtctccttgcacacccaggtccagagtgtggtcccccagcagctactgacagtcacagctgcccccacggcagcccctgtaacgaccactgtgacctcgcagatccagcaggtcccggtcctgctgcagccccacttcatcaaggcagactcgctgcttctgacagccatgaagacagacggagccactgtgaaggcggcaggtctcagtcccctggtctctggcaccactgtgcagacagggcctttgccgaccctggtgagtggcggaaccatcttggcaacagtcccactggtcgtagatgcggagaagctgcctatcaaccggctcgcagctggcagcaaggccccggcctctgcccagagccgtggagagaagcgcacagcccacaacgccattgagaagcgctaccgctcctccatcaatgacaaaatcattgagctcaaggatctggtggtgggcactgaggcaaagctgaataaatctgctgtcttgcgcaaggccatcgactacattcgctttctgcaacacagcaaccagaaactcaagcaggagaacctaagtctgcgcactgctgtccacaaaagcaaatctctgaaggatctggtgtcggcctgtggcagtggagggaacacagacgtgctcatggagggcgtgaagactgaggtggaggacacactgaccccacccccctcggatgctggctcacctttccagagcagccccttgtcccttggcagcaggggcagtggcagcggtggcagtggcagtgactcggagcctgacagcccagtctttgaggacagcaaggcaaagccagagcagcggccgtctctgcacagccggggcatgctggaccgctcccgcctggccctgtgcacgctcgtcttcctctgcctgtcctgcaaccccttggcctccttgctgggggcccgggggcttcccagcccctcagataccaccagcgtctaccatagccctgggcgcaacgtgctgggcaccgagagcagagatggccctggctgggcccagtggctgctgcccccagtggtctggctgctcaatgggctgttggtgctcgtctccttggtgcttctctttgtctacggtgagccagtcacacggccccactcaggccccgccgtgtacttctggaggcatcgcaagcaggctgacctggacctggcccggggagactttgcccaggctgcccagcagctgtggctggccctgcgggcactgggccggcccctgcccacctcccacctggacctggcttgtagcctcctctggaacctcatccgtcacctgctgcagcgtctctgggtgggccgctggctggcaggccgggcagggggcctgcagcaggactgtgctctgcgagtggatgctagcgccagcgcccgagacgcagccctggtctaccataagctgcaccagctgcacaccatggggaagcacacaggcgggcacctcactgccaccaacctggcgctgagtgccctgaacctggcagagtgtgcaggggatgccgtgtctgtggcgacgctggccgagatctatgtggcggctgcattgagagtgaagaccagtctcccacgggccttgcattttctgacacgcttcttcctgagcagtgcccgccaggcctgcctggcacagagtggctcagtgcctcctgccatgcagtggctctgccaccccgtgggccaccgtttcttcgtggatggggactggtccgtgctcagtaccccatgggagagcctgtacagcttggccgggaacccagtggaccccctggcccaggtgactcagctattccgggaacatctcttagagcgagcactgaactgtgtgacccagcccaaccccagccctgggtcagctgatggggacaaggaattctcggatgccctcgggtacctgcagctgctgaacagctgttctgatgctgcgggggctcctgcctacagcttctccatcagttccagcatggccaccaccaccggcgtagacccggtggccaagtggtgggcctctctgacagctgtggtgatccactggctgcggcgggatgaggaggcggctgagcggctgtgcccgctggtggagcacctgccccgggtgctgcaggagtctgagagacccctgcccagggcagctctgcactccttcaaggctgcccgggccctgctgggctgtgccaaggcagagtctggtccagccagcctgaccatctgtgagaaggccagtgggtacctgcaggacagcctggctaccacaccagccagcagctccattgacaaggccgtgcagctgttcctgtgtgacctgcttcttgtggtgcgcaccagcctgtggcggcagcagcagcccccggccccggccccagcagcccagggcaccagcagcaggccccaggcttccgcccttgagctgcgtggcttccaacgggacctgagcagcctgaggcggctggcacagagcttccggcccgccatgcggagggtgttcctacatgaggccacggcccggctgatggcgggggccagccccacacggacacaccagctcctcgaccgcagtctgaggcggcgggcaggccccggtggcaaaggaggcgcggtggcggagctggagccgcggcccacgcggcgggagcacgcggaggccttgctgctggcctcctgctacctgccccccggcttcctgtcggcgcccgggcagcgcgtgggcatgctggctgaggcggcgcgcacactcgagaagcttggcgatcgccggctgctgcacgactgtcagcagatgctcatgcgcctgggcggtgggaccactgtcacttccagctagaccccgtgtccccggcctcagcacccctgtctctagccactttggtcccgtgcagcttctgtcctgcgtcgaagctttgaaggccgaaggcagtgcaagagactctggcctccacagttcgacctgcggctgctgtgtgccttcgcggtggaaggcccgaggggcgcgatcttgaccctaagaccggcggccatgatggtgctgacctctggtggccgatcggggcactgcaggggccgagccattttggggggcccccctccttgctctgcaggcaccttagtggcttttttcctcctgtgtacagggaagagaggggtacatttccctgtgctgacggaagccaacttggctttcccggactgcaagcagggctctgccccagaggcctctctctccgtcgtgggagagagacgtgtacatagtgtaggtcagcgtgcttagcctcctgacctgaggctcctgtgctactttgccttttgcaaactttattttcatagattgagaagttttgtacagagaattaaaaatgaaattatttataatctg

SEQ ID NO: 4025 - DNA, 3026 bp, Homo sapiens
  source 1..3026: mol_type = genomic DNA
tctgcaacacagcaaccagaaactcaagcaggagaacctaagtctgcgcactgctgtccacaaaagcaaatctctgaaggatctggtgtcggcctgtggcagtggagggaacacagacgtgctcatggagggcgtgaagactgaggtggaggacacactgaccccacccccctcggatgctggctcacctttccagagcagccccttgtcccttggcagcaggggcagtggcagcggtggcagtggcagtgactcggagcctgacagcccagtctttgaggacagcaaggttgggccctgccacggtgcccccttccccactcccagccatatcctctgagcctcatgacagggccgggaagaccctaacagatcctacctcccatttcatagacagaataactgaggcctggagccacgtggggtcccacagtaaggcaaagccagagcagcggccgtctctgcacagccggggcatgctggaccgctcccgcctggccctgtgcacgctcgtcttcctctgcctgtcctgcaaccccttggcctccttgctgggggcccgggggcttcccagcccctcagataccaccagcgtctaccatagccctgggcgcaacgtgctgggcaccgagagcagagatggccctggctgggcccagtggctgctgcccccagtggtctggctgctcaatgggctgttggtgctcgtctccttggtgcttctctttgtctacggtgagccagtcacacggccccactcaggccccgccgtgtacttctggaggcatcgcaagcaggctgacctggacctggcccggggagactttgcccaggctgcccagcagctgtggctggccctgcgggcactgggccggcccctgcccacctcccacctggacctggcttgtagcctcctctggaacctcatccgtcacctgctgcagcgtctctgggtgggccgctggctggcaggccgggcagggggcctgcagcaggactgtgctctgcgagtggatgctagcgccagcgcccgagacgcagccctggtctaccataagctgcaccagctgcacaccatggggaagcacacaggcgggcacctcactgccaccaacctggcgctgagtgccctgaacctggcagagtgtgcaggggatgccgtgtctgtggcgacgctggccgagatctatgtggcggctgcattgagagtgaagaccagtctcccacgggccttgcattttctgacacgcttcttcctgagcagtgcccgccaggcctgcctggcacagagtggctcagtgcctcctgccatgcagtggctctgccaccccgtgggccaccgtttcttcgtggatggggactggtccgtgctcagtaccccatgggagagcctgtacagcttggccgggaacccagtggaccccctggcccaggtgactcagctattccgggaacatctcttagagcgagcactgaactgtgtgacccagcccaaccccagccctgggtcagctgatggggacaaggaattctcggatgccctcgggtacctgcagctgctgaacagctgttctgatgctgcgggggctcctgcctacagcttctccatcagttccagcatggccaccaccaccggcgtagacccggtggccaagtggtgggcctctctgacagctgtggtgatccactggctgcggcgggatgaggaggcggctgagcggctgtgcccgctggtggagcacctgccccgggtgctgcaggagtctgagagacccctgcccagggcagctctgcactccttcaaggctgcccgggccctgctgggctgtgccaaggcagagtctggtccagccagcctgaccatctgtgagaaggccagtgggtacctgcaggacagcctggctaccacaccagccagcagctccattgacaaggccgtgcagctgttcctgtgtgacctgcttcttgtggtgcgcaccagcctgtggcggcagcagcagcccccggccccggccccagcagcccagggcaccagcagcaggccccaggcttccgcccttgagctgcgtggcttccaacgggacctgagcagcctgaggcggctggcacagagcttccggcccgccatgcggagggtgttcctacatgaggccacggcccggctgatggcgggggccagccccacacggacacaccagctcctcgaccgcagtctgaggcggcgggcaggccccggtggcaaaggaggcgcggtggcggagctggagccgcggcccacgcggcgggagcacgcggaggccttgctgctggcctcctgctacctgccccccggcttcctgtcggcgcccgggcagcgcgtgggcatgctggctgaggcggcgcgcacactcgagaagcttggcgatcgccggctgctgcacgactgtcagcagatgctcatgcgcctgggcggtgggaccactgtcacttccagctagaccccgtgtccccggcctcagcacccctgtctctagccactttggtcccgtgcagcttctgtcctgcgtcgaagctttgaaggccgaaggcagtgcaagagactctggcctccacagttcgacctgcggctgctgtgtgccttcgcggtggaaggcccgaggggcgcgatcttgaccctaagaccggcggccatgatggtgctgacctctggtggccgatcggggcactgcaggggccgagccattttggggggcccccctccttgctctgcaggcaccttagtggcttttttcctcctgtgtacagggaagagaggggtacatttccctgtgctgacggaagccaacttggctttcccggactgcaagcagggctctgccccagaggcctctctctccgtcgtgggagagagacgtgtacatagtgtaggtcagcgtgcttagcctcctgacctgaggctcctgtgctactttgccttttgcaaactttattttcatagattgagaagttttgtacagagaattaaaaatgaaattatttataatctg

SEQ ID NO: 4026 - DNA, 3696 bp, Homo sapiens
  source 1..3696: mol_type = genomic DNA
gttactagcagtcctggtgtgcttgttgccggggtaggcgcaacctcgcactggaggcctggcttgaagccagtgcatttgcatcagagcccaggcagggactgtccataggaagccacatggggcaatgactcatccaaggccagtcggtgatagagacctgaagagcaggttgaaagtgggagagggaggtctgtgtctgcagccccatgctttatttctgcaggaagccctcccgggaacacccagcagccgctgcctggcctgccactggcttccccgccaggggtcccgcccgtctccttgcacacccaggtccagagtgtggtcccccagcagctactgacagtcacagctgcccccacggcagcccctgtaacgaccactgtgacctcgcagatccagcaggtcccggtcctgctgcagccccacttcatcaaggcagactcgctgcttctgacagccatgaagacagacggagccactgtgaaggcggcaggtctcagtcccctggtctctggcaccactgtgcagacagggcctttgccgaccctggtgagtggcggaaccatcttggcaacagtcccactggtcgtagatgcggagaagctgcctatcaaccggctcgcagctggcagcaaggccccggcctctgcccagagccgtggagagaagcgcacagcccacaacgccattgagaagcgctaccgctcctccatcaatgacaaaatcattgagctcaaggatctggtggtgggcactgaggcaaagctgaataaatctgctgtcttgcgcaaggccatcgactacattcgctttctgcaacacagcaaccagaaactcaagcaggagaacctaagtctgcgcactgctgtccacaaaagcaaatctctgaaggatctggtgtcggcctgtggcagtggagggaacacagacgtgctcatggagggcgtgaagactgaggtggaggacacactgaccccacccccctcggatgctggctcacctttccagagcagccccttgtcccttggcagcaggggcagtggcagcggtggcagtggcagtgactcggagcctgacagcccagtctttgaggacagcaaggcaaagccagagcagcggccgtctctgcacagccggggcatgctggaccgctcccgcctggccctgtgcacgctcgtcttcctctgcctgtcctgcaaccccttggcctccttgctgggggcccgggggcttcccagcccctcagataccaccagcgtctaccatagccctgggcgcaacgtgctgggcaccgagagcagagatggccctggctgggcccagtggctgctgcccccagtggtctggctgctcaatgggctgttggtgctcgtctccttggtgcttctctttgtctacggtgagccagtcacacggccccactcaggccccgccgtgtacttctggaggcatcgcaagcaggctgacctggacctggcccggggagactttgcccaggctgcccagcagctgtggctggccctgcgggcactgggccggcccctgcccacctcccacctggacctggcttgtagcctcctctggaacctcatccgtcacctgctgcagcgtctctgggtgggccgctggctggcaggccgggcagggggcctgcagcaggactgtgctctgcgagtggatgctagcgccagcgcccgagacgcagccctggtctaccataagctgcaccagctgcacaccatggggaagcacacaggcgggcacctcactgccaccaacctggcgctgagtgccctgaacctggcagagtgtgcaggggatgccgtgtctgtggcgacgctggccgagatctatgtggcggctgcattgagagtgaagaccagtctcccacgggccttgcattttctgacacgcttcttcctgagcagtgcccgccaggcctgcctggcacagagtggctcagtgcctcctgccatgcagtggctctgccaccccgtgggccaccgtttcttcgtggatggggactggtccgtgctcagtaccccatgggagagcctgtacagcttggccgggaacccagtggaccccctggcccaggtgactcagctattccgggaacatctcttagagcgagcactgaactgtgtgacccagcccaaccccagccctgggtcagctgatggggacaaggaattctcggatgccctcgggtacctgcagctgctgaacagctgttctgatgctgcgggggctcctgcctacagcttctccatcagttccagcatggccaccaccaccggcgtagacccggtggccaagtggtgggcctctctgacagctgtggtgatccactggctgcggcgggatgaggaggcggctgagcggctgtgcccgctggtggagcacctgccccgggtgctgcaggagtctgagagacccctgcccagggcagctctgcactccttcaaggctgcccgggccctgctgggctgtgccaaggcagagtctggtccagccagcctgaccatctgtgagaaggccagtgggtacctgcaggacagcctggctaccacaccagccagcagctccattgacaaggccgtgcagctgttcctgtgtgacctgcttcttgtggtgcgcaccagcctgtggcggcagcagcagcccccggccccggccccagcagcccagggcaccagcagcaggccccaggcttccgcccttgagctgcgtggcttccaacgggacctgagcagcctgaggcggctggcacagagcttccggcccgccatgcggagggtgttcctacatgaggccacggcccggctgatggcgggggccagccccacacggacacaccagctcctcgaccgcagtctgaggcggcgggcaggccccggtggcaaaggaggcgcggtggcggagctggagccgcggcccacgcggcgggagcacgcggaggccttgctgctggcctcctgctacctgccccccggcttcctgtcggcgcccgggcagcgcgtgggcatgctggctgaggcggcgcgcacactcgagaagcttggcgatcgccggctgctgcacgactgtcagcagatgctcatgcgcctgggcggtgggaccactgtcacttccagctagaccccgtgtccccggcctcagcacccctgtctctagccactttggtcccgtgcagcttctgtcctgcgtcgaagctttgaaggccgaaggcagtgcaagagactctggcctccacagttcgacctgcggctgctgtgtgccttcgcggtggaaggcccgaggggcgcgatcttgaccctaagaccggcggccatgatggtgctgacctctggtggccgatcggggcactgcaggggccgagccattttggggggcccccctccttgctctgcaggcaccttagtggcttttttcctcctgtgtacagggaagagaggggtacatttccctgtgctgacggaagccaacttggctttcccggactgcaagcagggctctgccccagaggcctctctctccgtcgtgggagagagacgtgtacatagtgtaggtcagcgtgcttagcctcctgacctgaggctcctgtgctactttgccttttgcaaactttattttcatagattgagaagttttgtacagagaattaaaaatgaaattatttataatctg

SEQ ID NO: 4027 - DNA, 3598 bp, Homo sapiens
  source 1..3598: mol_type = genomic DNA
aaaaatccgccgcgccttgacaggtgaagtcggcgcggggaggggtagggccaacggcctggacgccccaagggcgggcgcagatcgcggagccatggattgcactttcgaagacatgcttcagcttatcaacaaccaagacagtgacttccctggcctatttgacccaccctatgctgggagtggggcagggggcacagaccctgccagccccgataccagctccccaggcagcttgtctccacctcctgccacattgagctcctctcttgaagccttcctgagcgggccgcaggcagcgccctcacccctgtcccctccccagcctgcacccactccattgaagatgtacccgtccatgcccgctttctcccctgggcctggtatcaaggaagagtcagtgccactgagcatcctgcagacccccaccccacagcccctgccagtcccgaccctggtgagtggcggaaccatcttggcaacagtcccactggtcgtagatgcggagaagctgcctatcaaccggctcgcagctggcagcaaggccccggcctctgcccagagccgtggagagaagcgcacagcccacaacgccattgagaagcgctaccgctcctccatcaatgacaaaatcattgagctcaaggatctggtggtgggcactgaggcaaagctgaataaatctgctgtcttgcgcaaggccatcgactacattcgctttctgcaacacagcaaccagaaactcaagcaggagaacctaagtctgcgcactgctgtccacaaaagcaaatctctgaaggatctggtgtcggcctgtggcagtggagggaacacagacgtgctcatggagggcgtgaagactgaggtggaggacacactgaccccacccccctcggatgctggctcacctttccagagcagccccttgtcccttggcagcaggggcagtggcagcggtggcagtggcagtgactcggagcctgacagcccagtctttgaggacagcaaggcaaagccagagcagcggccgtctctgcacagccggggcatgctggaccgctcccgcctggccctgtgcacgctcgtcttcctctgcctgtcctgcaaccccttggcctccttgctgggggcccgggggcttcccagcccctcagataccaccagcgtctaccatagccctgggcgcaacgtgctgggcaccgagagcagagatggccctggctgggcccagtggctgctgcccccagtggtctggctgctcaatgggctgttggtgctcgtctccttggtgcttctctttgtctacggtgagccagtcacacggccccactcaggccccgccgtgtacttctggaggcatcgcaagcaggctgacctggacctggcccggggagactttgcccaggctgcccagcagctgtggctggccctgcgggcactgggccggcccctgcccacctcccacctggacctggcttgtagcctcctctggaacctcatccgtcacctgctgcagcgtctctgggtgggccgctggctggcaggccgggcagggggcctgcagcaggactgtgctctgcgagtggatgctagcgccagcgcccgagacgcagccctggtctaccataagctgcaccagctgcacaccatggggaagcacacaggcgggcacctcactgccaccaacctggcgctgagtgccctgaacctggcagagtgtgcaggggatgccgtgtctgtggcgacgctggccgagatctatgtggcggctgcattgagagtgaagaccagtctcccacgggccttgcattttctgacacgcttcttcctgagcagtgcccgccaggcctgcctggcacagagtggctcagtgcctcctgccatgcagtggctctgccaccccgtgggccaccgtttcttcgtggatggggactggtccgtgctcagtaccccatgggagagcctgtacagcttggccgggaacccagtggaccccctggcccaggtgactcagctattccgggaacatctcttagagcgagcactgaactgtgtgacccagcccaaccccagccctgggtcagctgatggggacaaggaattctcggatgccctcgggtacctgcagctgctgaacagctgttctgatgctgcgggggctcctgcctacagcttctccatcagttccagcatggccaccaccaccggcgtagacccggtggccaagtggtgggcctctctgacagctgtggtgatccactggctgcggcgggatgaggaggcggctgagcggctgtgcccgctggtggagcacctgccccgggtgctgcaggagtctgagagacccctgcccagggcagctctgcactccttcaaggctgcccgggccctgctgggctgtgccaaggcagagtctggtccagccagcctgaccatctgtgagaaggccagtgggtacctgcaggacagcctggctaccacaccagccagcagctccattgacaaggccgtgcagctgttcctgtgtgacctgcttcttgtggtgcgcaccagcctgtggcggcagcagcagcccccggccccggccccagcagcccagggcaccagcagcaggccccaggcttccgcccttgagctgcgtggcttccaacgggacctgagcagcctgaggcggctggcacagagcttccggcccgccatgcggagggtgttcctacatgaggccacggcccggctgatggcgggggccagccccacacggacacaccagctcctcgaccgcagtctgaggcggcgggcaggccccggtggcaaaggaggcgcggtggcggagctggagccgcggcccacgcggcgggagcacgcggaggccttgctgctggcctcctgctacctgccccccggcttcctgtcggcgcccgggcagcgcgtgggcatgctggctgaggcggcgcgcacactcgagaagcttggcgatcgccggctgctgcacgactgtcagcagatgctcatgcgcctgggcggtgggaccactgtcacttccagctagaccccgtgtccccggcctcagcacccctgtctctagccactttggtcccgtgcagcttctgtcctgcgtcgaagctttgaaggccgaaggcagtgcaagagactctggcctccacagttcgacctgcggctgctgtgtgccttcgcggtggaaggcccgaggggcgcgatcttgaccctaagaccggcggccatgatggtgctgacctctggtggccgatcggggcactgcaggggccgagccattttggggggcccccctccttgctctgcaggcaccttagtggcttttttcctcctgtgtacagggaagagaggggtacatttccctgtgctgacggaagccaacttggctttcccggactgcaagcagggctctgccccagaggcctctctctccgtcgtgggagagagacgtgtacatagtgtaggtcagcgtgcttagcctcctgacctgaggctcctgtgctactttgccttttgcaaactttattttcatagattgagaagttttgtacagagaattaaaaatgaaattatttataatctg

SEQ ID NO: 4028 - DNA, 3570 bp, Homo sapiens
  source 1..3570: mol_type = genomic DNA
aaaaatccgccgcgccttgacaggtgaagtcggcgcggggaggggtagggccaacggcctggacgccccaagggcgggcgcagatcgcggagccatggattgcactttcgaagacatgcttcagcttatcaacaaccaagacagtgacttccctggcctatttgacccaccccagcctgcacccactccattgaagatgtacccgtccatgcccgctttctcccctgggcctggtatcaaggaagagtcagtgccactgagcatcctgcagacccccaccccacagcccctgccaggggccctcctgccacagagcttcccagccccagccccaccgcagttcagctccacccctgtgttaggctaccccagccctccgggaggcttctctacaggaagccctcccgggaacacccagcagccgctgcctggcctgccactggcttccccgccaggggtcccgcccgtctccttgcacacccaggtccagagtgtggtcccccagcagctactgacagtcacagctgcccccacggcagcccctgtaacgaccactgtgacctcgcagatccagcaggtcccggtcctgctgcagccccacttcatcaaggcagactcgctgcttctgacagccatgaagacagacggagccactgtgaaggcggcaggtctcagtcccctggtctctggcaccactgtgcagacagggcctttgccgaccctggtgagtggcggaaccatcttggcaacagtcccactggtcgtagatgcggagaagctgcctatcaaccggctcgcagctggcagcaaggccccggcctctgcccagagccgtggagagaagcgcacagcccacaacgccattgagaagcgctaccgctcctccatcaatgacaaaatcattgagctcaaggatctggtggtgggcactgaggcaaagctgaataaatctgctgtcttgcgcaaggccatcgactacattcgctttctgcaacacagcaaccagaaactcaagcaggagaacctaagtctgcgcactgctgtccacaaaagcaaatctctgaaggatctggtgtcggcctgtggcagtggagggaacacagacgtgctcatggagggcgtgaagactgaggtggaggacacactgaccccacccccctcggatgctggctcacctttccagagcagccccttgtcccttggcagcaggggcagtggcagcggtggcagtggcagtgactcggagcctgacagcccagtctttgaggacagcaaggcaaagccagagcagcggccgtctctgcacagccggggcatgctggaccgctcccgcctggccctgtgcacgctcgtcttcctctgcctgtcctgcaaccccttggcctccttgctgggggcccgggggcttcccagcccctcagataccaccagcgtctaccatagccctgggcgcaacgtgctgggcaccgagagcagagatggccctggctgggcccagtggctgctgcccccagtggtctggctgctcaatgggctgttggtgctcgtctccttggtgcttctctttgtctacggtgagccagtcacacggccccactcaggccccgccgtgtacttctggaggcatcgcaagcaggctgacctggacctggcccggggagactttgcccaggctgcccagcagctgtggctggccctgcgggcactgggccggcccctgcccacctcccacctggacctggcttgtagcctcctctggaacctcatccgtcacctgctgcagcgtctctgggtgggccgctggctggcaggccgggcagggggcctgcagcaggactgtgctctgcgagtggatgctagcgccagcgcccgagacgcagccctggtctaccataagctgcaccagctgcacaccatggggaagcacacaggcgggcacctcactgccaccaacctggcgctgagtgccctgaacctggcagagtgtgcaggggatgccgtgtctgtggcgacgctggccgagatctatgtggcggctgcattgagagtgaagaccagtctcccacgggccttgcattttctgacacgcttcttcctgagcagtgcccgccaggcctgcctggcacagagtggctcagtgcctcctgccatgcagtggctctgccaccccgtgggccaccgtttcttcgtggatggggactggtccgtgctcagtaccccatgggagagcctgtacagcttggccgggaacccagtggaccccctggcccaggtgactcagctattccgggaacatctcttagagcgagcactgaactgtgtgacccagcccaaccccagccctgggtcagctgatggggacaaggaattctcggatgccctcgggtacctgcagctgctgaacagctgttctgatgctgcgggggctcctgcctacagcttctccatcagttccagcatggccaccaccaccggcgtagacccggtggccaagtggtgggcctctctgacagctgtggtgatccactggctgcggcgggatgaggaggcggctgagcggctgtgcccgctggtggagcacctgccccgggtgctgcaggagtctgagagacccctgcccagggcagctctgcactccttcaaggctgcccgggccctgctgggctgtgccaaggcagagtctggtccagccagcctgaccatctgtgagaaggccagtgggtacctgcaggacagcctggctaccacaccagccagcagctccattgacaaggccgtgcagctgttcctgtgtgacctgcttcttgtggtgcgcaccagcctgtggcggcagcagcagcccccggccccggccccagcagcccagggcaccagcagcaggccccaggcttccgcccttgagctgcgtggcttccaacgggacctgagcagcctgaggcggctggcacagagcttccggcccgccatgcggagggtgttcctacatgaggccacggcccggctgatggcgggggccagccccacacggacacaccagctcctcgaccgcagtctgaggcggcgggcaggccccggtggcaaaggaggcgcggtggcggagctggagccgcggcccacgcggcgggagcacgcggaggccttgctgctggcctcctgctacctgccccccggcttcctgtcggcgcccgggcagcgcgtgggcatgctggctgaggcggcgcgcacactcgagaagcttggcgatcgccggctgctgcacgactgtcagcagatgctcatgcgcctgggcggtgggaccactgtcacttccagctagaccccgtgtccccggcctcagcacccctgtctctagccactttggtcccgtgcagcttctgtcctgcgtcgaagctttgaaggccgaaggcagtgcaagagactctggcctccacagttcgacctgcggctgctgtgtgccttcgcggtggaaggcccgaggggcgcgatcttgaccctaagaccggcggccatgatggtgctgacctctggtggccgatcggggcactgcaggggccgagccattttgggggg

SEQ ID NO: 4029 - DNA, 1430 bp, Homo sapiens
  source 1..1430: mol_type = genomic DNA
atggacgagccacccttcagcgaggcggctttggagcaggcgctgggcgagccgtgcgatctggacgcggcgctgctgaccgacatcgaagacatgcttcagcttatcaacaaccaagacagtgacttccctggcctatttgacccaccctatgctgggagtggggcagggggcacagaccctgccagccccgataccagctccccaggcagcttgtctccacctcctgccacattgagctcctctcttgaagccttcctgagcgggccgcaggcagcgccctcacccctgtcccctccccagcctgcacccactccattgaagatgtacccgtccatgcccgctttctcccctgggcctggtatcaaggaagagtcagtgccactgagcatcctgcagacccccaccccacagcccctgccaggggccctcctgccacagagcttcccagccccagccccaccgcagttcagctccacccctgtgttaggctaccccagccctccgggaggcttctctacaggaagccctcccgggaacacccagcagccgctgcctggcctgccactggcttccccgccaggggtcccgcccgtctccttgcacacccaggtccagagtgtggtcccccagcagctactgacagtcacagctgcccccacggcagcccctgtaacgaccactgtgacctcgcagatccagcaggtcccggtcctgctgcagccccacttcatcaaggcagactcgctgcttctgacagccatgaagacagacggagccactgtgaaggcggcaggtctcagtcccctggtctctggcaccactgtgcagacagggcctttgccgaccctggtgagtggcggaaccatcttggcaacagtcccactggtcgtagatgcggagaagctgcctatcaaccggctcgcagctggcagcaaggccccggcctctgcccagagccgtggagagaagcgcacagcccacaacgccattgagaagcgctaccgctcctccatcaatgacaaaatcattgagctcaaggatctggtggtgggcactgaggcaaagctgaataaatctgctgtcttgcgcaaggccatcgactacattcgctttctgcaacacagcaaccagaaactcaagcaggagaacctaagtctgcgcactgctgtccacaaaagcaaatctctgaaggatctggtgtcggcctgtggcagtggagggaacacagacgtgctcatggagggcgtgaagactgaggtggaggacacactgaccccacccccctcggatgctggctcacctttccagagcagccccttgtcccttggcagcaggggcagtggcagcggtggcagtggcagtgactcggagcctgacagcccagtctttgaggacagcaagacagaataactgaggcctggagccac

SEQ ID NO: 4030 - DNA, 644 bp, Homo sapiens
  source 1..644: mol_type = genomic DNA
ctcatgcctgcttgccttccagggaagcacacaggcgggcacctcactgccaccaacctggcgctgagtgccctgaacctggcagagtgtgcaggggatgccgtgtctgtggcgacgctggccgagatctatgtggcggctgcattgagagtgaagaccagtctcccacgggccttgcattttctgacacgcttcttcctgagcagtgcccgccaggcctgcctggcacagagtggctcagtgcctcctgccatgcagtggctctgccaccccgtgggccaccgtttcttcgtggatggggactggtccgtgctcagtaccccatgggagagcctgtacagcttggccgggaacccagtggaccccctggcccaggtgactcagctattccgggaacatctcttagagcgagcactgaactgtgtgacccagcccaaccccagccctgggtcagctgatggggacaaggaattctcggatgccctcgggtacctgcagctgctgaacagctgttctgatgctgcgggggctcctgcctacagcttctccatcagttccagcatggccaccaccaccggagacccctgcccagggcagctctgcactccttcaaggctgcccgggccctgctgggctgtgccaag

SEQ ID NO: 4031 - DNA, 1315 bp, Homo sapiens
  source 1..1315: mol_type = genomic DNA
gagagacacagagtccggcattggtcccaggcagcagttagcccgccgcccgcctgtgtgtccccagagccatggagagagccagtctgatccagaaggccaagctggcagagcaggccgaacgctatgaggacatggcagccttcatgaaaggcgccgtggagaagggcgaggagctctcctgcgaagagcgaaacctgctctcagtagcctataagaacgtggtgggcggccagagggctgcctggagggtgctgtccagtattgagcagaaaagcaacgaggagggctcggaggagaaggggcccgaggtgcgtgagtaccgggagaaggtggagactgagctccagggcgtgtgcgacaccgtgctgggcctgctggacagccacctcatcaaggaggccggggacgccgagagccgggtcttctacctgaagatgaagggtgactactaccgctacctggccgaggtggccaccggtgacgacaagaagcgcatcattgactcagcccggtcagcctaccaggaggccatggacatcagcaagaaggagatgccgcccaccaaccccatccgcctgggcctggccctgaacttttccgtcttccactacgagatcgccaacagccccgaggaggccatctctctggccaagaccactttcgacgaggccatggctgatctgcacaccctcagcgaggactcctacaaagacagcaccctcatcatgcagctgctgcgagacaacctgacactgtggacggccgacaacgccggggaagaggggggcgaggctccccaggagccccagagctgagtgttgcccgccaccgccccgccctgccccctccagtcccccaccctgccgagaggactagtatggggtgggaggccccacccttctcccctaggcgctgttcttgctccaaagggctccgtggagagggactggcagagctgaggccacctggggctggggatcccactcttcttgcagctgttgagcgcacctaaccactggtcatgcccccacccctgctctccgcacccgcttcctcccgaccccaggaccaggctacttctcccctcctcttgcctccctcctgcccctgctgcctctgatcgtaggaattgaggagtgtcccgccttgtggctgagaactggacagtggcaggggctggagatgggtgtgtgtgtgtgtgtgtgtgtgtgtgtgtgtgtgcgcgcgcgccagtgcaagaccgagattgagggaaagcatgtctgctgggtgtgaccatgtttcctctcaataaagttcccctgtgacactc

SEQ ID NO: 4032 - DNA, 651 bp, Homo sapiens
  source 1..651: mol_type = genomic DNA
atggagagagccagtctgatccagaaggccaagctggcagagcaggccgaacgctatgaggacatggcagccttcatgaaaggcgccgtggagaagggcgaggagctctcctgcgaagagcgaaacctgctctcagtagcctataagaacgtggtgggcggccagagggctgcctggagggtgctgtccagtattgagcagaaaagcaacgaggagggctcggaggagaaggggcccgaggtgcgtgagtaccgggtcttctacctgaagatgaagggtgactactaccgctacctggccgaggtggccaccggtgacgacaagaagcgcatcattgactcagcccggtcagcctaccaggaggccatggacatcagcaagaaggagatgccgcccaccaaccccatccgcctgggcctggccctgaacttttccgtcttccactacgagatcgccaacagccccgaggaggccatctctctggccaagaccactttcgacgaggccatggctgatctgcacaccctcagcgaggactcctacaaagacagcaccctcatcatgcagctgctgcgagacaacctgacactgtggacggccgacaacgccggggaagaggggggcgaggctccccaggagccccagagctga

SEQ ID NO: 4033 - DNA, 9784 bp, Homo sapiens
  source 1..9784: mol_type = genomic DNA
aggcctggacgtattctcgcgacatttgccggtcgcccggcttgcactgcggcgtttcccgcgcgggctacctcagttctcgggcgtacggcgcggcctgtcctactgccgccggcgccgcggccgtcatggggttcctgaaactgattgagattgagaactttaagtcgtacaagggtcgacagattatcggaccatttcagaggttcaccgccatcattggacccaatggctctggtaagtcaaatctcatggatgccatcagctttgtgctaggtgaaaaaaccagcaacctgcgggtaaagaccctgcgggacctgatccatggagctcctgtgggcaagccagctgccaaccgggcctttgtcagcatggtctactctgaggagggtgctgaggaccgtacctttgcccgtgtcattgtaggaggttcttctgagtacaagatcaacaacaaagtggtccaactacatgagtacagtgaggaattagagaagttgggcattctcatcaaagctcgtaacttcctcgttttccagggtgctgtggaatctattgccatgaagaaccccaaagagaggacagctctatttgaagagattagtcgttctggggagctggcgcaggagtatgacaagcgaaagaaggaaatggtgaaggctgaagaggacacacagtttaattaccatcgcaagaaaaatattgcggctgaacgcaaggaagcaaagcaggagaaagaagaggctgaccggtaccagcgcctgaaggatgaggtagtacgggctcaggtacagctgcagctctttaagctttaccataatgaagtggaaattgagaagctcaacaaggaactggcctcaaagaacaaggagatcgagaaggacaagaagcgtatggacaaggtggaggatgaactgaaggagaagaagaaggagctgggcaaaatgatgcgggagcagcagcagattgagaaggagatcaaggagaaggactcagaattgaaccagaagcggcctcagtacatcaaagccaaggagaacacctcccacaaaatcaagaagctggaagcagccaagaagtctctgcagaatgctcagaagcactacaagaagcgtaaaggtgacatggatgagctggagaaggagatgctgtcagtggagaaggctcggcaggagtttgaagaacggatggaagaagagagtcagagtcagggcagagatttgacgttggaggagaatcaggtgaagaaataccaccggttgaaagaagaagccagcaagagagcagctaccctggcccaggagctggagaaattcaatcgagaccagaaagctgaccaggaccgtctggatctggaagaacggaagaaagtagagacagaggccaagatcaagcaaaagctgcgggaaattgaagagaatcagaagcggattgagaaactggaggaatacatcaccactagcaagcagtccctagaagagcagaagaagctagagggggagctgacagaggaggtggagatggccaagcggcgtattgatgaaatcaataaggagctgaaccaggtgatggagcagctaggggatgcccgcatcgaccgccaggagagcagccgccagcagcgaaaggcagagataatggaaagcatcaagcgcctttaccctggctctgtgtacggccgcctcattgacctatgccagcccacacaaaagaagtatcagattgctgtaaccaaggttttgggcaagaacatggatgccattattgtggactcggagaagacaggccgggactgtattcagtatatcaaggagcagcgtggggagcctgagaccttcttgcctcttgactacctggaggtgaagcctacagatgagaaactccgggagctgaagggggccaagctagtgattgatgtgattcgctatgagccacctcatatcaaaaaggccctgcagtatgcttgtggcaatgcccttgtctgtgacaacgtggaagatgcccgccgcattgcctttggaggccaccagcgccacaagacagtggcactggatggaaccctattccagaagtcaggagtgatctctggtggggccagtgacctgaaggccaaggcacggcgctgggatgagaaagcagtagacaagttgaaagagaagaaggagcgcttgacagaggagctgaaagagcagatgaaggcaaaacggaaagaggcagagctgcgtcaggtgcagtctcaggcccatggactgcagatgcggctcaagtactcccagagtgacctagaacagaccaagacacgacatctagccctgaatctgcaggaaaaatccaagctggagagtgagctagccaactttgggcctcgcattaatgatatcaagaggatcattcagagccgagagagggaaatgaaagacttgaaggagaagatgaaccaggtagaggatgaggtgtttgaagagttttgtcgggagattggtgtgcgcaacatccgggagtttgaggaagaaaaggtgaaacggcagaatgaaatcgccaagaagcgtttggagtttgagaatcagaagactcgcttgggcattcagttggattttgaaaagaaccaactgaaggaggaccaagataaagtacacatgtgggagcagacagtgaaaaaagatgaaaatgagatagaaaagctcaaaaaggaggaacaaagacacatgaagatcatagatgagaccatggctcagctacaagacctgaagaatcagcatctggccaagaagtcggaagtgaatgacaagaatcatgagatggaggagattcgtaagaaactcgggggcgccaacaaggaaatgacccatttacagaaggaggtgacagccattgagaccaagcttgaacagaagcgcagtgaccgtcacaacttgctacaggcctgtaagatgcaggacattaagttgccactgtcaaaaggcaccatggatgatattagtcaggaagagggtagctcccagggggaggactcagtgagtggttcacagagaatttccagtatctatgcacgagaggccctcattgagattgactacggtgatctgtgtgaggatctgaaggatgcccaggctgaggaagagatcaagcaagagatgaacacactgcagcagaagctgaatgagcagcagagtgtgcttcagcgtattgccgcccccaacatgaaggccatggaaaagctggaaagtgtccgagacaagttccaggagacctcagatgagtttgaagcagcccgaaagcgagcaaagaaggccaagcaggcattcgaacagatcaagaaggagcgctttgaccgcttcaatgcttgttttgaatctgtggctaccaacattgatgagatctataaggccctgtcccgcaatagcagtgcccaggcattcctgggccctgagaaccctgaagagccctacttggatggcatcaactacaactgtgtggctcctgggaaacgcttccggcctatggacaacttgtcaggcggggagaagacagtggcagctctggccctgctctttgccatccacagctacaagccagcccccttcttcgtcctggatgagattgatgctgccttggataacaccaacattggcaaggtggcaaattacatcaaggagcagtcgacttgcaacttccaggccatcgtcatctctctcaaggaggagttctacaccaaggccgagagcctcattggagtctatcctgagcaaggggactgtgtgatcagcaaagtcctgaccttcgacctcaccaagtacccagatgccaaccccaaccccaatgagcagtagcagtatttttgccctcccgccctgtctggatccctaagctgtccctctcccaatctctggatatttgactcccaaccttccccctacctcctggccctttttggtgtagtcatgggatttaggcactgctaatcaagcatgaagaggaacagaggtgatgttaggtctggagcaaaaattcctgaacgacagggagtattctggcctctgaaaggaggtgctgagctgaacagggccatctgttcatcacacacacccccttcctccccctcatcacccataatcgtgggccccttgggcctcttgcccactgtgtgtgtgggtatgtatgtgtgtatgtatgtatccgcatgtgtgcatgtgagtatgtttgcaaaataataaaggatattggagacctgttttagaaggagcctaggctgaatttgattccaagagagcttaggatgacagcacccctgagctgggcaaaggtactcaggacctcataggagtcttaggcagttacctgaaactgccttcattcactcatttgtgtattcattcatttatgtattcatcagacacataccgaacaccctctatttgtcaggctctgtgcttggaatacagagttgaatcagacatgatctctaccctcctagtaaggagatacagtgggttcatgaatgactatagttagctgaatgtcatatgtactttgaatttgagaagtgggtgatcccctctaggcttcctggaggtcacatttaagctagaccttgacaaattggtaggatttggtcaggcactaggagtggagcatgagctctggggacagacagttatgggttctggtcccactttttatcacttactagttgtttgaccttgggcaagtcatttgaccttctgtgcctcagtttcctcatctgtaaaatggggctaacaatattacctacctcataggatttaatgatgtcaagctcctcactggaggccttatcccttcgtggagcccactaggtgccgacccctcagaatataaccctcatgcctggacccctgagagcttctgatcccagctattagggacagaagaagcctccaaatctggaaggtgctgaatgccctgctgactgggaaagtttcagggcactgatggggtctacctggtaagcggagggcctgaggaaacctgtagcttcaatcatgtctggtaaccgggtgcctgagccccaatctgggttgtgaggaaataggggagaggtatcctgggccacatcccagcctaacacctgtgaggttcattttaggaactaacctcattagctataaggatcatgcagaggcagcaaagccgggtgcgatgagctcagcctttactcattcacatacaccatcacactttaattccaatctgtatattgctttttaaaagttaagtccattctaattacccaaatatgcatgaattcattctccttttgagaagttagattgttaaagatagtctcattcagctaccaaccactccttgatccttcccttcttagtggctgttgtttgttgtacttccgtttagactttgttttaatgcttgtacgtacatatgtgaactcattggaaatattgtgtgtttaatgcaaatgatatattgaattgtttagcaatttgttttctttgcttaacgatgtttttgagatctgtgcatgttacttaatgtagctcaatccatcttctgtaattgctgtatagattgtcatcatatgattaccacattttacttacgcatttcttttgtgatggacattaagactgtttttaggttttgctattacaaaatactacacaggagcatcactatgcctgtgtgaaagtatatgtatgaaagtttacctagggttgattcctagaagtggaattgcaaagtcataggatatttatatattggtttttaataatacttccaaattgccctcctgtactatttactcagtatttttcttgaggttgatctgaggtctaacattgttatcctatatcattttcatcccaagtagtgatatctgtgaaatcacaggtttgatgtgtgctaattatgtattcttctaatacatattaaaagacataactatcaaaacaaaataaatttgtctgttttcaaccaaagaagtcacgtaccactggtggtactgtgtgccataatttggcaaatgctggcctttatggacgagcacaattcgggggtcagacctggttcaaattctagctgtagaaacttgtgcaagttacttcacctctgagcctaagtttccacatctgtaaaaggagataataaacacctaccttgcagtagtgaagcaaagagaaaattaaatatatatgaagcaatttggctggcatctagatcattcacagccctttaaaggtcacctttgctgttctccccactttacagataaggaaactgaggcccaaaaaggtttgaacccaggtcttccaagtcattcaagtgctttctccactgtacaggtggttatcaaccttggctgcgcatcagaatcgtttgtaaagctttttctttttcctttttaaaaagtaaagcaatatatacacaggtaaaaaaataaaatagtacagaagggcttataatgagaagcagcagttccctgcttgcacccccacatccaaaggatgtggagctctttaaaaataaattgctctggtcccacctctggaaatctgattcagccagcatggataataacccagataactaacccctacctcacaggataaaaaggattacatgagatgccttaggctaaggccctggcacacaggaacacatgtgctacaaaggagctttggggacttaagtcctgaggatccaggaggtgaggtgacttgtccaagattccactggtttagtggcagagcctagacttccactcggatctatttagtgcttgccccctgctctctcctgtcgtgccccaccacctcctggcatcacagggcaaccgttgtcaaggctatgctcacgggaggctgggcaccacagtgtttccaagagcaagctggatccgagtagattccctagggcttgttggaggaactagtttgactcccttatactgtggacgcagtagccttgctgtagggagttgaagagtactccacaacagtatcttaagtttaactgggcacttccctctggaaatcacagtgttgtgcaccaggaacacaaagatgagtcaaatctttatcctgcctttgaggagctcactgtttagttggggaaaccatttgtaaaacagccattaaccatacagtgtgatcaacactgacaggagcacaggaaaaacatctagcttatgtgaagattcagagaaggcatcctgtagtctaggtggtgatacctgaactgagtcttgagggacgggtaggaattagccagttgaggaagtagaaggaatttccagatattggaaacagtatgcatgaagacatgaaggcaagaaacagcaaaacaaatactgaagcatgaagattcctggggtggggggaaagcagcaagaaaaggtagagaggaaccagattggaagagggtcgtaaatgcatggctacagaattcagatttgttttgtaggacagtgtggttcccaaactggctgtataccacaaacaggtacggcattctgggccccggcccctaaaacattcattaagtctggggtgaagatttggaatcttgaatgcttataaaggttaccacatgactagggtacagccagatttggaaaccatagcttgaaggcagtgagggagccatgaaatggtttttaatagggggactccagatcagatgtgaacttaacctgtttctggctggctagccaaccagcatggaaaacagattaggttagatgttcatgctgtatgtgcccgtgcctgtagcttccctgttaatcagcttcttacactactatatttgcttattttgtctctgaataagctttaggcaccacaagggtgggcctggggatattttgcttaccagtatagcccctgcaaaaaagcacagtgcctgacacaaaacaggcacccagtaaagtttttgaatgaatgaatgcatgagtgaatccatttgtgagagagcgaatggagatgacaagattagctaggagactggaaaaagaccaggaggcctgcactagggcaaaggccagtaggaatagattggaggtgttaaggtgtgaactgttaaggtaagatgataacttaatgactgattattggatgtggagggtgactgagaggatagaatgagtacccatgaatagccatgattcctaccctgtcccagtcatctctttccttatccatctctgaaacaatctgcttacatcctcctcagcaactggaattcctcaagttagttagacattctgtgtgctgtgtggtctctcactgcccccccactccccacccctccacaagccattgattcattcatccagttcaataaatcttggctaagcacctccagtgtgcagtaaggctcttccaagccaggactctgactccctctttcctacctcaagagatgtttttgagggctttcccaggtaagagtcacatctcttatacaataacttatagtgagatacccagaatgtcagacttgtaagggaagactgcccaaaccccttctgaggtcctcagaggggaattaacttcctaaggtccgactgctaggaagtgttggagccagaaatggaacctaggtttcctttctatgtcatctctggagtcttgatcttgatctatcccattgtagatcaggacaggcagaggtggtcagggagaaggtgggacttaggttgaaccttgaaggtcaatgtattggacaggtcaaacaagatggttgccaattacactgcccccttctggaaacccttagcaaacctgccatgcttgcagtcccttctaaggggtttccttagcataagttgccatgctctgtaccatgtgacctcacaatcctggccacagatagctagatgtggatagtgtctggttcaagggcaaccaatctctaggctggccagtggcctgttagctggactggcataaggacttcaccttacaggggtggcatgtatcaaatggcaaatgtatgaaacaaccagatctttcagggaggcagaatgtgagctattcagaagaagtgaacgttaattagaatttaatgaggcattagtggtggtggatgaggggtggccagaaactaaacagcaaaagcaaagagaaagctgcagaaaccataagtaagcagaggtcatgagacatttgtataatgagatcacggagccacagggtggcagaagccatgaagcagcaaggcaacaatgggctagaagccatgaagcaataggagccacgaggaacagaaaccgtgagacaaaactgactatgagatccacaaagcagcagaaggcttgaatagataagatcatgagacagtagaagcgatgagactgcaagaaccacaaggtagccagaaccatgtggcaacatggcaacaggaatggaagaggcagcaggagctacaatgcagaaaagccatggattaataggaactgaagcgccgggagccatgaagctgcaggacccatgaggcagaaaaagccatgggctagcatcgaggggggcagaaagaagttagtcagtagcagtaggaggagtataaatacagccagaaaggagttgagtcaccaatttgggaagcactagagaagggagcaacagatgcctgcagctgagggggtgacaagataagccaggctctagagctgctttggatcatgaaccattttcaagtttctgttcttccatgaggctgcctgtgtagctgttcttgtcttccttatttccctgtgaatgctttaataaatccccatcactaa

SEQ ID NO: 4034 - DNA, 677 bp, Homo sapiens
  source 1..677: mol_type = genomic DNA
gcgcgggctacctcagttctcgggcgtacggcgcggcctgtcctactgccgccggcgccgcggccgtcatggggttcctgaaactgattgagattgagaactttaagtcgtacaagggtcgacagattatcggaccatttcagaggttcaccgccatcattggacccaatggctctggtaagtcaaatctcatggatgccatcagctttgtgctaggtgaaaaaaccagcaacctgcgggtaaagaccctgcgggacctgatccatggagctcctgtgggcaagccagctgccaaccgggcctttgtcagcatggtctactctgaggagggtgctgaggaccgtacctttgcccgtgtcattgtaggaggttcttctgagtacaagatcaacaacaaagtggtccaactacatgagtacagtgaggaattagagaagttgggcattctcatcaaagctcgtaacttcctcgttttccaggggtgctgtggaatctattgccatgaaaccccaaagagaggacagctctatttgaagattagtcgttctggggagctggcgcaggagtatgacaagcgaaagaaggaaatggtgaaggctgaagaggacacacagtttaattaccatcgcaagaaaaatattgcggctgaacgcaaggaagcaaagcaggagaaagaa

SEQ ID NO: 4035 - DNA, 1761 bp, Homo sapiens
  source 1..1761: mol_type = genomic DNA
agttctcgggcgtacggcgcggcctgtcctactgccgccggcgccgcggccgtcatggggttcctgaaactgattgagattgagaactttaagtcgtacaagggtcgacagattatcggaccatttcagaggttcaccgccatcattggacccaatggctctggtaagtcaaatctcatggatgccatcagctttgtgctaggtgaaaaaaccagcaacctgcgggtaaagaccctgcgggacctgatccatggagctcctgtgggcaagccagctgccaaccgggcctttgtcagcatggtctactctgaggagggtgctgaggaccgtacctttgcccgtgtcattgtaggaggttcttctgagtacaagatcaacaacaaagtggtccaactacatgagtacagtgaggaattagagaagttgggcattctcatcaaagctcgtaacttcctcgttttccaggtgaagaaataccaccggttgaaagaagaagccagcaagagagcagctaccctggcccaggagctggagaaattcaatcgagaccagaaagctgaccaggaccgtctggatctggaagaacggaagaaagtagagacagaggccaagatcaagcaaaagctgcgggaaattgaagagaatcagaagcggattgagaaactggaggaatacatcaccactagcaagcagtccctagaagagcagaagaagctagagggggagctgacagaggaggtggagatggccaagcggcgtattgatgaaatcaataaggagctgaaccaggtgatggagcagctaggggatgcccgcatcgaccgccaggagagcagccgccagcagcgaaaggcagagataatggaaagcatcaagcgcctttaccctggctctgtgtacggccgcctcattgacctatgccagcccacacaaaagaagtatcagattgctgtaaccaaggttttgggcaagaacatggatgccattattgtggactcggagaagacaggccgggactgtattcagtatatcaaggagcagcgtggggagcctgagaccttcttgcctcttgactacctggaggtgaagcctacagatgagaaactccgggagctgaagggggccaagctagtgattgatgtgattcgctatgagccacctcatatcaaaaaggccctgcagtatgcttgtggcaatgcccttgtctgtgacaacgtggaagatgcccgccgcattgcctttggaggccaccagcgccacaagacagtggcactggatggaaccctattccagaagtcaggagtgatctctggtggggccagtgacctgaaggccaaggcacggcgctgggatgagaaagcagtagacaagttgaaagagaagaaggagcgcttgacagaggagctgaaagagcagatgaaggcaaaacggaaagaggcagagctgcgtcaggtgcagtctcaggcccatggactgcagatgcggctcaagtactcccagagtgacctagaacagaccaagacacgacatctagccctgaatctgcaggtggggcctggccttcagccctgttctccaaaggccatccacacattcctggcctaggtttctctgggggtggggaacttgtttcacttccccgtctcctcccagcctgccgcagggagtcaggtatagcatagagtcagacagccaggggttcagagcttggctctgccttgagtatgacattaggcaagtattttcacctctcagtgtcaa

SEQ ID NO: 4036 - DNA, 868 bp, Homo sapiens
  source 1..868: mol_type = genomic DNA
attggtacactccaactcctttctactcttctctggaggcggcacttttgaatttcagacccagcgctccagtctttagaatgcttgaggtgtcgatccccaccccccaccgctatgtcagaggtaagtcaaatctcatggatgccatcagctttgtgctaggtgaaaaaaccagcaacctgcgggtaaagaccctgcgggacctgatccatggagctcctgtgggcaagccagctgccaaccgggcctttgtcagcatggtctactctgaggagggtgctgaggaccgtacctttgcccgtgtcattgtaggaggttcttctgagtacaagatcaacaacaaagtggtccaactacatgagtacagtgaggaattagagaagttgggcattctcatcaaagctcgtaacttcctcgttttccagggtgctgtggaatctattgccatgaagaaccccaaagagaggacagctctatttgaagagattagtcgttctggggagctggcgcaggagtatgacaagcgaaagaaggaaatggtgaaggctgaagaggacacacagtttaattaccatcgcaagaaaaatattgcggctgaacgcaaggaagcaaagcaggagaaagaagaggctgaccggtaccagcgcctgaaggatgaggtagtacgggctcaggtacagctgcagctctttaagctttaccataatgaagtggaaattgagaagctcaacaaggaactggcctcaaagaacaaggagatcgagaaggacaagaagcgtatggacaaggtggaggatgaactgaaggagaagaagaaggagctgggcaaaatgatgcgggagcagcagcagattgagaaggagatcaa

SEQ ID NO: 4037 - DNA, 2390 bp, Homo sapiens
  source 1..2390: mol_type = genomic DNA
tccggcgtggtgcgcaggcgcggtatcccccctcccccgccagctcgaccccggtgtggtgcgcaggcgcagtctgcgcagggactggcgggactgcgcggcggcaacagcagacatgtcgggggtccggggcctgtcgcggctgctgagcgctcggcgcctggcgctggccaaggcgtggccaacagtgttgcaaacaggaacccgaggttttcacttcactgttgatgggaacaagagggcatctgctaaagtttcagattccatttctgctcagtatccagtagtggatcatgaatttgatgcagtggtggtaggcgctggaggggcaggcttgcgagctgcatttggcctttctgaggcagggtttaatacagcatgtgttaccaagctgtttcctaccaggtcacacactgttgcagcacagggaggaatcaatgctgctctggggaacatggaggaggacaactggaggtggcatttctacgacaccgtgaagggctccgactggctgggggaccaggatgccatccactacatgacggagcaggcccccgccgccgtggtcgagctagaaaattatggcatgccgtttagcagaactgaagatgggaagatttatcagcgtgcatttggtggacagagcctcaagtttggaaagggcgggcaggcccatcggtgctgctgtgtggctgatcggactggccactcgctattgcacaccttatatggaaggtctctgcgatatgataccagctattttgtggagtattttgccttggatctcctgatggagaatggggagtgccgtggtgtcatcgcactgtgcatagaggacgggtccatccatcgcataagagcaaagaacactgttgttgccacaggaggctacgggcgcacctacttcagctgcacgtctgcccacaccagcactggcgacggcacggccatgatcaccagggcaggccttccttgccaggacctagagtttgttcagttccaccctacaggcatatatggtgctggttgtctcattacggaaggatgtcgtggagagggaggcattctcattaacagtcaaggcgaaaggtttatggagcgatacgcccctgtcgcgaaggacctggcgtctagagatgtggtgtctcggtccatgactctggagatccgagaaggaagaggctgtggccctgagaaagatcacgtctacctgcagctgcaccacctacctccagagcagctggccacgcgcctgcctggcatttcagagacagccatgatcttcgctggcgtggacgtcacgaaggagccgatccctgtcctccccaccgtgcattataacatgggcggcattcccaccaactacaaggggcaggtcctgaggcacgtgaatggccaggatcagattgtgcccggcctgtacgcctgtggggaggccgcctgtgcctcggtacatggtgccaaccgcctcggggcaaactcgctcttggacctggttgtctttggtcgggcatgtgccctgagcatcgaagagtcatgcaggcctggagataaagtccctccaattaaaccaaacgctggggaagaatctgtcatgaatcttgacaaattgagatttgctgatggaagcataagaacatcggaactgcgactcagcatgcagaagtcaatgcaaaatcatgctgccgtgttccgtgtgggaagcgtgttgcaagaaggttgtgggaaaatcagcaagctctatggagacctaaagcacctgaagacgttcgaccggggaatggtctggaacacggacctggtggagaccctggagctgcagaacctgatgctgtgtgcgctgcagaccatctacggagcagaggcacggaaggagtcacggggcgcgcatgccagggaagactacaaggtgcggattgatgagtacgattactccaagcccatccaggggcaacagaagaagccctttgaggagcactggaggaagcacaccctgtcctatgtggacgttggcactgggaaggtcactctggaatatagacccgtgatcgacaaaactttgaacgaggctgactgtgccaccgtcccgccagccattcgctcctactgatgagacaagatgtggtgatgacagaatcagcttttgtaattatgtataatagctcatgcatgtgtccatgtcataactgtcttcatacgcttctgcactctggggaagaaggagtacattgaagggagattggcacctagtggctgggagcttgccaggaacccagtggccagggagcgtggcacttacctttgtcccttgcttcattcttgtgagatgataaaactgggcacagctcttaaataaaatataaatgaacaaactttcttttatttccaaa

SEQ ID NO: 4038 - DNA, 1886 bp, Homo sapiens
  source 1..1886: mol_type = genomic DNA
cgaccccggtgtggtgcgcaggcgcagtctgcgcagggactggcgggactgcgcggcggcaacagcagacatgtcgggggtccggggcctgtcgcggctgctgagcgctcggcgcctggcgctggccaaggcgtggccaacagtgttgcaaacaggaacccgaggttttcacttcactgttgatgggaacaagagggcatctgctaaagtttcagattccatttctgctcagtatccagtagtggatcatgaatttgatgcagtggtggtaggcgctggaggggcaggcttgcgagctgcatttggcctttctgaggcagggtttaatacagcatgtgttaccaagctgtttcctaccaggtcacacactgttgcagcacagggaggaatcaatgctgctctggggaacatggaggaggacaactggaggtggcatttctacgacaccagcactggcgacggcacggccatgatcaccagggcaggccttccttgccaggacctagagtttgttcagttccaccctacaggcatatatggtgctggttgtctcattacggaaggatgtcgtggagagggaggcattctcattaacagtcaaggcgaaaggtttatggagcgatacgcccctgtcgcgaaggacctggcgtctagagatgtggtgtctcggtccatgactctggagatccgagaaggaagaggctgtggccctgagaaagatcacgtctacctgcagctgcaccacctacctccagagcagctggccacgcgcctgcctggcatttcagagacagccatgatcttcgctggcgtggacgtcacgaaggagccgatccctgtcctccccaccgtgcattataacatgggcggcattcccaccaactacaaggggcaggtcctgaggcacgtgaatggccaggatcagattgtgcccggcctgtacgcctgtggggaggccgcctgtgcctcggtacatggtgccaaccgcctcggggcaaactcgctcttggacctggttgtctttggtcgggcatgtgccctgagcatcgaagagtcatgcaggcctggagataaagtccctccaattaaaccaaacgctggggaagaatctgtcatgaatcttgacaaattgagatttgctgatggaagcataagaacatcggaactgcgactcagcatgcagaagtcaatgcaaaatcatgctgccgtgttccgtgtgggaagcgtgttgcaagaaggttgtgggaaaatcagcaagctctatggagacctaaagcacctgaagacgttcgaccggggaatggtctggaacacggacctggtggagaccctggagctgcagaacctgatgctgtgtgcgctgcagaccatctacggagcagaggcacggaaggagtcacggggcgcgcatgccagggaagactacaaggtgcggattgatgagtacgattactccaagcccatccaggggcaacagaagaagccctttgaggagcactggaggaagcacaccctgtcctatgtggacgttggcactgggaaggtcactctggaatatagacccgtgatcgacaaaactttgaacgaggctgactgtgccaccgtcccgccagccattcgctcctactgatgagacaagatgtggtgatgacagaatcagcttttgtaattatgtataatagctcatgcatgtgtccatgtcataactgtcttcatacgcttctgcactctggggaagaaggagtacattgaagggagattggcacctagtggctgggagcttgccaggaacccagtggccagggagcgtggcacttacctttgtcccttgcttcattcttgtgagatgataaaactgggcacagctcttaaataaaatataaatg

SEQ ID NO: 4039 - DNA, 7586 bp, Homo sapiens
  source 1..7586: mol_type = genomic DNA
cactgctctgactgcgtcctccccaggctgaagtgtcctcaggtttcatgtggatttgcccagtaatggatggctccaccgaggccaggttggggaagttcagcctcgaggacactaggggacgaaaaacttcaaaaagaagactctttttattaatattttggcgttctttttggagaggaacttttgggatgtagcctttacctgtttcctgaatttgacatccaaaaagccttttggaaaacaccattctaaatttatcctgttctgaatcatcatcgcttctgatagatgcagttgcttgctgacatcgtgatctttgattttgtacaacgctatttgggctaacttttgggattttactttgtgcttagaatttgaaagtagtattcattggaaagagactccaagaaaatactcgaagacatcaaaagctggattcgagggtataacgtgttttgttttgttttttaaattagaaaaataaggaattgcagtgtgattttctttccccctttaacttagaggaacgaggattatacagaaatttgaaatttcaacaagaaaaacttaagcttccttggattcccacgtcaaaggaaagtttcaagctttcagaaggagttctcactcgaagataaagaacagctcgctaaccacgaaagaggaatcgatgctcagcttttagttgcacttcctaaagttgcagaattaagacaaatctttgaaccaaagaagaaagaattcttagaaatgaaaagaaaagaaagaattgccaggcgcctggaagggattgaaaatgacactcagcccatcctcttgcagagctgcacaggattggtgactcaccgcctgctggaggaagacacccctcgatacatgagagccagcgaccctgccagcccccacatcggccgatcaaatgaagaggaggaaacttctgattcttctctagaaaagcaaactcgatccaaatactgcacagaaacctccggtgtccacggtgactcaccctatggttcgggtaccatggacacccacagtctggagtccaaagccgaaagaattgcaaggtacaaagcagaaagaaggcgacagctggcagagaagtatgggctgactctggatcccgaggccgactccgagtatttatcccgctataccaagtccaggaaggagcctgatgctgtcgagaagcggggaggaaaaagtgacaaacaggaagagtcaagcagagatgctagttctctgtaccccgggaccgagacgatggggctcaggacctgtgccggtgaatccaaggactatgccctccatgtgggtgacggctcttccgacccggaggtgctgctgaacatagaaaaccaaagacgaggtcaagagctgagtgccacccggcaggcccatgacctgtccccagcagccgagagttcctcgaccttctctttctctgggcgagactcctccttcactgaagtgccacggtcccccaagcacgcccacagctcctccctgcagcaggcagcctcccggagcccctcctttggtgacccacagctatcccctgaggcccgacccagtacagggaaacccaaacatgagtggtttctccagaaagattccgaaggggacacaccttcacttatcaactggccttccagagttaaagttagagaaaaattggtgaaagaggaaagtgctcgaaacagccctgaactcgcctcagagtccgtaactcagaggagacaccagccagcgccagtccattacgtgtcatttcagtctgagcactcagcctttgatagggtccccagcaaggcagcaggctctacacgacagccaatccgtggctatgtccaacccgcagataccggtcacaccgccaagctagtgacgccagaaaccccagaaaatgcatctgagtgtagctgggtagcatcagccacccagaatgtccccaaacctcccagcttgacggttctagaaggtgacggaagggatagcccagttctccatgtctgcgagtcaaaagcagaagaagaagaaggggaaggagaaggagaagaaaaagaagaagatgtgtgcttcactgaagctctcgagcaaagcaagaaaaccctactggctttggagggtgatgggctagtgagaagcccagaagatccctctagaaatgaggactttggtaagcctgctgtgagcacagtcaccttagagcatcagaaggaactggaaaacgtggcacaaccccctcaagctccgcaccagcccactgagaggacaggcaggagcgagatggttctctacattcaaagtgagcctgtgtcccaagacgccaaaccaactggtcacaacagggaagcctcgaaaaagcgcaaggtccgtacccgctctctgtcagatttcacaggcccccctcagctccaggccttgaagtataaggacccagcttccaggagagagctggagctgcccagctccaagaccgaagggccttatggggagatcagcatgctggacacaaaagtctctgtcgcccagctccgaagtgcgttcctggcatctgccaacgcctgcaggagacctgaactcaaatcacgggtggagaggtcggctgaaggacctggcttgcccaccggtgtggaacgggagagagggtcccggaaaccaagacgctatttttctcctggtgaaagtagaaaaacttccgagagatttagaacccaacctataacttcagcagaacgaaaggaatcggataggtgcacttcacattcagaaacgccaactgtcgatgatgaagaaaaggtggatgaacgagccaagctgagcgtcgccgccaagaggttgcttttcagggagatggaaaaatcttttgatgaacaaaatgttccaaagcgacgctcaagaaacacagctgtggagcagaggctacgccgtctgcaggacaggtccctcacccagcccatcaccactgaagaggtggtcatcgcagccactgaacctatccccgcttcgtgttctgggggcacccaccctgtaatggcgagacttcctagccccactgtagctaggagcgctgtgcagcctgccagattgcaggcctctgctcaccaaaaggccttagccaaggaccagacaaatgagggcaaagagcttgctgagcaaggagaacctgattcctccactctaagcttggccgaaaagttggccttgtttaacaaattgtcccagccagtctcaaaagcgatttctacccggaacagaatagacacgagacagaggagaatgaacgctcgctatcaaactcagccagtcacactgggagaggtggagcaggtgcagagtggaaagctcattcctttctcacctgccgtgaacacatcagtgtctaccgtagcatccacggttgctccaatgtatgccggagatcttcgcacaaagccacctcttgaccacaatgcaagtgccactgactataagttttcttcttcaatagaaaattcggactctccagttagaagcattctgaaatcgcaagcttggcagcctttggtagagggtagcgagaacaagggaatgttgagagaatatggagagacagaaagcaagagagctttgacaggtcgagacagtgggatggagaagtatgggtcctttgaggaagcagaagcatcctaccccatcctgaaccgagccagggaaggagacagccataaggaatctaaatatgctgttcccagaagaggaagcctggaacgggcgaaccctcccatcacccacctcggggatgaaccgaaggaattttccatggctaaaatgaatgcacaaggaaacttggacttgagggacaggctgccctttgaagagaaggtggaggtggagaatgttatgaaaaggaagttttcactaagagcggcagagttcggggagcccacttccgagcagacggggacagctgctgggaaaactattgctcaaaccacagcccccgtgtcctggaagccccaggattcttcggaacagccacaggagaagctctgcaagaatccatgtgcgatgtttgctgctggagagatcaaaacgccgacaggggagggccttcttgactcacccagcaaaaccatgtctattaaagaaagattggcactgttgaagaaaagcggggaggaagattggagaaacagactcagcaggaggcaggagggcggcaaggcgccggccagcagcctgcacacccaggaagcagggcggtccctcatcaagaagcgggtcacagaaagtcgagagagccaaatgacgattgaggagaggaagcagctcatcactgtgagagaggaggcctggaagacgagaggcagaggagcggccaacgactcgacccagttcactgtggctggcaggatggtgaagaaaggtttggcgtcacctactgccataaccccagtagcctcacccatttgcggtaaaacaagaggcaccacacccgtttccaaacccctggaagatatcgaagccagaccagatatgcagttagaatcggacctgaagttggacaggctggaaacctttctaagaaggctgaataacaaagttggcgggatgcacgaaacggtgctcactgtcaccggcaaatctgtgaaggaggtgatgaagccagatgatgatgaaacctttgccaaattttaccgcagcgtggattataatatgccaagaagtcctgtggagatggatgaggacttcgatgtcattttcgatccttatgcacccaaattgacgtcttccgtggccgagcacaagcgggcagttaggcccaagcgccgggttcaggcctccaaaaaccccctgaaaatgctggcggcaagagaagatctccttcaggaatacactgagcagagattaaacgttgccttcatggagtcaaagcggatgaaagtagaaaagatgtcttccaactccaacttctcagaagtcaccctggcgggtttagccagtaaagaaaacttcagcaacgtcagcctgcggagcgtcaacctgacggaacagaactctaacaacagcgccgtgccctacaagaggctgatgctgttgcagattaaaggaagaagacatgtgcagaccaggctggtggaacctcgagcttcggcgctcaacagtggggactgcttcctcctgctctctccccactgctgcttcctgtgggtaggagagtttgcaaacgtcatagaaaaggcgaaggcctcagaacttgcaactttaattcagacaaagagggaacttggttgtagagctacttatatccaaaccattgaagaaggaattaatacacacactcatgcagccaaagacttctggaagcttctgggtggccaaaccagttaccaatctgctggagacccaaaagaagatgaactctatgaagcagccataatagaaactaactgcatttaccgtctcatggatgacaaacttgttcctgatgacgactactgggggaaaattccgaagtgctcccttctgcaacccaaagaggtactggtgtttgattttggtagtgaagtttacgtatggcatgggaaagaagtcacattagcacaacgaaaaatagcatttcagctggcaaagcacttatggaatggaacctttgactatgagaactgtgacatcaatcccctggatcctggagaatgcaatccgcttatccccagaaaaggacaggggcggcccgactgggcgatatttgggagacttactgaacacaatgagacgattttgttcaaagagaagtttctggattggacggaactgaagagatcgaatgagaagaaccccggggaacttgcccagcacaaggaagaccccaggactgatgtcaaggcatacgatgtgacacggatggtgtccatgccccagacgacagcaggcaccatcctggacggagtgaacgtcggccgtggctatggcctggtggaaggacacgacaggaggcagtttgagatcaccagcgtttccgtggatgtctggcacatcctggaattcgactatagcaggctccccaaacaaagcatcgggcagttccatgagggggatgcctatgtggtcaagtggaagttcatggtgagcacggcagtgggaagtcgccagaagggagagcactcggtgagggcagccggcaaagagaagtgcgtctacttcttctggcaaggccggcactccaccgtgagtgagaagggcacgtcggcgctgatgacggtggagctggacgaggaaaggggggcccaggtccaggttctccagggaaaggagcccccctgtttcctgcagtgtttccagggggggatggtggtgcactcggggaggcgggaagaggaagaagaaaatgtgcaaagtgagtggcggctgtactgcgtgcgtggagaggtgcccgtggaagggaatttgctggaagtggcctgtcactgtagcagcctgaggtccagaacttccatggtggtgcttaacgtcaacaaggccctcatctacctgtggcacggatgcaaagcccaggcccacacgaaggaggtcggaaggaccgctgcgaacaagatcaaggaacaatgtcccctggaagcaggactgcatagtagcagcaaagtcacaatacacgagtgtgatgaaggctccgagccactcggattctgggatgccttaggaaggagagacaggaaagcctacgattgcatgcttcaagatcctggaagttttaacttcgcgccccgcctgttcatcctcagcagctcctctggggattttgcagccacagagtttgtgtaccctgcccgagccccctctgtggtcagttccatgcccttcctgcaggaagatctgtacagcgcgccccagccagcacttttccttgttgacaatcaccacgaggtgtacctctggcaaggctggtggcccatcgagaacaagatcactggttccgcccgcatccgctgggcctccgaccggaagagtgcgatggagactgtgctccagtactgcaaaggaaaaaatctcaagaaaccagcccccaagtcttaccttatccacgctggtctggagcccctgacattcaccaatatgtttcccagctgggagcacagagaggacatcgctgagatcacagagatggacacggaagtttccaatcagatcaccctcgtggaagacgtcttagccaagctctgtaaaaccatttacccgctggccgacctcctggccaggccactcccggagggggtcgatcctctgaagcttgagatctatctcaccgacgaagacttcgagtttgcactagacatgacgagggatgaatacaacgccctgcccgcctggaagcaggtgaacctgaagaaagcaaaaggcctgttctgagtggggagacgccagaggagcctcacggtcacgtccaacaacaccactgcaccagggaaatggatatatatttttggactggtgtttttcacaaagtatttttcaatcagagttttcagaacctgacattgttaaagatactgcttgtcccggagttgtgtattttgtaaatgttcaagggaactgtt

SEQ ID NO: 4040 - DNA, 7994 bp, Homo sapiens
  source 1..7994: mol_type = genomic DNA
tcggcgggaagcggcgatcctgccaccgggaggtgtggaagagccgggtagattctggctacattggagattggttgctttctaaaactgaaggagaagcccatgaagagatggtggattctcactgagttttgactagcggaagaaaagagagagttcaagtggatggccttgaggacttgaaaagctgagatatgatgattttgaagtcatttcacatcgaagccatgatttaaatatcggcgttaagatttcaacaagaaaaacttaagcttccttggattcccacgtcaaaggaaagtttcaagctttcagaaggagttctcactcgaagataaagaacagctcgctaaccacgaaagaggaatcgatgctcagcttttagttgcacttcctaaagttgcagaattaagacaaatctttgaaccaaagaagaaagaattcttagaaatgaaaagaaaagaaagaattgccaggcgcctggaagggattgaaaatgacactcagcccatcctcttgcagagctgcacaggattggtgactcaccgcctgctggaggaagacacccctcgatacatgagagccagcgaccctgccagcccccacatcggccgatcaaatgaagaggaggaaacttctgattcttctctagaaaagcaaactcgatccaaatactgcacagaaacctccggtgtccacggtgactcaccctatggttcgggtaccatggacacccacagtctggagtccaaagccgaaagaattgcaaggtacaaagcagaaagaaggcgacagctggcagagaagtatgggctgactctggatcccgaggccgactccgagtatttatcccgctataccaagtccaggaaggagcctgatgctgtcgagaagcggggaggaaaaagtgacaaacaggaagagtcaagcagagatgctagttctctgtaccccgggaccgagacgatggggctcaggacctgtgccggtgaatccaaggactatgccctccatgtgggtgacggctcttccgacccggaggtgctgctgaacatagaaaaccaaagacgaggtcaagagctgagtgccacccggcaggcccatgacctgtccccagcagccgagagttcctcgaccttctctttctctgggcgagactcctccttcactgaagtgccacggtcccccaagcacgcccacagctcctccctgcagcaggcagcctcccggagcccctcctttggtgacccacagctatcccctgaggcccgacccagtacagggaaacccaaacatgagtggtttctccagaaagattccgaaggggacacaccttcacttatcaactggccttccagagttaaagttagagaaaaattggtgaaagaggaaagtgctcgaaacagccctgaactcgcctcagagtccgtaactcagaggagacaccagccagcgccagtccattacgtgtcatttcagtctgagcactcagcctttgatagggtccccagcaaggcagcaggctctacacgacagccaatccgtggctatgtccaacccgcagataccggtcacaccgccaagctagtgacgccagaaaccccagaaaatgcatctgagtgtagctgggtagcatcagccacccagaatgtccccaaacctcccagcttgacggttctagaaggtgacggaagggatagcccagttctccatgtctgcgagtcaaaagcagaagaagaagaaggggaaggagaaggagaagaaaaagaagaagatgtgtgcttcactgaagctctcgagcaaagcaagaaaaccctactggctttggagggtgatgggctagtgagaagcccagaagatccctctagaaatgaggactttggtaagcctgctgtgagcacagtcaccttagagcatcagaaggaactggaaaacgtggcacaaccccctcaagctccgcaccagcccactgagaggacaggcaggagcgagatggttctctacattcaaagtgagcctgtgtcccaagacgccaaaccaactggtcacaacagggaagcctcgaaaaagcgcaaggtccgtacccgctctctgtcagatttcacaggcccccctcagctccaggccttgaagtataaggacccagcttccaggagagagctggagctgcccagctccaagaccgaagggccttatggggagatcagcatgctggacacaaaagtctctgtcgcccagctccgaagtgcgttcctggcatctgccaacgcctgcaggagacctgaactcaaatcacgggtggagaggtcggctgaaggacctggcttgcccaccggtgtggaacgggagagagggtcccggaaaccaagacgctatttttctcctggtgaaagtagaaaaacttccgagagatttagaacccaacctataacttcagcagaacgaaaggaatcggataggtgcacttcacattcagaaacgccaactgtcgatgatgaagaaaaggtggatgaacgagccaagctgagcgtcgccgccaagaggttgcttttcagggagatggaaaaatcttttgatgaacaaaatgttccaaagcgacgctcaagaaacacagctgtggagcagaggctacgccgtctgcaggacaggtccctcacccagcccatcaccactgaagaggtggtcatcgcagccactgaacctatccccgcttcgtgttctgggggcacccaccctgtaatggcgagacttcctagccccactgtagctaggagcgctgtgcagcctgccagattgcaggcctctgctcaccaaaaggccttagccaaggaccagacaaatgagggcaaagagcttgctgagcaaggagaacctgattcctccactctaagcttggccgaaaagttggccttgtttaacaaattgtcccagccagtctcaaaagcgatttctacccggaacagaatagacacgagacagaggagaatgaacgctcgctatcaaactcagccagtcacactgggagaggtggagcaggtgcagagtggaaagctcattcctttctcacctgccgtgaacacatcagtgtctaccgtagcatccacggttgctccaatgtatgccggagatcttcgcacaaagccacctcttgaccacaatgcaagtgccactgactataagttttcttcttcaatagaaaattcggactctccagttagaagcattctgaaatcgcaagcttggcagcctttggtagagggtagcgagaacaagggaatgttgagagaatatggagagacagaaagcaagagagctttgacaggtcgagacagtgggatggagaagtatgggtcctttgaggaagcagaagcatcctaccccatcctgaaccgagccagggaaggagacagccataaggaatctaaatatgctgttcccagaagaggaagcctggaacgggcgaaccctcccatcacccacctcggggatgaaccgaaggaattttccatggctaaaatgaatgcacaaggaaacttggacttgagggacaggctgccctttgaagagaaggtggaggtggagaatgttatgaaaaggaagttttcactaagagcggcagagttcggggagcccacttccgagcagacggggacagctgctgggaaaactattgctcaaaccacagcccccgtgtcctggaagccccaggattcttcggaacagccacaggagaagctctgcaagaatccatgtgcgatgtttgctgctggagagatcaaaacgccgacaggggagggccttcttgactcacccagcaaaaccatgtctattaaagaaagattggcactgttgaagaaaagcggggaggaagattggagaaacagactcagcaggaggcaggagggcggcaaggcgccggccagcagcctgcacacccaggaagcagggcggtccctcatcaagaagcgggtcacagaaagtcgagagagccaaatgacgattgaggagaggaagcagctcatcactgtgagagaggaggcctggaagacgagaggcagaggagcggccaacgactcgacccagttcactgtggctggcaggatggtgaagaaaggtttggcgtcacctactgccataaccccagtagcctcacccatttgcggtaaaacaagaggcaccacacccgtttccaaacccctggaagatatcgaagccagaccagatatgcagttagaatcggacctgaagttggacaggctggaaacctttctaagaaggctgaataacaaagttggcgggatgcacgaaacggtgctcactgtcaccggcaaatctgtgaaggaggtgatgaagccagatgatgatgaaacctttgccaaattttaccgcagcgtggattataatatgccaagaagtcctgtggagatggatgaggacttcgatgtcattttcgatccttatgcacccaaattgacgtcttccgtggccgagcacaagcgggcagttaggcccaagcgccgggttcaggcctccaaaaaccccctgaaaatgctggcggcaagagaagatctccttcaggaatacactgagcagagattaaacgttgccttcatggagtcaaagcggatgaaagtagaaaagatgtcttccaactccaacttctcagaagtcaccctggcgggtttagccagtaaagaaaacttcagcaacgtcagcctgcggagcgtcaacctgacggaacagaactctaacaacagcgccgtgccctacaagaggctgatgctgttgcagattaaaggaagaagacatgtgcagaccaggctggtggaacctcgagcttcggcgctcaacagtggggactgcttcctcctgctctctccccactgctgcttcctgtgggtaggagagtttgcaaacgtcatagaaaaggcgaaggcctcagaacttgcaactttaattcagacaaagagggaacttggttgtagagctacttatatccaaaccattgaagaaggaattaatacacacactcatgcagccaaagacttctggaagcttctgggtggccaaaccagttaccaatctgctggagacccaaaagaagatgaactctatgaagcagccataatagaaactaactgcatttaccgtctcatggatgacaaacttgttcctgatgacgactactgggggaaaattccgaagtgctcccttctgcaacccaaagaggtactggtgtttgattttggtagtgaagtttacgtatggcatgggaaagaagtcacattagcacaacgaaaaatagcatttcagctggcaaagcacttatggaatggaacctttgactatgagaactgtgacatcaatcccctggatcctggagaatgcaatccgcttatccccagaaaaggacaggggcggcccgactgggcgatatttgggagacttactgaacacaatgagacgattttgttcaaagagaagtttctggattggacggaactgaagagatcgaatgagaagaaccccggggaacttgcccagcacaaggaagaccccaggactgatgtcaaggcatacgatgtgacacggatggtgtccatgccccagacgacagcaggcaccatcctggacggagtgaacgtcggccgtggctatggcctggtggaaggacacgacaggaggcagtttgagatcaccagcgtttccgtggatgtctggcacatcctggaattcgactatagcaggctccccaaacaaagcatcgggcagttccatgagggggatgcctatgtggtcaagtggaagttcatggtgagcacggcagtgggaagtcgccagaagggagagcactcggtgagggcagccggcaaagagaagtgcgtctacttcttctggcaaggccggcactccaccgtgagtgagaagggcacgtcggcgctgatgacggtggagctggacgaggaaaggggggcccaggtccaggttctccagggaaaggagcccccctgtttcctgcagtgtttccagggggggatggtggtgcactcggggaggcgggaagaggaagaagaaaatgtgcaaagtgagtggcggctgtactgcgtgcgtggagaggtgcccgtggaagggaatttgctggaagtggcctgtcactgtagcagcctgaggtccagaacttccatggtggtgcttaacgtcaacaaggccctcatctacctgtggcacggatgcaaagcccaggcccacacgaaggaggtcggaaggaccgctgcgaacaagatcaaggaacaatgtcccctggaagcaggactgcatagtagcagcaaagtcacaatacacgagtgtgatgaaggctccgagccactcggattctgggatgccttaggaaggagagacaggaaagcctacgattgcatgcttcaagatcctggaagttttaacttcgcgccccgcctgttcatcctcagcagctcctctggggattttgcagccacagagtttgtgtaccctgcccgagccccctctgtggtcagttccatgcccttcctgcaggaagatctgtacagcgcgccccagccagcacttttccttgttgacaatcaccacgaggtgtacctctggcaaggctggtggcccatcgagaacaagatcactggttccgcccgcatccgctgggcctccgaccggaagagtgcgatggagactgtgctccagtactgcaaaggaaaaaatctcaagaaaccagcccccaagtcttaccttatccacgctggtctggagcccctgacattcaccaatatgtttcccagctgggagcacagagaggacatcgctgagatcacagagatggacacggaagtttccaatcagatcaccctcgtggaagacgtcttagccaagctctgtaaaaccatttacccgctggccgacctcctggccaggccactcccggagggggtcgatcctctgaagcttgagatctatctcaccgacgaagacttcgagtttgcactagacatgacgagggatgaatacaacgccctgcccgcctggaagcaggtgaacctgaagaaagcaaaaggcctgttctgagtggggagacgccagaggagcctcacggtcacgtccaacaacaccactgcaccagggaaatggatatatatttttggactggtgtttttcacaaagtatttttcaatcagagttttcagaacctgacattgttaaagatactgcttgtcccggagttgtgtattttgtaaatgttcaagggaactgtttggaaacttctttccaccattcaggaggttatcagaattaataaaagtatctgttatgtgcacttaagccgcagctgctatagatagcactgccttcttgttccagctaggcaatgccttttttttttttttttgaagcagttctctttataaagtgttattttgatagtttgtggattctaaaatatatatatatttatataaacaccatataagtcaaatatgtatttaacaaagcaatatgtattcattcactttcaagatttgttttggtgtcaaaataacatgaaaaggtagatggagttgcttctgttgaattagctctgccaccaatatgtatcttcatacacgtttggaaatgtttcctgcagcattaggtatgacttgttctgagtactgcttccggtgctaaaatgaacaaagaatttgtacttaatggcatggactctggagaatctatgcgaatcaacctttctaccttaatatctccccaaaaatgtatagtgccttgtttttatgtacagtttatatacagaaaagtttgctctgcatttttgatgatggtttggaacattatctacaattttactctcaaatagtcaaaataaaaacatctcaatttctaataccggttgtaaacagtacacatgtcattttgtgatataggactcccaaataaaagtatcagaataaacacaacaattaactggt

SEQ ID NO: 4041 - DNA, 6729 bp, Homo sapiens
  source 1..6729: mol_type = genomic DNA
ctgtcggcgggaagcggcgatcctgccaccgggaggtgtggaagagccgggtagattctggctacattggagattggttgctttctaaaactgaaggagaagcccatgaagagatggtggattctcactgagttttgactagcggaagaaaagagagagttcaagtggatggccttgaggacttgaaaagctgagatatgatgattttgaagtcatttcacatcgaagccatgatttaaatatcggcgttaagatttcaacaagaaaaacttaagcttccttggattcccacgtcaaaggaaagtttcaagctttcagaaggagttctcactcgaagataaagaacagctcgctaaccacgaaagaggaatcgatgctcagcttttagttgcacttcctaaagttgcagaattaagacaaatctttgaaccaaagaagaaagaattcttagaaatgaaaagaaaagaaagaattgccaggcgcctggaagggattgaaaatgacactcagcccatcctcttgcagagctgcacaggattggtgactcaccgcctgctggaggaagacacccctcgatacatgagagccagcgaccctgccagcccccacatcggccgatcaaatgaagaggaggaaacttctgattcttctctagaaaagcaaactcgatccaaatactgcacagaaacctccggtgtccacggtgactcaccctatggttcgggtaccatggacacccacagtctggagtccaaagccgaaagaattgcaaggtacaaagcagaaagaaggcgacagctggcagagaagtatgggctgactctggatcccgaggccgactccgagtatttatcccgctataccaagtccaggaaggagcctgatgctgtcgagaagcggggaggaaaaagtgacaaacaggaagagtcaagcagagatgctagttctctgtaccccgggaccgagacgatggggctcaggacctgtgccggtgaatccaaggactatgccctccatgtgggtgacggctcttccgacccggaggtgctgctgaacatagaaaaccaaagacgaggtcaagagctgagtgccacccggcaggcccatgacctgtccccagcagccgagagttcctcgaccttctctttctctgggcgagactcctccttcactgaagtgccacggtcccccaagcacgcccacagctcctccctgcagcaggcagcctcccggagcccctcctttggtgacccacagctatcccctgaggcccgacccaggtgcacttcacattcagaaacgccaactgtcgatgatgaagaaaaggtggatgaacgagccaagctgagcgtcgccgccaagaggttgcttttcagggagatggaaaaatcttttgatgaacaaaatgttccaaagcgacgctcaagaaacacagctgtggagcagaggctacgccgtctgcaggacaggtccctcacccagcccatcaccactgaagaggtggtcatcgcagccacattgcaggcctctgctcaccaaaaggccttagccaaggaccagacaaatgagggcaaagagcttgctgagcaaggagaacctgattcctccactctaagcttggccgaaaagttggccttgtttaacaaattgtcccagccagtctcaaaagcgatttctacccggaacagaatagacacgagacagaggagaatgaacgctcgctatcaaactcagccagtcacactgggagaggtggagcaggtgcagagtggaaagctcattcctttctcacctgccgtgaacacatcagtgtctaccgtagcatccacggttgctccaatgtatgccggagatcttcgcacaaagccacctcttgaccacaatgcaagtgccactgactataagttttcttcttcaatagaaaattcggactctccagttagaagcattctgaaatcgcaagcttggcagcctttggtagagggtagcgagaacaagggaatgttgagagaatatggagagacagaaagcaagagagctttgacaggtcgagacagtgggatggagaagtatgggtcctttgaggaagcagaagcatcctaccccatcctgaaccgagccagggaaggagacagccataaggaatctaaatatgctgttcccagaagaggaagcctggaacgggcgaaccctcccatcacccacctcggggatgaaccgaaggaattttccatggctaaaatgaatgcacaaggaaacttggacttgagggacaggctgccctttgaagagaaggtggaggtggagaatgttatgaaaaggaagttttcactaagagcggcagagttcggggagcccacttccgagcagacggggacagctgctgggaaaactattgctcaaaccacagcccccgtgtcctggaagccccaggattcttcggaacagccacaggagaagctctgcaagaatccatgtgcgatgtttgctgctggagagatcaaaacgccgacaggggagggccttcttgactcacccagcaaaaccatgtctattaaagaaagattggcactgttgaagaaaagcggggaggaagattggagaaacagactcagcaggaggcaggagggcggcaaggcgccggccagcagcctgcacacccaggaagcagggcggtccctcatcaagaagcgggtcacagaaagtcgagagagccaaatgacgattgaggagaggaagcagctcatcactgtgagagaggaggcctggaagacgagaggcagaggagcggccaacgactcgacccagttcactgtggctggcaggatggtgaagaaaggtttggcgtcacctactgccataaccccagtagcctcacccatttgcggtaaaacaagaggcaccacacccgtttccaaacccctggaagatatcgaagccagaccagatatgcagttagaatcggacctgaagttggacaggctggaaacctttctaagaaggctgaataacaaagttggcgggatgcacgaaacggtgctcactgtcaccggcaaatctgtgaaggaggtgatgaagccagatgatgatgaaacctttgccaaattttaccgcagcgtggattataatatgccaagaagtcctgtggagatggatgaggacttcgatgtcattttcgatccttatgcacccaaattgacgtcttccgtggccgagcacaagcgggcagttaggcccaagcgccgggttcaggcctccaaaaaccccctgaaaatgctggcggcaagagaagatctccttcaggaatacactgagcagagattaaacgttgccttcatggagtcaaagcggatgaaagtagaaaagatgtcttccaactccaacttctcagaagtcaccctggcgggtttagccagtaaagaaaacttcagcaacgtcagcctgcggagcgtcaacctgacggaacagaactctaacaacagcgccgtgccctacaagaggctgatgctgttgcagattaaaggaagaagacatgtgcagaccaggctggtggaacctcgagcttcggcgctcaacagtggggactgcttcctcctgctctctccccactgctgcttcctgtgggtaggagagtttgcaaacgtcatagaaaaggcgaaggcctcagaacttgcaactttaattcagacaaagagggaacttggttgtagagctacttatatccaaaccattgaagaaggaattaatacacacactcatgcagccaaagacttctggaagcttctgggtggccaaaccagttaccaatctgctggagacccaaaagaagatgaactctatgaagcagccataatagaaactaactgcatttaccgtctcatggatgacaaacttgttcctgatgacgactactgggggaaaattccgaagtgctcccttctgcaacccaaagaggtactggtgtttgattttggtagtgaagtttacgtatggcatgggaaagaagtcacattagcacaacgaaaaatagcatttcagctggcaaagcacttatggaatggaacctttgactatgagaactgtgacatcaatcccctggatcctggagaatgcaatccgcttatccccagaaaaggacaggggcggcccgactgggcgatatttgggagacttactgaacacaatgagacgattttgttcaaagagaagtttctggattggacggaactgaagagatcgaatgagaagaaccccggggaacttgcccagcacaaggaagaccccaggactgatgtcaaggcatacgatgtgacacggatggtgtccatgccccagacgacagcaggcaccatcctggacggagtgaacgtcggccgtggctatggcctggtggaaggacacgacaggaggcagtttgagatcaccagcgtttccgtggatgtctggcacatcctggaattcgactatagcaggctccccaaacaaagcatcgggcagttccatgagggggatgcctatgtggtcaagtggaagttcatggtgagcacggcagtgggaagtcgccagaagggagagcactcggtgagggcagccggcaaagagaagtgcgtctacttcttctggcaaggccggcactccaccgtgagtgagaagggcacgtcggcgctgatgacggtggagctggacgaggaaaggggggcccaggtccaggttctccagggaaaggagcccccctgtttcctgcagtgtttccagggggggatggtggtgcactcggggaggcgggaagaggaagaagaaaatgtgcaaagtgagtggcggctgtactgcgtgcgtggagaggtgcccgtggaagggaatttgctggaagtggcctgtcactgtagcagcctgaggtccagaacttccatggtggtgcttaacgtcaacaaggccctcatctacctgtggcacggatgcaaagcccaggcccacacgaaggaggtcggaaggaccgctgcgaacaagatcaaggaacaatgtcccctggaagcaggactgcatagtagcagcaaagtcacaatacacgagtgtgatgaaggctccgagccactcggattctgggatgccttaggaaggagagacaggaaagcctacgattgcatgcttcaagatcctggaagttttaacttcgcgccccgcctgttcatcctcagcagctcctctggggattttgcagccacagagtttgtgtaccctgcccgagccccctctgtggtcagttccatgcccttcctgcaggaagatctgtacagcgcgccccagccagcacttttccttgttgacaatcaccacgaggtgtacctctggcaaggctggtggcccatcgagaacaagatcactggttccgcccgcatccgctgggcctccgaccggaagagtgcgatggagactgtgctccagtactgcaaaggaaaaaatctcaagaaaccagcccccaagtcttaccttatccacgctggtctggagcccctgacattcaccaatatgtttcccagctgggagcacagagaggacatcgctgagatcacagagatggacacggaagtttccaatcagatcaccctcgtggaagacgtcttagccaagctctgtaaaaccatttacccgctggccgacctcctggccaggccactcccggagggggtcgatcctctgaagcttgagatctatctcaccgacgaagacttcgagtttgcactagacatgacgagggatgaatacaacgccctgcccgcctggaagcaggtgaacctgaagaaagcaaaaggcctgttctgagtggggagacgccagaggagcctcacggtcacgtccaacaacaccactgcaccagggaaatggatatatatttttggactggtgtttttcacaaagtatttttcaatcagagttttcagaacctgacattgttaaagatactgcttgtcccggagttgtgtattttgtaaatgttcaagggaactgtttggaaacttctttccaccattcaggaggttatcagaattaataaaagtatctgttatgtgcacttaagccgcagctgctatagatagcactgccttcttgttccagctaggcaatgccttttttttttttttttgaagcagttctctttataaagtgttattttgatagtttgtggattctaaaatatatatatatttatataaacaccatataagtcaaatatgtatttaacaaagcaatatgtattcattcactttcaagatttgttttggtgtcaaaataacatgaaaaggtagatggagttgcttctgttgaattagctctgccaccaatatgtatcttcatacacgtttggaaatgtttcctgcagcattaggtatgacttgttctgagtactgcttccggtgctaaaatgaacaaagaatttgtacttaatggcatggactctggagaatctatgcgaatcaacctttctaccttaatatctccccaaaaatgtatagtgccttgtttttatgtacagtttatatacagaaaagtttgctctgcatttttgatgatggtttggaacattatctacaattttactctcaaatagtcaaaataaaaacatctcaatttctaataccggttgtaaacagtacacatgtcattttgtgatataggactcccaaataaaagtatcagaataaacacaacaattaactggttcacattgaa

SEQ ID NO: 4042 - DNA, 3556 bp, Homo sapiens
  source 1..3556: mol_type = genomic DNA
agccacaggagaagctctgcaagaatccatgtgcgatgtttgctgctggagagatcaaaacgccgacaggggagggccttcttgactcacccagcaaaaccatgtctattaaagaaagattggcactgttgaagaaaagcggggaggaagattggagaaacagactcagcaggaggcaggagggcggcaaggcgccggccagcagcctgcacacccaggaagcagggcggtccctcatcaagaaggaagaaggaggagttgcggatgatagtgccatttctaatctgctttggcgggtcacagaaagtcgagagagccaaatgacgattgaggagaggaagcagctcatcactgtgagagaggaggcctggaagacgagaggcagaggagcggccaacgactcgacccagttcactgtggctggcaggatggtgaagaaaggtttggcgtcacctactgccataaccccagtagcctcacccatttgcggtaaaacaagaggcaccacacccgtttccaaacccctggaagatatcgaagccagaccagatatgcagttagaatcggacctgaagttggacaggctggaaacctttctaagaaggctgaataacaaagttggcgggatgcacgaaacggtgctcactgtcaccggcaaatctgtgaaggaggtgatgaagccagatgatgatgaaacctttgccaaattttaccgcagcgtggattataatatgccaagaagtcctgtggagatggatgaggacttcgatgtcattttcgatccttatgcacccaaattgacgtcttccgtggccgagcacaagcgggcagttaggcccaagcgccgggttcaggcctccaaaaaccccctgaaaatgctggcggcaagagaagatctccttcaggaatacactgagcagagattaaacgttgccttcatggagtcaaagcggatgaaagtagaaaagatgtcttccaactccaacttctcagaagtcaccctggcgggtttagccagtaaagaaaacttcagcaacgtcagcctgcggagcgtcaacctgacggaacagaactctaacaacagcgccgtgccctacaagaggctgatgctgttgcagattaaaggaagaagacatgtgcagaccaggctggtggaacctcgagcttcggcgctcaacagtggggactgcttcctcctgctctctccccactgctgcttcctgtgggtaggagagtttgcaaacgtcatagaaaaggcgaaggcctcagaacttgcaactttaattcagacaaagagggaacttggttgtagagctacttatatccaaaccattgaagaaggaattaatacacacactcatgcagccaaagacttctggaagcttctgggtggccaaaccagttaccaatctgctggagacccaaaagaagatgaactctatgaagcagccataatagaaactaactgcatttaccgtctcatggatgacaaacttgttcctgatgacgactactgggggaaaattccgaagtgctcccttctgcaacccaaagaggtactggtgtttgattttggtagtgaagtttacgtatggcatgggaaagaagtcacattagcacaacgaaaaatagcatttcagctggcaaagcacttatggaatggaacctttgactatgagaactgtgacatcaatcccctggatcctggagaatgcaatccgcttatccccagaaaaggacaggggcggcccgactgggcgatatttgggagacttactgaacacaatgagacgattttgttcaaagagaagtttctggattggacggaactgaagagatcgaatgagaagaaccccggggaacttgcccagcacaaggaagaccccaggactgatgtcaaggcatacgatgtgacacggatggtgtccatgccccagacgacagcaggcaccatcctggacggagtgaacgtcggccgtggctatggcctggtggaaggacacgacaggaggcagtttgagatcaccagcgtttccgtggatgtctggcacatcctggaattcgactatagcaggctccccaaacaaagcatcgggcagttccatgagggggatgcctatgtggtcaagtggaagttcatggtgagcacggcagtgggaagtcgccagaagggagagcactcggtgagggcagccggcaaagagaagtgcgtctacttcttctggcaaggccggcactccaccgtgagtgagaagggcacgtcggcgctgatgacggtggagctggacgaggaaaggggggcccaggtccaggttctccagggaaaggagcccccctgtttcctgcagtgtttccagggggggatggtggtgcactcggggaggcgggaagaggaagaagaaaatgtgcaaagtgagtggcggctgtactgcgtgcgtggagaggtgcccgtggaagggaatttgctggaagtggcctgtcactgtagcagcctgaggtccagaacttccatggtggtgcttaacgtcaacaaggccctcatctacctgtggcacggatgcaaagcccaggcccacacgaaggaggtcggaaggaccgctgcgaacaagatcaaggaacaatgtcccctggaagcaggactgcatagtagcagcaaagtcacaatacacgagtgtgatgaaggctccgagccactcggattctgggatgccttaggaaggagagacaggaaagcctacgattgcatgcttcaagatcctggaagttttaacttcgcgccccgcctgttcatcctcagcagctcctctggggattttgcagccacagagtttgtgtaccctgcccgagccccctctgtggtcagttccatgcccttcctgcaggaagatctgtacagcgcgccccagccagcacttttccttgttgacaatcaccacgaggtgtacctctggcaaggctggtggcccatcgagaacaagatcactggttccgcccgcatccgctgggcctccgaccggaagagtgcgatggagactgtgctccagtactgcaaaggaaaaaatctcaagaaaccagcccccaagtcttaccttatccacgctggtctggagcccctgacattcaccaatatgtttcccagctgggagcacagagaggacatcgctgagatcacagagatggacacggaagtttccaatcagatcaccctcgtggaagacgtcttagccaagctctgtaaaaccatttacccgctggccgacctcctggccaggccactcccggagggggtcgatcctctgaagcttgagatctatctcaccgacgaagacttcgagtttgcactagacatgacgagggatgaatacaacgccctgcccgcctggaagcaggtgaacctgaagaaagcaaaaggcctgttctgagtggggagacgccagaggagcctcacggtcacgtccaacaacaccactgcaccagggaaatggatatatatttttggactggtgtttttcacaaagtatttttcaatcagagttttcagaacctgacattgtta

SEQ ID NO: 4043 - DNA, 6192 bp, Homo sapiens
  source 1..6192: mol_type = genomic DNA
cactgctctgactgcgtcctccccaggctgaagtgtcctcaggtttcatgtggatttgcccagtaatggatggctccaccgaggccaggttggggaagttcagcctcgaggacactaggggacgaaaaacttcaaaaagaagactctttttattaatattttggcgttctttttggagaggaacttttgggatgtagcctttacctgtttcctgaatttgacatccaaaaagccttttggaaaacaccattctaaatttatcctgttctgaatcatcatcgcttctgatagatgcagttgcttgctgacatcgtgatctttgattttgtacaacgctatttgggctaacttttgggattttactttgtgcttagaatttgaaagtagtattcattggaaagagactccaagaaaatactcgaagacatcaaaagctggattcgagggtataacgtgttttgttttgttttttaaattagaaaaataaggaattgcagtgtgattttctttccccctttaacttagaggaacgaggattatacagaaatttgaaatttcaacaagaaaaacttaagcttccttggattcccacgtcaaaggaaagtttcaagctttcagaaggagttctcactcgaagataaagaacagctcgctaaccacgaaagaggaatcgatgctcagcttttagttgcacttcctaaagttgcagaattaagacaaatctttgaaccaaagaagaaagaattcttagaaatgaaaagaaaagaaagaattgccaggcgcctggaagggattgaaaatgacactcagcccatcctcttgcagagctgcacaggattggtgactcaccgcctgctggaggaagacacccctcgatacatgagagccagcgaccctgccagcccccacatcggccgatcaaatgaagaggaggaaacttctgattcttctctagaaaagcaaactcgatccaaatactgcacagaaacctccggtgtccacggtgactcaccctatggttcgggtaccatggacacccacagtctggagtccaaagccgaaagaattgcaaggtacaaagcagaaagaaggcgacagctggcagagaagtatgggctgactctggatcccgaggccgactccgagtatttatcccgctataccaagtccaggaaggagcctgatgctgtcgagaagcggggaggaaaaagtgacaaacaggaagagtcaagcagagatgctagttctctgtaccccgggaccgagacgatggggctcaggacctgtgccggtgaatccaaggactatgccctccatgtgggtgacggctcttccgacccggaggtgctgctgaacatagaaaaccaaagacgaggtcaagagctgagtgccacccggcaggcccatgacctgtccccagcagccgagagttcctcgaccttctctttctctgggcgagactcctccttcactgaagtgccacggtcccccaagcacgcccacagctcctccctgcagcaggcagcctcccggagcccctcctttggtgacccacagctatcccctgaggcccgacccagtacagggaaacccaaacatgagtggtttctccagaaagattccgaaggggacacaccttcacttatcaactggccttccagagttaaagttagagaaaaattggtgaaagaggaaagtgctcgaaacagccctgaactcgcctcagagtccgtaactcagaggagacaccagccagcgccagtccattacgtgtcatttcagtctgagcactcagcctttgatagggtccccagcaaggcagcaggctctacacgacagccaatccgtggctatgtccaacccgcagataccggtcacaccgccaagctagtgacgccagaaaccccagaaaatgcatctgagtgtagctgggtagcatcagccacccagaatgtccccaaacctcccagcttgacggttctagaaggtgacggaagggatagcccagttctccatgtctgcgagtcaaaagcagaagaagaagaaggggaaggagaaggagaagaaaaagaagaagatgtgtgcttcactgaagctctcgagcaaagcaagaaaaccctactggctttggagggtgatgggctagtgagaagcccagaagatccctctagaaatgaggactttggtaagcctgctgtgagcacagtcaccttagagcatcagaaggaactggaaaacgtggcacaaccccctcaagctccgcaccagcccactgagaggacaggcaggagcgagatggttctctacattcaaagtgagcctgtgtcccaagacgccaaaccaactggtcacaacagggaagcctcgaaaaagcgcaaggtccgtacccgctctctgtcagatttcacaggcccccctcagctccaggccttgaagtataaggacccagcttccaggagagagctggagctgcccagctccaagaccgaagggccttatggggagatcagcatgctggacacaaaagtctctgtcgcccagctccgaagtgcgttcctggcatctgccaacgcctgcaggagacctgaactcaaatcacgggtggagaggtcggctgaaggacctggcttgcccaccggtgtggaacgggagagagggtcccggaaaccaagacgctatttttctcctggtgaaagtagaaaaacttccgagagatttagaacccaacctataacttcagcagaacgaaaggaatcggataggtgcacttcacattcagaaacgccaactgtcgatgatgaagaaaaggtggatgaacgagccaagctgagcgtcgccgccaagaggttgcttttcagggagatggaaaaatcttttgatgaacaaaatgttccaaagcgacgctcaagaaacacagctgtggagcagaggctacgccgtctgcaggacaggtccctcacccagcccatcaccactgaagaggtggtcatcgcagccactgaacctatccccgcttcgtgttctgggggcacccaccctgtaatggcgagacttcctagccccactgtagctaggagcgctgtgcagcctgccagattgcaggcctctgctcaccaaaaggccttagccaaggaccagacaaatgagggcaaagagcttgctgagcaaggagaacctgattcctccactctaagcttggccgaaaagttggccttgtttaacaaattgtcccagccagtctcaaaagcgatttctacccggaacagaatagacacgagacagaggagaatgaacgctcgctatcaaactcagccagtcacactgggagaggtggagcaggtgcagagtggaaagctcattcctttctcacctgccgtgaacacatcagtgtctaccgtagcatccacggttgctccaatgtatgccggagatcttcgcacaaagccacctcttgaccacaatgcaagtgccactgactataagttttcttcttcaatagaaaattcggactctccagttagaagcattctgaaatcgcaagcttggcagcctttggtagagggtagcgagaacaagggaatgttgagagaatatggagagacagaaagcaagagagctttgacaggtcgagacagtgggatggagaagtatgggtcctttgaggaagcagaagcatcctaccccatcctgaaccgagccagggaaggagacagccataaggaatctaaatatgctgttcccagaagaggaagcctggaacgggcgaaccctcccatcacccacctcggggatgaaccgaaggaattttccatggctaaaatgaatgcacaaggaaacttggacttgagggacaggctgccctttgaagagaaggtggaggtggagaatgttatgaaaaggaagttttcactaagagcggcagagttcggggagcccacttccgagcagacggggacagctgctgggaaaactattgctcaaaccacagcccccgtgtcctggaagccccaggattcttcggaacagccacaggagaagctctgcaagaatccatgtgcgatgtttgctgctggagagatcaaaacgccgacaggggagggccttcttgactcacccagcaaaaccatgtctattaaagaaagattggcactgttgaagaaaagcggggaggaagattggagaaacagactcagcaggaggcaggagggcggcaaggcgccggccagcagcctgcacacccaggaagcagggcggtccctcatcaagaagcgggtcacagaaagtcgagagagccaaatgacgattgaggagaggaagcagctcatcactgtgagagaggaggcctggaagacgagaggcagaggagcggccaacgactcgacccagttcactgtggctggcaggatggtgaagaaaggtttggcgtcacctactgccataaccccagtagcctcacccatttgcggtaaaacaagaggcaccacacccgtttccaaacccctggaagatatcgaagccagaccagatatgcagttagaatcggacctgaagttggacaggctggaaacctttctaagaaggctgaataacaaagttggcgggatgcacgaaacggtgctcactgtcaccggcaaatctgtgaaggaggtgatgaagccagatgatgatgaaacctttgccaaattttaccgcagcgtggattataatatgccaagaagtcctgtggagatggatgaggacttcgatgtcattttcgatccttatgcacccaaattgacgtcttccgtggccgagcacaagcgggcagttaggcccaagcgccgggttcaggcctccaaaaaccccctgaaaatgctggcggcaagagaagatctccttcaggaatacactgagcagagattaaacgttgccttcatggagtcaaagcggatgaaagtagaaaagatgtcttccaactccaacttctcagaagtcaccctggcgggtttagccagtaaagaaaacttcagcaacgtcagcctgcggagcgtcaacctgacggaacagaactctaacaacagcgccgtgccctacaagaggctgatgctgttgcagattaaaggaagaagacatgtgcagaccaggctggtggaacctcgagcttcggcgctcaacagtggggactgcttcctcctgctctctccccactgctgcttcctgtgggtaggagagtttgcaaacgtcatagaaaaggcgaaggcctcagaacttgcaactttaattcagacaaagagggaacttggttgtagagctacttatatccaaaccattgaagaaggaattaatacacacactcatgcagccaaagacttctggaagcttctgggtggccaaaccagttaccaatctgctggagacccaaaagaagatgaactctatgaagcagccataatagaaactaactgcatttaccgtctcatggatgacaaacttgttcctgatgacgactactgggggaaaattccgaagtgctcccttctgcaacccaaagaggtactggtgtttgattttggtagtgaagtttacgtatggcatgggaaagaagtcacattagcacaacgaaaaatagcatttcagctggcaaagcacttatggaatggaacctttgactatgagaactgtgacatcaatcccctggatcctggagaatgcaatccgcttatccccagaaaaggacaggggcggcccgactgggcgatatttgggagacttactgaacacaatgagacgattttgttcaaagagaagtttctggattggacggaactgaagagatcgaatgagaagaaccccggggaacttgcccagcacaaggaagaccccaggactgatgtcaaggcatacgatgtgacacggatggtgtccatgccccagacgacagcaggcaccatcctggacggagtgaacgtcggccgtggctatggcctggtggaaggacacgacaggaggcagtttgagatcaccagcgtttccgtggatgtctggcacatcctggaattcgactatagcaggctccccaaacaaagcatcgggcagttccatgagggggatgcctatgtggtcaagtggaagttcatggtgagcacggcagtactgcgtgcgtggagaggtgcccgtggaagggaatttgctggaagtggcctgtcactgtag

SEQ ID NO: 4044 - DNA, 2211 bp, Homo sapiens
  source 1..2211: mol_type = genomic DNA
atggatttctccggttgctttggaaaccagccttcagagtcagtcctgttcattagctgcggagttaacggcctctgtgctaatgaactcctctgatgtctcttctcttaagcatccttctagtttggcgtcacctactgccataaccccagtagcctcacccatttgcggtaaaacaagaggcaccacacccgtttccaaacccctggaagatatcgaagccagaccagatatgcagttagaatcggacctgaagttggacaggctggaaacctttctaagaaggctgaataacaaagttggcgggatgcacgaaacggtgctcactgtcaccggcaaatctgtgaaggaggtgatgaagccagatgatgatgaaacctttgccaaattttaccgcagcgtggattataatatgccaagaagtcctgtggagatggatgaggacttcgatgtcattttcgatccttatgcacccaaattgacgtcttccgtggccgagcacaagcgggcagttaggcccaagcgccgggttcaggcctccaaaaaccccctgaaaatgctggcggcaagagaagatctccttcaggaatacactgagcagagattaaacgttgccttcatggagtcaaagcggatgaaagtagaaaagatgtcttccaactccaacttctcagaagtcaccctggcgggtttagccagtaaagaaaacttcagcaacgtcagcctgcggagcgtcaacctgacggaacagaactctaacaacagcgccgtgccctacaagaggctgatgctgttgcagattaaaggaagaagacatgtgcagaccaggctggtggaacctcgagcttcggcgctcaacagtggggactgcttcctcctgctctctccccactgctgcttcctgtgggtaggagagtttgcaaacgtcatagaaaaggcgaaggcctcagaacttgcaactttaattcagacaaagagggaacttggttgtagagctacttatatccaaaccattgaagaaggaattaatacacacactcatgcagccaaagacttctggaagcttctgggtggccaaaccagttaccaatctgctggagacccaaaagaagatgaactctatgaagcagccataatagaaactaactgcatttaccgtctcatggatgacaaacttgttcctgatgacgactactgggggaaaattccgaagtgctcccttctgcaacccaaagaggtactggtgtttgattttggtagtgaagtttacgtatggcatgggaaagaagtcacattagcacaacgaaaaatagcatttcagctggcaaagcacttatggaatggaacctttgactatgagaactgtgacatcaatcccctggatcctggagaatgcaatccgcttatccccagaaaaggacaggggcggcccgactgggcgatatttgggagacttactgaacacaatgagacgattttgttcaaagagaagtttctggattggacggaactgaagagatcgaatgagaagaaccccggggaacttgcccagcacaaggaagaccccaggactgatgtcaaggcatacgatgtgacacggatggtgtccatgccccagacgacagcaggcaccatcctggacggagtgaacgtcggccgtggctatggcctggtggaaggacacgacaggaggcagtttgagatcaccagcgtttccgtggatgtctggcacatcctggaattcgactatagcaggctccccaaacaaagcatcgggcagttccatgagggggatgcctatgtggtcaagtggaagttcatggtgagcacggcaggttagtgagcgcttgtggttttttccagctgaaagaggctggcccggcagccctgcgggagccagcttctccaatgaaccctgtcatgccctctgctgcgtccgtgcagtggggcactgcagtcatgcgcctttgagagccacctagtaaactacagagatgaaaagaagtaaggccgaattcctaacaacctagcattgccgaggccgctggtgttcacctgtagaaattgaacttgcacatcaaggcttctcagctccctctctccctcccctgcccctgtccccagagcttttctgggaaagagatgattggcctctaaatgatatttcccatgtggctgtgtgctgcttcaattaaagtcgttaagtacagc

SEQ ID NO: 4045 - DNA, 1225 bp, Homo sapiens
  source 1..1225: mol_type = genomic DNA
agctgcacggctcctggccccggagcatgcgcgagagccgccccggagcgccccggagccccccgccgtcccgcccgcggcgtcccgcgccccgccgccagcgcacccccggacgctatggcccacccctccggctggccccttctgtaggatggtagcacacaaccaggtggcagccgacaatgcagtctccacagcagcagagccccgacggcggccagaaccttcctcctcttcctcctcctcgcccgcggcccccgcgcgcccgcggccgtgccccgcggtcccggccccggcccccggcgacacgcacttccgcacattccgttcgcacgccgattaccggcgcatcacgcgcgccagcgcgctcctggacgcctgcggattctactgggggcccctgagcgtgcacggggcgcacgagcggctgcgcgccgagcccgtgggcaccttcctggtgcgcgacagccgccagcggaactgctttttcgcccttagcgtgaagatggcctcgggacccacgagcatccgcgtgcactttcaggccggccgctttcacctggatggcagccgcgagagcttcgactgcctcttcgagctgctggagcactacgtggcggcgccgcgccgcatgctgggggccccgctgcgccagcgccgcgtgcggccgctgcaggagctgtgccgccagcgcatcgtggccaccgtgggccgcgagaacctggctcgcatccccctcaaccccgtcctccgcgactacctgagctccttccccttccagatttgaccggcagcgcccgccgtgcacgcagcattaactgggatgccgtgttattttgttattacttgcctggaaccatgtgggtaccctccccggcctgggttggagggagcggatgggtgtaggggcgaggcgcctcccgccctcggctggagacgaggccgcagaccccttctcacctcttgagggggtcctccccctcctggtgctccctctgggtccccctggttgttgtagcagcttaactgtatctggagccaggacctgaactcgcacctcctacctcttcatgtttacatatacccagtatctttgcacaaaccaggggttgggggagggtctctggctttatttttctgctgtgcagaatcctattttatattttttaaagtcagtttaggtaataaactttattatgaaagttttttttttaaaaaaaaataa

SEQ ID NO: 4046 - DNA, 2729 bp, Homo sapiens
  source 1..2729: mol_type = genomic DNA
ggctccgacttggactccctgctccgctgctgccgcttcggccccgcacgcagccagccgccagccgcccgcccggcccagctcccgccgcggccccttgccgcggtccctctcctggtcccctcccggttggtccgggggtgcgcagggggcagggcgggcgcccaggggaagctcgagggacgcgcgcgcgaaggctcctttgtggacttcacggccgccaacatctgggcgcagcgcgggccaccgctggccgtctcgccgccgcgtcgccttggggacccgagggggctcagccccaaggacggagacttcgattcgggaccagccccccgggatgcggtagcggccgctgtgcggaggccgcgaagcagctgcagccgccgccgcgcagatccacgctggctccgtgcgccatggtcacccacagcaagtttcccgccgccgggatgagccgccccctggacaccagcctgcgcctcaagaccttcagctccaagagcgagtaccagctggtggtgaacgcagtgcgcaagctgcaggagagcggcttctactggagcgcagtgaccggcggcgaggcgaacctgctgctcagtgccgagcccgccggcacctttctgatccgcgacagctcggaccagcgccacttcttcacgctcagcgtcaagacccagtctgggaccaagaacctgcgcatccagtgtgaggggggcagcttctctctgcagagcgatccccggagcacgcagcccgtgccccgcttcgactgcgtgctcaagctggtgcaccactacatgccgccccctggagccccctccttcccctcgccacctactgaaccctcctccgaggtgcccgagcagccgtctgcccagccactccctgggagtccccccagaagagcctattacatctactccgggggcgagaagatccccctggtgttgagccggcccctctcctccaacgtggccactcttcagcatctctgtcggaagaccgtcaacggccacctggactcctatgagaaagtcacccagctgccggggcccattcgggagttcctggaccagtacgatgccccgctttaaggggtaaagggcgcaaagggcatgggtcgggagaggggacgcaggcccctctcctccgtggcacatggcacaagcacaagaagccaaccaggagagagtcctgtagctctggggggaaagagggcggacaggcccctccctctgccctctccctgcagaatgtggcaggcggacctggaatgtgttggagggaagggggagtaccacctgagtctccagcttctccggaggagccagctgtcctggtgggacgatagcaaccacaagtggattctccttcaattcctcagcttcccctctgcctccaaacaggggacacttcgggaatgctgaactaatgagaactgccagggaatcttcaaactttccaacggaacttgtttgctctttgatttggtttaaacctgagctggttgtggagcctgggaaaggtggaagagagagaggtcctgagggccccagggctgcgggctggcgaaggaaatggtcacaccccccgcccaccccaggcgaggatcctggtgacatgctcctctccctggctccggggagaagggcttggggtgacctgaagggaaccatcctggtaccccacatcctctcctccgggacagtcaccgaaaacacaggttccaaagtctacctggtgcctgagagcccagggcccttcctccgttttaagggggaagcaacatttggaggggatggatgggctggtcagctggtctccttttcctactcatactataccttcctgtacctgggtggatggagcgggaggatggaggagacgggacatctttcacctcaggctcctggtagagaagacaggggattctactctgtgcctcctgactatgtctggctaagagattcgccttaaatgctccctgtcccatggagagggacccagcataggaaagccacatactcagcctggatgggtggagaggctgagggactcactggagggcaccaagccagcccacagccagggaagtggggagggggggcggaaacccatgcctcccagctgagcactgggaatgtcagcccagtaagtattggccagtcaggcgcctcgtggtcagagcagagccaccaggtcccactgccccgagccctgcacagccctccctcctgcctgggtgggggaggctggaggtcattggagaggctggactgctgccaccccgggtgctcccgctctgccatagcactgatcagtgacaatttacaggaatgtagcagcgatggaattacctggaacagttttttgtttttgtttttgtttttgtttttgtgggggggggcaactaaacaaacacaaagtattctgtgtcaggtattgggctggacagggcagttgtgtgttggggtggtttttttctctatttttttgtttgtttcttgttttttaataatgtttacaatctgcctcaatcactctgtcttttataaagattccacctccagtcctctctcctcccccctactcaggcccttgaggctattaggagatgcttgaagaactcaacaaaatcccaatccaagtcaaactttgcacatatttatatttatattcagaaaagaaacatttcagtaatttataataaagagcactattttttaatg

SEQ ID NO: 4047 - DNA, 1839 bp, Homo sapiens
  source 1..1839: mol_type = genomic DNA
cgccgtgcgcaggcgcggagctagacctcgctgcagcccccatcgcctcggggagtctcacccaccgagtccgcccgctggcccgtcagtgctctccccgtcgtttgccctctccagttcccccagtgcctgccctacgcaccccgatggcggagctgcggcctagcggcgcccccggccccaccgcgcccccggcccctggcccgactgcccccccggccttcgcttcgctctttcccccgggactgcacgccatctacggagagtgccgccgcctttaccctgaccagccgaacccgctccaggttaccgctatcgtcaagtactggttgggtggcccagaccccttggactatgttagcatgtacaggaatgtggggagcccttctgctaacatccccgagcactggcactacatcagcttcggcctgagtgatctctatggtgacaacagagtccatgagtttacaggaacagatggacctagtggttttggctttgagttgacctttcgtctgaagagagaaactggggagtctgccccaccaacatggcccgcagagttaatgcagggcttggcacgatacgtgttccagtcagagaacaccttctgcagtggggaccatgtgtcctggcacagccctttggataacagtgagtcaagaattcagcacatgctgctgacagaggacccacagatgcagcccgtgcagacaccctttggggtagttaccttcctccagatcgttggtgtctgcactgaagagctacactcagcccagcagtggaacgggcagggcatcctggagctgctgcggacagtgcctattgctggcggcccctggctgataactgacatgcggaggggagagaccatatttgagatcgatccacacctgcaagagagagttgacaaaggcatcgagacagatggctccaacctgagtggtgtcagtgccaagtgtgcctgggatgacctgagccggccccccgaggatgacgaggacagccggagcatctgcatcggcacacagccccggcgactctctggcaaagacacagagcagatccgggagaccctgaggagaggactcgagatcaacagcaaacctgtccttccaccaatcaaccctcagcggcagaatggcctcgcccacgaccgggccccgagccgcaaagacagcctggaaagtgacagctccacggccatcattccccatgagctgattcgcacgcggcagcttgagagcgtacatctgaaattcaaccaggagtccggagccctcattcctctctgcctaaggggcaggctcctgcatggacggcactttacatataaaagtatcacaggtgacatggccatcacgtttgtctccacgggagtggaaggcgcctttgccactgaggagcatccttacgcggctcatggaccctggttacaactctgaacctatcctcggagctctgccctcccgtcctggaacgtctttctgccctgaggagagggtagtcagcatctccaattttcagcagctcaagaaccttggcccccacaggacttcgcagatgtcacattgcccctcagtcccctgaatgcccttcggacccaaccccaattccccaagcccctgaccccctagctgccggggttcccactcccagtgccacaaccccctcacctccctggcagcccctcagcgagcctgaggcccagcacccgctggctccccagcacatggtcccctcccatgggctgttgcccagggaaccggggcgcggtgggaacgagctgctggcctcggcatgtttcaataaagttgctgtgctgggagctactca

SEQ ID NO: 4048 - DNA, 5001 bp, Homo sapiens
  source 1..5001: mol_type = genomic DNA
gacagcctgggcggacagtgcgccgtgcgcaggcgcggagctagacctcgctgcagcccccatcgcctcggggagtctcacccaccgagtccgcccgctggcccgtcagtgctctccccgtcgtttgccctctccagttcccccagtgcctgccctacgcaccccgatggcggagctgcggcctagcggcgcccccggccccaccgcgcccccggcccctggcccgactgcccccccggccttcgcttcgctctttcccccgggactgcacgccatctacggagagtgccgccgcctttaccctgaccagccgaacccgctccaggttaccgctatcgtcaagtactggttgggtggcccagaccccttggactatgttagcatgtacaggaatgtggggagcccttctgctaacatccccgagcactggcactacatcagcttcggcctgagtgatctctatggtgacaacagagtccatgagtttacaggaacagatggacctagtggttttggctttgagttgacctttcgtctgaagagagaaactggggagtctgccccaccaacatggcccgcagagttaatgcagggcttggcacgatacgtgttccagtcagagaacaccttctgcagtggggaccatgtgtcctggcacagccctttggataacagtgagtcaagaattcagcacatgctgctgacagaggacccacagatgcagcccgtgcagacaccctttggggtagttaccttcctccagatcgttggtgtctgcactgaagagctacactcagcccagcagtggaacgggcagggcatcctggagctgctgcggacagtgcctattgctggcggcccctggctgataactgacatgcggaggggagagaccatatttgagatcgatccacacctgcaagagagagttgacaaaggcatcgagacagatggctccaacctgagtggtgtcagtgccaagtgtgcctgggatgacctgagccggccccccgaggatgacgaggacagccggagcatctgcatcggcacacagccccggcgactctctggcaaagacacagagcagatccgggagaccctgaggagaggactcgagatcaacagcaaacctgtccttccaccaatcaaccctcagcggcagaatggcctcgcccacgaccgggccccgagccgcaaagacagcctggaaagtgacagctccacggccatcattccccatgagctgattcgcacgcggcagcttgagagcgtacatctgaaattcaaccaggagtccggagccctcattcctctctgcctaaggggcaggctcctgcatggacggcactttacatataaaagtatcacaggtgacatggccatcacgtttgtctccacgggagtggaaggcgcctttgccactgaggagcatccttacgcggctcatggaccctggttacaaattctgttgaccgaagagtttgtagagaaaatgttggaggatttagaagatttgacttctccagaggaattcaaacttcccaaagagtacagctggcctgaaaagaagctgaaggtctccatcctgcctgacgtggtgttcgacagtccgctacactagcctgggctgggccctgcagtggccagcagggagcccagctgctccccagtgacttccagtgtaacagttgtgtcaacgagatctccacaaataaaaggacaagtgtgaggaagactgcgcagtgccaccccgcagcccagtggggtgccatgcacaggccacaggccctccacctcacctccagctcaggggccgcaccccgccgctggctaagccttgtgacccatcaggccagtgagtgggcaaatgcggaccctccctgcctgcagcctgcacagattctggtttgaggtttgactctggaccctggctgtgcccctaggtggagacagccctctttctcacctaccccctgccgcacagcccagcaggagggaggcggacagccagatgcagagcgagtggatgcacttcccagctcatctctggaagcctttgctactcaagctcctctggccgcggaacaattcctctgatcatgtttggttttcttcttccttattttattttgtagaaaccgggtggtattttattgctctgcaaagatgtccagaagccatgtatataatgttttttaaacagaacttcattccccgttgaactttcgcattctctgacagaggcctagggctgtatctctccctgggctgccaccagagaaggtgcttggtgttcgcctgccagcccagagccctggaggagccggctgcacagagaggcttttcttcccagctgggcctggtggagcccggggcagggggagagtagagacactcccttgtgcagctttgagcctagtttagctggggccagggaggggtgctactgttttccaagtgaatgggtctcaaagacttggtgaccccagcctcatcttctaggccttttccacccaaccaggcctacctgggagagggtgaggttcagcacatcacacaccatccccactgtcattcagggcctgggtctccagctctgtaaccagtcctgtcccatttcctcagtccctgggcctcccagccttcaggctgtagggctgccttactaaaattgaaaaatccacctcttaacatctctttcactttggttttgctaacactgctctctgctgccctcccatcctccctgtatccattcatgccctatctttcattctccactcctaatccctctcctttctggcatcctggcctctcgtggtcctcagcccctcacccccagtactgcagatctcacagtttgccttccagaagccagcctatctctagcccatggttttggagttcctctcgggttatctcccacgcctgacctggaaccagcaagcccctttcctgccttcttacccccaactctagggatgggactgttacaatacttcaagatcactctttacacctcttcaaagcaaagtcatgacaatgcagggctcctcattgctcccatctgcctctgctgcacacacaggcaccagcagggatgccacaggagtgcccacagggtgcaggactccactgatgagagatccagccaaagagctgcccccaggggtatgagggcaccagctgggttctccagggagcaggagttggacctccatggagccactaggcctggcctcctctacacatccccagggctatctggttaattccatcaagctcagagttaaaaggcatatcagcctggagtatttgggagagactggctgcagatccccgccagccaagatgcaagccactcgggacctgatgtcggcagctgtgcctctactgccctgaggacttaccagagggagccctactggccttcccccaccacagcagccctgcctgtgaagctcttgtttctgacatttcacaggcagagaggtgccatcagttcgcctccattccttgccaccatgaccagcctctccctgaactctctcttgctcgggacctgcctgagggctccctgctgcagttcgccgtacttccatctgctgggtgcctccatcgttggttgggtggggatggggcattttctgagctaagctttgtcattagtttgtgaagcacctggtcagcaacctgccccagacctggagggtctttgtggactgaaggtagacaccagccagcatggtggccctgttctgggggagcagggtaaggcaggaggaagtgggtgagctccgagatgatgagcacatgaagcctgtggccccttcgtacctgcaatatgtcaggagcctcacgctcacccaagatcctgcaggggccaggctccatctcactggctctgagggcaggacagggtatcacacatttctcaccaggcctcctttcctatgggcattggtgcctcccagaggtttcttgggctgctggctggtgagagaggacccttaaagaagatcaagccaagctgaccttggaccctgtccagcacagcttctggcacaggatgcttggtgaatgtaccctttctttccctccctgcagctctgagggagcccctgaccttgtagtgggtggaggaggtaaggggcctccctccctaaatctgcctcttctgcaagctacttggagacttgcctagttgtacccacccctccaggtccctggtgctagagcttctgagaagggcctttccctttcctctttgcctgctatataaggcaggctcctgtggctctgctggctcagtgtgggctgcaggaggactgcagactcagctgcaattctgaggggggtttgggaggcttgtgcgaggtctcaggcctgtgtggggagctggtgcctcttcctgcccgtatctttctcttccaagggcagtgctccaaggcagggactggagaagccaaggggagagtctaaaagggctagagcatttttaaaaatagacacagggtcttgggactggggtttcggattgagttgcaagcagggagaaaacctgaaggtcggtgcccctatggggctgaccagtagagaatttcctttactgtatttttgtgtctggtcttccctttctggcttctaggacatccatgccaggtgaggtgcctgggtccctgttacaagtcaggagccctgtagggagacccctccttttgtacaagtacctgaatgctgcgacaagcagatttttgtaaaattttatattagtttttaatgtcagtggcgactcggttcctggggctgcagccagcctgggacttttgtaagaatttttgggtgactcacttagatgtcgtttccttcttgccccctcttcctctctgtaatctaagtgcattaaacatctttgcagaagtgcctgggttgtgtgctcatttctggctgcctgaagtagtggagccggaagcccggggccctggcagagggagtgggttg

SEQ ID NO: 4049 - DNA, 1004 bp, Homo sapiens
  source 1..1004: mol_type = genomic DNA
gtttgttcctaaatctaatcgagctcccaaggaactagtatcttatagaacacacatagaaaatagtgctctacagtagtcactttcacatttttttcttggatccaacttcatgataagaaatacattttaactcataatctattcacatgtatatgaataactgaaacagaagtttcacaaaattatgattatgtttgccacaaatggtgtgctctaatattttccttctgtttcatcagaagaaaaatactggttactatccagctaagctgattttgtgacccattaatgagtttcagttctcactttgaaaacactgttctagaattacagaaaggtctagggatgagaactaacaccactgtgcatcacagtgtgtcagtctgtgccaggcagcttataaatattttttgcctctaatttttatacatttatgaggtaagtatcattttctaggtaaggatgctaatctgtctccaagccaaataacacacagtaaatcatggcaccaggatttgaatctgggtctttatacatcatagcccatgctgttctcactgtattttgctttttccaagtataaccccgttttcacacgaatggccccttcacatatttgaagactaccgtcgtgtccgtgctgaccctttctccctgccacacatggctggagtgcaatggcgcgatctcggctcactgcaacctctgtctcccaggttcaggaaaatggctttgtaaagaagcttgagcctaaatctggctggatgacttttctagaagttacaggaaagatctgtgaaatgctcttctgtcctgaagcaatactgttgaccagaaaggacactccatattgtgaaaccggcctaatttttctgactcttacgaaaacgattgccaacacatacttctacttttaaataaacaactttgatgatgtaacttgaccttccagagttacagaaattttgtccctatttaatgaataaattgtatgtattttt

SEQ ID NO: 4050 - DNA, 529 bp, Homo sapiens
  source 1..529: mol_type = genomic DNA
cccgaatcccggacctgcgctgaggaggcggttcatctgtggccagcggtgcttcgggacccgcgctgggggaaccctggcgacggggcctggccctgctatatgcgggggcctcggctggagtgagcggcgtggacgcctctttcctccggctcttcccttgttgctgcgagagcgagagggccgcgggcggcggaggcagcggggccgggatggaggacgttaactctaacgtgaacgcggaccaggaggctggagtgcaatggcgcgatctcggctcactgcaacctctgtctcccaggttcaggaaaatggctttgtaaagaagcttgagcctaaatctggctggatgacttttctagaagttacaggaaagatctgtgaaatgctcttctgtcctgaagcaatactgttgaccagaaaggacactccatattgtgaaaccggcctaatttttctgactcttacgaaaacgattgccaacacatacttctacttttaaataaacaactttgatgatgtaacttga

SEQ ID NO: 4051 - DNA, 4488 bp, Homo sapiens
  source 1..4488: mol_type = genomic DNA
cggcgatggtgaagttgctccttcacgacctggagcgttgcgaagtggtgctaacatgagaaggtcataatatgagaaaaacaaaacggttatcgggatgctgtgcagaacggggacatatttagaggttacaacgggatcgtaatgacttcctgttgcatagcttgattgagaagaagcgcttccggcggtcttagatcactaatcaacaaaccagctttcggggtctgacgcgatccttgcctcaggcctctcgaggtccagacagccgcccagcccgctctgcgacgcagcagtgaatagtgtggtacctccttgtctcggttcaggtccagacctccccgtcttccggctgccctgaacgtcaggcgacctcaggaccctgtgattggcgcctgcgccggcggaccgtgaccgaggaaacccctggagggacttgggcattccttgggctccgtgcctgttcttcgtgctcctttcgggcaaggatctcacattatcagtctttgaccgacacagaatgcctggcatttgataaatgtttgttgaacttgaagagacatatggacaatgaatctgcaaagatactggggagagataccaatatcatcaagccagaccaacagaagttccttcgatttgctcccacgggagttccgtctggtggaagtccatgacccacccctgcaccaaccctcagccaacaagccgaagccccccactatgctggacatcccctcagagccatgtagtctcaccatccatacgattcagttgattcagcacaaccgacgtcttcgcaaccttattgccacagctcaggcccagaatcagcagcagacagaaggtgtaaaaactgaagagagtgaacctcttccctcgtgccctgggtcacctcctctccctgatgacctcctgcctttagattgtaagaatcccaatgcaccattccagatccggcacagtgacccagagagtgacttttatcgtgggaaaggggaacctgtgactgaactcagctggcactcctgtcggcagctcctctaccaggcagtggccacaatcctggcccacgcgggctttgactgtgctaatgagagtgtcctggagaccctaactgatgtggcacatgagtattgccttaagtttaccaagttgctgcgttttgctgtggaccgggaggcccggctgggacagactccttttcctgatgtgatggagcaggtattccatgaagtgggtattggcagtgtgctctccctccagaagttctggcagcaccgcatcaaggactatcacagttacatgctacagattagtaagcaactctctgaagaatatgaaaggattgtcaatcctgagaaggccacagaggacgctaaacctgtgaagatcaaggaggaacctgtgagcgacatcacttttcctgtcagtgaggagctggaggctgaccttgcttctggagaccagtcactgcctatgggagtgcttggggctcagagcgaacgcttcccatctaacctggaggttgaagcttcaccacaggcttcaagtgcagaggtaaatgcttctcctctttggaatctggcccatgtgaaaatggagcctcaagaaagtgaagaaggcaatgtctctgggcatggtgtgctgggcagtgatgtcttcgaggagcctatgtcaggcatgagtgaagctgggattcctcagagccctgatgactcagatagcagctatggttcccactccactgacagcctcatggggtcctcccctgttttcaaccagcgctgcaagaagaggatgaggaaaatataaaaggaaaagagggagatgttttgtccagacctactagacccaacagaaaaggtttttgtattagaatctgtttccttaaaaattgatttgactcctgttcttaaacacaagtggtttttcctaattccagaggaactggacgtcaccaaacaaggttgcattttacttttgcatccagtttttatagttttccacaaccaagccacccttcacagataaaatatgatgctggcatggcaatcagaccaaagcactgtccccaattgttgtcttaactatgactagacatgttatacagccatttatcttgtacaactgagaagaatcatactttgacctaccttgtagagatgtgaggatttagatgtttgctaacttcaaaactgtgcttgaatagactaataatatatgctcatatcagatgtcagttttcatttaacttgattcatttttggctcaggtcattgggaacccattactaatacctaacaggaaatagctaaacacaacacaccttatctattagtcaccttcttaaaactgtttttgctacttttgaagtgtcttatttataagatcagaggtctgacaccttttttgcttagacagctctctatctcatccatttattttcttctctagacttactccatctctcctcatccttttgcctttgttatttctgctcggactcacatactttcaccatatacatattttcaattgtttctttccttttctcctttgtgagcaaagcaaacaagtactgtccaaggacagccttgtgcatatttcatttgttgcatttgcttggtcatcagaggacagcagtccattaagcacactttgctgcttctactgtaaaggcagcctttaaaacatagcaatatgcacctttcaactttacatcatgtcctgaacaacatcactgtggttactcatccatcagactatctgtatatataagtactgaatcagtatttattaagtaaatgatgtagcactgtagtgattaggaatcattagcaaatgtgttgcttcatgccttggtgatggatgccagcatgttaaactgctgaagtttgattttctgatgcaaaatatatcttgtaaaatttagaccactcctttaatgcagaccaaaataaggcacagctttaattcattattgaatgccttaaatgtcccaggtattgagaataaatgaatatgatacaaatgaggttatagtttaacatataattttaaatttgccaattgtaactctttagcacatttctctaaaccctttctgtcacagtcttttttttaatttatttatttatttatttatttttgagatggagtcttgctctgtcacccaggctggagtgcaatggtgcaatttcgactcactgcaacctctgcctcccaggttcaagcgattctcctgcctcagccacctgagtagctgggattacacgcacatgccaccacacccagctaatttttgcatttttagtagagatgaggtttcaccgtgttggccaggctggtctcaaaactcctgacctcaagtgatctgcccgcctcgggctcccaaagtgctgggattacaggcgtgagccactgcacctggcctctgttgcagtcttatcttcattttcctttgtttataatgaaagtggcgattaggcagttagtttccataaagtggccgtatgggaatttagttcattcatccagcaaacattgagtaccaattatttgctaggtcctgtgcaaggaatacaaaaatgattaagacttcttccttacccttttggagcttgaagcataaggaagacaagttattctgtaaggaagataaagcattcaaaagtactacagagaaaaaccaagtatgcttgagttttgcgaatgttctcctcttaaagaatagcttcaaattttgagaccagtggttcccactaagtatagaacattaaaattaatactttataataaaacacttttattgctgcagaatgttaaactgcataacaggcaccagatggtcaagacgagggaaatatgagaaggcaaatgatgtgaggattagtatcttgagattcacctggtctggaattatgtcataggctactatgcatcagaatcacatggagggctttctaaaacagactgctcagcccacccccagggtttctgagttcataggttataagaggtaagttgaacaattccccagatgatgctgatgctcctggtccacaatgtgagaaccactaagttggagtactgactcatagagataaaattctttgaaagaaatgtactgttttaagatactgtaaaatgtggaggcagggcaaacgtttataagggctgttatgtatgaaatgtgcctctgacccaaatccacggactttgcgaaaatcaccaaggagactttgcattaagttcagagtacaatacaaactgggcctagctctgtatttagtcagtatgtgcacgtgggaaactttagtaaaatatcacctccttattgagacaagtttggacatctggccttaagcctctgttgaacaggagaagtgaagctgtttgcaattatataattttctaatttgaaatcatgacaagcagtcttagaacaaagttaaaattaaaaagtctttatccaagtcaccaatg

SEQ ID NO: 4052 - DNA, 1638 bp, Homo sapiens
  source 1..1638: mol_type = genomic DNA
ggcggtcttagatcactaatcaacaaaccagctttcggggtctgacgcgatccttgcctcaggcctctcgaggtccagacagccgcccagcccgctctgcgacgcagcagtgaatagtgtggtacctccttgtctcggttcaggtccagacctccccgtcttccggctgccctgaacgtcaggcgacctcaggaccctgtgattggcgcctgcgccggcggaccgtgaccgaggaaacccctggagggacttgggcattccttgggctccgtgcctgttcttcgtgctcctttcgggcaaggatctcacattatcagtctttgaccgacacagaatgcctggcatttgataaatgtttgttgaacttgaagagacatatggacaatgaatctgcaaagtgggaaaggggaacctgtgactgaactcagctggcactcctgtcggcagctcctctaccaggcagtggccacaatcctggcccacgcgggctttgactgtgctaatgagagtgtcctggagaccctaactgatgtggcacatgagtattgccttaagtttaccaagttgctgcgttttgctgtggaccgggaggcccggctgggacagactccttttcctgatgtgatggagcaggtattccatgaagtgggtattggcagtgtgctctccctccagaagttctggcagcaccgcatcaaggactatcacagttacatgctacagattagtaagcaactctctgaagaatatgaaaggattgtcaatcctgagaaggccacagaggacgctaaacctgtgaagatcaaggaggaacctgtgagcgacatcacttttcctgtcagtgaggagctggaggctgaccttgcttctggagaccagtcactgcctatgggagtgcttggggctcagagcgaacgcttcccatctaacctggaggttgaagcttcaccacaggcttcaagtgcagaggtaaatgcttctcctctttggaatctggcccatgtgaaaatggagcctcaagaaagtgaagaaggcaatgtctctgggcatggtgtgctgggcagtgatgtcttcgaggagcctatgtcaggcatgagtgaagctgggattcctcagagccctgatgactcagatagcagctatggttcccactccactgacagcctcatggggtcctcccctgttttcaaccagcgctgcaagaagaggatgaggaaaatataaaaggaaaagagggagatgttttgtccagacctactagacccaacagaaaaggtttttgtattagaatctgtttccttaaaaattgatttgactcctgttcttaaacacaagtggtttttcctaattccagaggaactggacgtcaccaaacaaggttgcattttacttttgcatccagtttttatagttttccacaaccaagccacccttcacagataaaatatgatgctggcatggcaatcagaccaaagcactgtccccaattgttgtcttaactatgactagacatgttatacagccatttatcttgtacaactgagaagaatcatactttgacctaccttgtagagatgtgaggatttagatgtttgctaacttcaaaactgtgcttgaatagactaataatatatgctc

SEQ ID NO: 4053 - DNA, 2280 bp, Homo sapiens
  source 1..2280: mol_type = genomic DNA
gagaagaagcgcttccggcggtcttagatcactaatcaacaaaccagctttcggggtctgacgcgatccttgcctcaggcctctcgaggtccagacagccgcccagcccgctctgcgacgcagcagtgaatagtgtggtacctccttgtctcggttcaggtccagacctccccgtcttccggctgccctgaacgtcaggcgacctcaggaccctgtgattggcgcctgcgccggcggaccgtgaccgaggaaacccctggagggacttgggcattccttgggctccgtgcctgttcttcgtgctcctttcgggcaaggatctcacattatcagtctttgaccgacacagaatgcctggcatttgataaatgtttgttgaacttgaagagacatatggacaatgaatctgcaaagggagaacacctttggtcctacagttttgctgacactgacatttttctaagtggtcacaaatagcctactttttacataaataactggctagacctcgtatttttcactacagaagcctataatctaaagttgccaggatttaaacacattacttttaggttattgtctacatttatcctgagacctcttctcttcttattccaaaatgttgagatactggggagagataccaatatcatcaagccagaccaacagaagttccttcgatttgctcccacgggagttccgtctggtggaagtccatgacccacccctgcaccaaccctcagccaacaagccgaagccccccactatgctggacatcccctcagagccatgtagtctcaccatccatacgattcagttgattcagcacaaccgacgtcttcgcaaccttattgccacagctcaggcccagaatcagcagcagacagaaggtgtaaaaactgaagagagtgaacctcttccctcgtgccctgggtcacctcctctccctgatgacctcctgcctttagattgtaagaatcccaatgcaccattccagatccggcacagtgacccagagagtgacttttatcgtgggaaaggggaacctgtgactgaactcagctggcactcctgtcggcagctcctctaccaggcagtggccacaatcctggcccacgcgggctttgactgtgctaatgagagtgtcctggagaccctaactgatgtggcacatgagtattgccttaagtttaccaagttgctgcgttttgctgtggaccgggaggcccggctgggacagactccttttcctgatgtgatggagcaggtattccatgaagtgggtattggcagtgtgctctccctccagaagttctggcagcaccgcatcaaggactatcacagttacatgctacagattagtaagcaactctctgaagaatatgaaaggattgtcaatcctgagaaggccacagaggacgctaaacctgtgaagatcaaggaggaacctgtgagcgacatcacttttcctgtcagtgaggagctggaggctgaccttgcttctggagaccagtcactgcctatgggagtgcttggggctcagagcgaacgcttcccatctaacctggaggttgaagcttcaccacaggcttcaagtgcagaggtaaatgcttctcctctttggaatctggcccatgtgaaaatggagcctcaagaaagtgaagaaggcaatgtctctgggcatggtgtgctgggcagtgatgtcttcgaggagcctatgtcaggcatgagtgaagctgggattcctcagagccctgatgactcagatagcagctatggttcccactccactgacagcctcatggggtcctcccctgttttcaaccagcgctgcaagaagaggatgaggaaaatataaaaggaaaagagggagatgttttgtccagacctactagacccaacagaaaaggtttttgtattagaatctgtttccttaaaaattgatttgactcctgttcttaaacacaagtggtttttcctaattccagaggaactggacgtcaccaaacaaggttgcattttacttttgcatccagtttttatagttttccacaaccaagccacccttcacagataaaatatgatgctggcatggcaatcagaccaaagcactgtccccaattgttgtcttaactatgactagacatgttatacagccatttatcttgtacaactgagaagaatcatactttgacctaccttgtagagatgtgaggatttagatgtttgctaacttcaaaactgtgcttgaatagactaataatatatgctcatatcaga

SEQ ID NO: 4054 - DNA, 2869 bp, Homo sapiens
  source 1..2869: mol_type = genomic DNA
tgagaagaagcgcttccggcggtcttagatcactaatcaacaaaccagctttcggggtctgacgcgatccttgcctcaggcctctcgaggtccagacagccgcccagcccgctctgcgacgcagcagtgaatagtgtggtacctccttgtctcggttcaggtccagacctccccgtcttccggctgccctgaacgtcaggcgacctcaggaccctgtgattggcgcctgcgccggcggaccgtgaccgaggaaacccctggagggacttgggcattccttgggctccgtgcctgttcttcgtgctcctttcgggcaaggatctcacattatcagtctttgaccgacacagaatgcctggcatttgataaatgtttgttgaacttgaagagacatatggacaatgaatctgcaaaggtgagttgaaaccagattgtgaattttgttgaatggtaagccaaggaattctgactttttccaataggcaatgggaagccatttgatttaagttttaaaaagagtaagtctagcagcagtgtagagaatagatgacatacaaagagagattggaggaagggataccagttagaaggcagcagaaatctctcacgttctatatgtcaaaagttgaaagcataatgccatttagattaatggttcataaatttttccaccaggatcatgcctaagacacacagagtaagaaccacttcttattatctttaaccctactagtttttctcctattgatccagcacagatgtatcaagataccttatcatgccttgcttattgttcaggattgagcgtgatggtagttctggtaatgagttagtgagtgagatgggaaatagggatactagagctccagatgctgttgtagctattggtccactaatgacccaaattctaccctgtggttcagtgtagtaggaattgtcatagtatgacaataaccagcatctaacagttacatttctcttaatttatttagggagaacacctttggtcctacagttttgctgacactgacatttttctaagtggtcacaaatagcctactttttacataaataactggctagacctcgtatttttcactacagaagcctataatctaaagttgccaggatttaaacacattacttttaggttattgtctacatttatcctgagacctcttctcttcttattccaaaatgttgagatactggggagagataccaatatcatcaagccagaccaacagaagttccttcgatttgctcccacgggagttccgtctggtggaagtccatgacccacccctgcaccaaccctcagccaacaagccgaagccccccactatgctggacatcccctcagagccatgtagtctcaccatccatacgattcagttgattcagcacaaccgacgtcttcgcaaccttattgccacagctcaggcccagaatcagcagcagacagaaggtgtaaaaactgaagagagtgaacctcttccctcgtgccctgggtcacctcctctccctgatgacctcctgcctttagattgtaagaatcccaatgcaccattccagatccggcacagtgacccagagagtgacttttatcgtgggaaaggggaacctgtgactgaactcagctggcactcctgtcggcagctcctctaccaggcagtggccacaatcctggcccacgcgggctttgactgtgctaatgagagtgtcctggagaccctaactgatgtggcacatgagtattgccttaagtttaccaagttgctgcgttttgctgtggaccgggaggcccggctgggacagactccttttcctgatgtgatggagcaggtattccatgaagtgggtattggcagtgtgctctccctccagaagttctggcagcaccgcatcaaggactatcacagttacatgctacagattagtaagcaactctctgaagaatatgaaaggattgtcaatcctgagaaggccacagaggacgctaaacctgtgaagatcaaggaggaacctgtgagcgacatcacttttcctgtcagtgaggagctggaggctgaccttgcttctggagaccagtcactgcctatgggagtgcttggggctcagagcgaacgcttcccatctaacctggaggttgaagcttcaccacaggcttcaagtgcagaggtaaatgcttctcctctttggaatctggcccatgtgaaaatggagcctcaagaaagtgaagaaggcaatgtctctgggcatggtgtgctgggcagtgatgtcttcgaggagcctatgtcaggcatgagtgaagctgggattcctcagagccctgatgactcagatagcagctatggttcccactccactgacagcctcatggggtcctcccctgttttcaaccagcgctgcaagaagaggatgaggaaaatataaaaggaaaagagggagatgttttgtccagacctactagacccaacagaaaaggtttttgtattagaatctgtttccttaaaaattgatttgactcctgttcttaaacacaagtggtttttcctaattccagaggaactggacgtcaccaaacaaggttgcattttacttttgcatccagtttttatagttttccacaaccaagccacccttcacagataaaatatgatgctggcatggcaatcagaccaaagcactgtccccaattgttgtcttaactatgactagacatgttatacagccatttatcttgtacaactgagaagaatcatactttgacctaccttgtagagatgtgaggatttagatgtttgctaacttcaaaactgtgcttgaatagactaataatatatgctcatatcagatgtcagttttc

SEQ ID NO: 4055 - DNA, 2664 bp, Homo sapiens
  source 1..2664: mol_type = genomic DNA
gagaagaagcgcttccggcggtcttagatcactaatcaacaaaccagctttcggggtctgacgcgatccttgcctcaggcctctcgaggtccagacagccgcccagcccgctctgcgacgcagcaggcaaggatctcacattatcagtctttgaccgacacagaatgcctggcatttgataaatgtttgttgaacttgaagagacatatggacaatgaatctgcaaaggtgagttgaaaccagattgtgaattttgttgaatggtaagccaaggaattctgactttttccaataggcaatgggaagccatttgatttaagttttaaaaagagtaagtctagcagcagtgtagagaatagatgacatacaaagagagattggaggaagggataccagttagaaggcagcagaaatctctcacgttctatatgtcaaaagttgaaagcataatgccatttagattaatggttcataaatttttccaccaggatcatgcctaagacacacagagtaagaaccacttcttattatctttaaccctactagtttttctcctattgatccagcacagatgtatcaagataccttatcatgccttgcttattgttcaggattgagcgtgatggtagttctggtaatgagttagtgagtgagatgggaaatagggatactagagctccagatgctgttgtagctattggtccactaatgacccaaattctaccctgtggttcagtgtagtaggaattgtcatagtatgacaataaccagcatctaacagttacatttctcttaatttatttagggagaacacctttggtcctacagttttgctgacactgacatttttctaagtggtcacaaatagcctactttttacataaataactggctagacctcgtatttttcactacagaagcctataatctaaagttgccaggatttaaacacattacttttaggttattgtctacatttatcctgagacctcttctcttcttattccaaaatgttgagatactggggagagataccaatatcatcaagccagaccaacagaagttccttcgatttgctcccacgggagttccgtctggtggaagtccatgacccacccctgcaccaaccctcagccaacaagccgaagccccccactatgctggacatcccctcagagccatgtagtctcaccatccatacgattcagttgattcagcacaaccgacgtcttcgcaaccttattgccacagctcaggcccagaatcagcagcagacagaaggtgtaaaaactgaagagagtgaacctcttccctcgtgccctgggtcacctcctctccctgatgacctcctgcctttagattgtaagaatcccaatgcaccattccagatccggcacagtgacccagagagtgacttttatcgtgggaaaggggaacctgtgactgaactcagctggcactcctgtcggcagctcctctaccaggcagtggccacaatcctggcccacgcgggctttgactgtgctaatgagagtgtcctggagaccctaactgatgtggcacatgagtattgccttaagtttaccaagttgctgcgttttgctgtggaccgggaggcccggctgggacagactccttttcctgatgtgatggagcaggtattccatgaagtgggtattggcagtgtgctctccctccagaagttctggcagcaccgcatcaaggactatcacagttacatgctacagattagtaagcaactctctgaagaatatgaaaggattgtcaatcctgagaaggccacagaggacgctaaacctgtgaagatcaaggaggaacctgtgagcgacatcacttttcctgtcagtgaggagctggaggctgaccttgcttctggagaccagtcactgcctatgggagtgcttggggctcagagcgaacgcttcccatctaacctggaggttgaagcttcaccacaggcttcaagtgcagaggtaaatgcttctcctctttggaatctggcccatgtgaaaatggagcctcaagaaagtgaagaaggcaatgtctctgggcatggtgtgctgggcagtgatgtcttcgaggagcctatgtcaggcatgagtgaagctgggattcctcagagccctgatgactcagatagcagctatggttcccactccactgacagcctcatggggtcctcccctgttttcaaccagcgctgcaagaagaggatgaggaaaatataaaaggaaaagagggagatgttttgtccagacctactagacccaacagaaaaggtttttgtattagaatctgtttccttaaaaattgatttgactcctgttcttaaacacaagtggtttttcctaattccagaggaactggacgtcaccaaacaaggttgcattttacttttgcatccagtttttatagttttccacaaccaagccacccttcacagataaaatatgatgctggcatggcaatcagaccaaagcactgtccccaattgttgtcttaactatgactagacatgttatacagccatttatcttgtacaactgagaagaatcatactttgacctaccttgtagagatgtgaggatttagatgtttgctaacttcaaaactgtgcttgaatagactaataatatatgctca

SEQ ID NO: 4056 - DNA, 1773 bp, Homo sapiens
  source 1..1773: mol_type = genomic DNA
gatcaactatccacgctgctcgaatcacagcatgctggagggcctggctgggtgctctgactgactgatcacctgacagacggtgcggtcagtcggatgctgagaatgactgacgatgtgatgaggggcggattgaacgagtcacaggccagctggccaggagcaaaatcggcatagctgtctgactcgatggctgtacgtggttacggactgtctgccctgatagaatctcagcttcaacgcatcagaggagactgacttgaccaatggtggggatgagtcgcctgagaaatgacagactggctgacccactgacaggctgcagcgtgtgttgcaagtcttcttggaatcagctgcaggacctgtgccgcctggccaagctctcctgccctgccctcggtatctctaagaggaacctctatgactttgaagtcgagtacctgtgcgattacaagaagatccgcgaacaggaatattacctggtgaaatggcgtggatatccagactcagagagcacctgggagccacggcagaatctcaagtgtgtgcgtatcctcaagcagttccacaaggacttagaaagggagctgctccggcggcaccaccggtcaaagaccccccggcacctggacccaagcttggccaactacctggtgcagaaggccaagcagaggcgggcgctccgtcgctgggagcaggagctcaatgccaagcgcagccatctgggacgcatcactgtagagaatgaggtggacctggacggccctccgcgggccttcgtgtacatcaatgagtaccgtgttggtgagggcatcaccctcaaccaggtggctgtgggctgcgagtgccaggactgtctgtgggcacccactggaggctgctgcccgggggcgtcactgcacaagtttgcctacaatgaccagggccaggtgcggcttcgagccgggctgcccatctacgagtgcaactcccgctgccgctgcggctatgactgcccaaatcgtgtggtacagaagggtatccgatatgacctctgcatcttccgcacggatgatgggcgtggctggggcgtccgcaccctggagaagattcgcaagaacagcttcgtcatggagtacgtgggagagatcattacctcagaggaggcagagcggcggggccagatctacgaccgtcagggcgccacctacctctttgacctggactacgtggaggacgtgtacaccgtggatgccgcctactatggcaacatctcccactttgtcaaccacagttgtgaccccaacctgcaggtgtacaacgtcttcatagacaaccttgacgagcggctgccccgcatcgctttctttgccacaagaaccatccgggcaggcgaggagctcacctttgattacaacatgcaagtggaccccgtggacatggagagcacccgcatggactccaactttggcctggctgggctccctggctcccctaagaagcgggtccgtattgaatgcaagtgtgggactgagtcctgccgcaaatacctcttctagcccttagaagtctgaggccagactgactgagggggcctgaagctacatgcacctcccccactgctgccctcctgtcgagaatgactgccagggcctcgcctgcctccacctgcccccacctgctcctacctgctctacgttcagggctgtggccgtggtgaggaccgactccaggagtcccctttccctgtcccagccccatctgtgggttgcacttacaaacccccacccacct

SEQ ID NO: 4057 - DNA, 2871 bp, Homo sapiens
  source 1..2871: mol_type = genomic DNA
gcggcgagcacccgcctccgggaccgagccgggcggcagggaggggttcggtcacggctctccggttggtccgcgcgggtgctgcgagtcgggagccgcggccaataggctgcgcgttcccggccacgcccgcgcgagcgctcttctcgcgaggccggctaggcccgaatgtcgttagccgtggggaaagatggcggaaaatttaaaaggctgcagcgtgtgttgcaagtcttcttggaatcagctgcaggacctgtgccgcctggccaagctctcctgccctgccctcggtatctctaagaggaacctctatgactttgaagtcgagtacctgtgcgattacaagaagatccgcgaacaggaatattacctggtgaaatggcgtggatatccagactcagagagcacctgggagccacggcagaatctcaagtgtgtgcgtatcctcaagcagttccacaaggacttagaaagggagctgctccggcggcaccaccggtcaaagaccccccggcacctggacccaagcttggccaactacctggtgcagaaggccaagcagaggcgggcgctccgtcgctgggagcaggagctcaatgccaagcgcagccatctgggacgcatcactgtagagaatgaggtggacctggacggccctccgcgggccttcgtgtacatcaatgagtaccgtgttggtgagggcatcaccctcaaccaggtggctgtgggctgcgagtgccaggactgtctgtgggcacccactggaggctgctgcccgggggcgtcactgcacaagtttgcctacaatgaccagggccaggtgcggcttcgagccgggctgcccatctacgagtgcaactcccgctgccgctgcggctatgactgcccaaatcgtgtggtacagaagggtatccgatatgacctctgcatcttccgcacggatgatgggcgtggctggggcgtccgcaccctggagaagattcgcaagaacagcttcgtcatggagtacgtgggagagatcattacctcagaggaggcagagcggcggggccagatctacgaccgtcagggcgccacctacctctttgacctggactacgtggaggacgtgtacaccgtggatgccgcctactatggcaacatctcccactttgtcaaccacagttgtgaccccaacctgcaggtgtacaacgtcttcatagacaaccttgacgagcggctgccccgcatcgctttctttgccacaagaaccatccgggcaggcgaggagctcacctttgattacaacatgcaagtggaccccgtggacatggagagcacccgcatggactccaactttggcctggctgggctccctggctcccctaagaagcgggtccgtattgaatgcaagtgtgggactgagtcctgccgcaaatacctcttctagcccttagaagtctgaggccagactgactgagggggcctgaagctacatgcacctcccccactgctgccctcctgtcgagaatgactgccagggcctcgcctgcctccacctgcccccacctgctcctacctgctctacgttcagggctgtggccgtggtgaggaccgactccaggagtcccctttccctgtcccagccccatctgtgggttgcacttacaaacccccacccaccttcagaaatagtttttcaacatcaagactctctgtcgttgggattcatggcctattaaggaggtccaaggggtgagtcccaacccagccccagaatatatttgtttttgcacctgcttctgcctggagattgaggggtctgctgcaggcctcctccctgctgccccaaaggtatggggaagcaaccccagagcaggcagacatcagaggccagagtgcctagcccgacatgaagctggttccccaaccacagaaactttgtactagtgaaagaaagggggtccctgggctacgggctgaggctggtttctgctcgtgcttacagtgctgggtagtgttggccctaagagctgtagggtctcttcttcagggctgcatatctgagaagtggatgcccacatgccactggaagggaagtgggtgtccatgggccactgagcagtgagaggaaggcagtgcagagctggccagccctggaggtaggctgggaccaagctctgccttcacagtgcagtgaaggtacctagggctcttgggagctctgcggttgctaggggccctgacctggggtgtcatgaccgctgacaccactcagagctggaaccaagatctagatagtccgtagatagcacttaggacaagaatgtgcattgatggggtggtgatgaggtgccaggcactgggtagagcacctggtccacgtggattgtctcagggaagccttgaaaaccacggaggtggatgccaggaaagggcccatgtggcagaaggcaaagtacaggccaagaattgggggtgggggagatggcttccccactatgggatgacgaggcgagagggaagcccttgctgcctgccattcccagaccccagccctttgtgctcaccctggttccactggtctcaaaagtcacctgcctacaaatgtacaaaaggcgaaggttctgatggctgccttgctccttgctcccccaccccctgtgaggacttctctaggaagtccttcctgactacctgtgcccagagtgcccctacatgagactgtatgccctgctatcagatgccagatctatgtgtctgtctgtgtgtccatcccgccgaccccccagactaacctccaggcatggactgaatctggttctcctcttgtacacccctcaaccctatgcagcctggagtgggcatcaataaaatgaactgtcgactgaa

SEQ ID NO: 4058 - DNA, 648 bp, Homo sapiens
  source 1..648: mol_type = genomic DNA
atggcgtggatatccagactcagagagcacctggacggccctccgcgggccttcgtgtacatcaatgagtaccgtgttggtgagggcatcaccctcaaccaggtggctgtgggctgcgagtgccaggactgtctgtgggcacccactggaggctgctgcccgggggcgtcactgcacaagtttgcctacaatgaccagggccaggtgcggcttcgagccgggctgcccatctacgagtgcaactcccgctgccgctgcggctatgactgcccaaatcgtgtggtacagaagggtatccgatatgacctctgcatcttccgcacggatgatgggcgtggctggggcgtccgcaccctggagaagattcgcaagaacagcttcgtcatggacccggctctcctcactgtgtgtctgaaactccctgctttccctatgggaaaggcctgggagactgatctgagtgtcacagggacattgggcaggggctgtggccgtggtgaggaccgactccaggagtcccctttccctgtcccagccccatctgtgggttgcacttacaaacccccacccaccttcagaaatagtttttcaacatcaagactctctgtcgttgggattcatggcctattaaggaggtccaaggggtga

SEQ ID NO: 4059 - DNA, 2708 bp, Homo sapiens
  source 1..2708: mol_type = genomic DNA
ctcgcgaggccggctaggcccgaatgtcgttagccgtggggaaagatggcggaaaatttaaaaggctgcagcgtgtgttgcaagtcttcttggaatcagctgcaggacctgtgccgcctggccaagctctcctgccctgccctcggtatctctaagaggaacctctatgactttgaagtcgagtacgtgcgattacaagaagatccgcgaacaggaatattacctggtgaaatggcgtggatatccagactcagagagcacctgggagccacggcagaatctcaagtgtgtgcgtatcctcaagcagttccacaaggacttagaaagggagctgctccggcggcaccaccggtcaaagaccccccggcacctggacccaagcttggccaactacctggtgcagaaggccaagcagaggcgggcgctccgtcgctgggagcaggagctcaatgccaagcgcatctgggacgcatcactgtagagaatgaggtggacctggacggccctccgcgggccttcgtgtacatcaatgagtaccgtgttggtgagggcatcaccctcaaccaggtggctgtgggctgcgagtgccaggactgtctgtgggcacccactggaggctgctgcccgcgtcactgcacaagtttgcctacaatgaccagggccaggtgcggcttcgagccgggctgcccatctacgagtgcaactcccgctgccgctgcggctatgactgcccaaatcgtgtggtacagaagggtatccgatatgacctctgcatcttccgcacggatgatgggcgtggctggggcgtccgcaccctggagaagattcgcaagaacagcttcgtcatggagtacgtgggagagatcattacctcagaggaggcagagcggcgggcagatctacgaccgtcagggcgccacctacctctttgacctggactacgtggaggacgtgtacaccgtggatgccgcctactatggcaacatctcccactttgtcaaccacagttgtgaccccaacctgcaggtgtacaacgtcttcatagacaaccttgacgagcggctgccctcgctttctttgccacaagaaccatccgggcaggcgaggagctcacctttgattacaacatgcaagtggaccccgtggacatggagagcacccgcatggactccaactttggcctggctgggctccctggctcccctaagaagcgggtccgtattgaatgcaagtgtgggactgagtcctgccgcaaatacctcttctagcccttagaagtctgaggccagactgactgagggggcctgaagctacatgcacctcccccactgctgccctcctgtcgagaatgactgccagggcctcgcctgcctccacctgcccccacctgctcctacctgctctacgttcagggctgtggccgtggtgaggaccgactccaggagtcccctttccctgtcccagccccatctgtgggttgcacttacaaacccccacccaccttcagaaatagtttttcaacatcaagactctctgtcgttgggattcatggcctattaaggaggtccaaggggtgagtcccaacccagccccagaatatatttgtttttgcacctgcttctgcctggagattgaggggtctgctgcaggcctcctccctgctgccccaaaggtatggggaagcaaccccagagcaggcagacatcagaggccagagtgcctagcccgacatgaagctggttccccaaccacagaaactttgtactagtgaaagaaagggggtccctgggctacgggctgaggctggtttctgctcgtgcttacagtgctgggtagtgttggccctaagagctgtagggtctcttcttcagggctgcatatctgagaagtggatgcccacatgccactggaagggaagtgggtgtccatgggccactgagcagtgagaggaaggcagtgcagagctggccagccctggaggtaggctgggaccaagctctgccttcacagtgcagtgaaggtacctagggctcttgggagctctgcggttgctaggggccctgacctggggtgtcatgaccgctgacaccactcagagctggaaccaagatctagatagtccgtagatagcacttaggacaagaatgtgcattgatggggtggtgatgaggtgccaggcactgggtagagcacctggtccacgtggattgtctcagggaagccttgaaaaccacggaggtggatgccaggaaagggcccatgtggcagaaggcaaagtacaggccaagaattgggggtgggggagatggcttccccactatgggatgacgaggcgagagggaagcccttgctgcctgccattcccagaccccagccctttgtgctcaccctggttccactggtctcaaaagtcacctgcctacaaatgtacaaaaggcgaaggttctgatggctgccttgctccttgctcccccaccccctgtgaggacttctctaggaagtccttcctgactacctgtgcccagagtgcccctacatgagactgtatgccctgctatcagatgccagatctatgtgtctgtctgtgtgtccatcccgccgaccccccagactaacctccaggcatggactgaatctggttctcctcttgtacacccctcaaccctatgcagcctggagtgggcatcaataaaatgaactgtcgactg

SEQ ID NO: 4060 - DNA, 1730 bp, Homo sapiens
  source 1..1730: mol_type = genomic DNA
cccgaatgtcgttagccgtggggaaagatggcggaaaatttaaaaggctgcagcgtgtgttgcaagtcttcttggaatcagctgcaggacctgtgccgcctggccaagctctcctgccctgccctcggtatctctaagaggaacctctatgactttgaagtcgagtacctgtgcgattacaagaagatccgcgaacaggaatattacctggtgaaatggcgtggatatccagactcagagagcacctgggagccacggcagaatctcaagtgtgtgcgtatcctcaagcagttccacaaggacttagaaagggagctgctccggcggcaccaccggtcaaagaccccccggcacctggacccaagcttggccaactacctggtgcagaaggccaagcagagccgggctgcccatctacgagtgcaactcccgctgccgctgcggctatgactgcccaaatcgtgtggtacagaagggtatccgatatgacctctgcatcttccgcacggatgatgggcgtggctggggcgtccgcaccctggagaagattcgcaagaacagcttcgtcatggagtacgtgggagagatcattacctcagaggaggcagagcggcggggccagatctacgaccgtcagggcgccacctacctctttgacctggactacgtggaggacgtgtacaccgtggatgccgcctactatggcaacatctcccactttgtcaaccacagttgtgaccccaacctgcaggtgtacaacgtcttcatagacaaccttgacgagcggctgccccgcatcgctttctttgccacaagaaccatccgggcaggcgaggagctcacctttgattacaacatgcaagtggaccccgtggacatggagagcacccgcatggactccaactttggcctggctgggctccctggctcccctaagaagcgggtccgtattgaatgcaagtgtgggactgagtcctgccgcaaatacctcttctagcccttagaagtctgaggccagactgactgagggggcctgaagctacatgcacctcccccactgctgccctcctgtcgagaatgactgccagggcctcgcctgcctccacctgcccccacctgctcctacctgctctacgttcagggctgtggccgtggtgaggaccgactccaggagtcccctttccctgtcccagccccatctgtgggttgcacttacaaacccccacccaccttcagaaatagtttttcaacatcaagactctctgtcgttgggattcatggcctattaaggaggtccaaggggtgagtcccaacccagccccagaatatatttgtttttgcacctgcttctgcctggagattgaggggtctgctgcaggcctcctccctgctgccccaaaggtatggggaagcaaccccagagcaggcagacatcagaggccagagtgcctagcccgacatgaagctggttccccaaccacagaaactttgtactagtgaaagaaagggggtccctgggctacgggctgaggctggtttctgctcgtgcttacagtgctgggtagtgttggccctaagagctgtagggtctcttcttcagggctgcatatctgagaagtggatgcccacatgccactggaagggaagtgggtgtccatgggccactgagcagtgagaggaaggcagtgcagagctggccagccctggaggtaggctgggaccaagctctg

SEQ ID NO: 4061 - DNA, 1531 bp, Homo sapiens
  source 1..1531: mol_type = genomic DNA
gggagctgtgggcaggagaggaaggaaagcagctctctcagctagcgagggggtcagggactgggccaagctcagaagcggggagaagagcgagacagagatgctctgagcaggggagacagggatcccgggctgctgccgctaccaacaagggtacacactgcggtcctcaaggccaggaggggggtgggggcagggaatgcctcagccaacagggcagcggctcggccctgctgctggcccggtgggaagtagcctggggccccgcgactgaaatccgagccaggcctgggcagtctccgctagaaacgctctgggcgcgcactcctggagacgcggaggcccgggcgctccagaccagtgtccttgtaggaggcttcttcacgaagcttagagtttggcctttcatagggaaagacttgctcgggagcaagtctaagggattttaagggattttaaatcttcctgggccagggctagggagctctagtgacagtgtcttggtctggaatccaactctccaattttgaggccgcagggaggaattctgagactttagaggccgcacagccttcagcgcgctcaccgcgtccaggcgtcagtgaggggctatctcgaggcgcgagtgcacaaaaggtagcgcgagtctcttctcaggcgatccagataagaggaaatgagagccgggttttctgacttccaactcattagggaccaggttctttttcttcaggatcaggcacagagactgactgaatggctccaattatcaggatttgaaaacccagtatcagaatctaccactttgtgcctgagggagagggaaaagcggatacccacctgtgtcgctgtttgcgtgccaagtccaggaacagtccatacagccctgctgcatcccacgacgctgtcacaaagcaggagttcatccgaggccaagatgttaattattcatactgcatgactgaggattttggaggcagagagagattcatctgcaatatttggaacaccaatggaggtctacgtcaacacagaatttatacagcagctggtgctagtcagagctaatgacagaatttcagtttaataaaaagacccccaactgagcacaccatcttgaaaaaagtatacttatcaaacagctttcaatcagttcaagagagacaccttaattggggagaggaagaattgcagagtagtttgtaatcatgccaattccagatcaataactgcatgtctgttctttggtagaaatagcttttgctttatattaagtaatcacatatatattctctctatttggataaggaaaccttcgctttatttgacaatgtataatgatatactcttctaattcacctctgtgtcttcacaataaacatgagtaaaatttagacaagtgatggtaaaggtcaatataattatttatttttaaaataaattttgtatctaacaggaaagcagttcttatgaaatttttatattttcaaaaattgttttgttcaaataaaattttatgagtaaagttaaa

SEQ ID NO: 4062 - DNA, 997 bp, Homo sapiens
  source 1..997: mol_type = genomic DNA
cttatctgggcttcggttctggagggccaggaacaaacaggcttcaaagccaagggcttggctggcacacagggggcttggtccttcacctctgtcccctctccctacggacacatataagaccctggtcacacctgggagaggaggagaggagagcatagcacctgcagcaagatggatgtgggcagcaaagaggtcctgatggagagcccgccggactactccgcagctccccggggccgatttggcattccctgctgcccagtgcacctgaaacgccttcttatcgtggtggtggtggtggtcctcatcgtcgtggtgattgtgggagccctgctcatgggtctccacatgagccagaaacacacggagatggttctggagatgagcattggggcgccggaagcccagcaacgcctggccctgagtgagcacctggttaccactgccaccttctccatcggctccactggcctcgtggtgtatgactaccagcagctgctgatcgcctacaagccagcccctggcacctgctgctacatcatgaagatagctccagagagcatccccagtcttgaggctctcactagaaaagtccacaacttccagatggaatgctctctgcaggccaagcccgcagtgcctacgtctaagctgggccaggcagaggggcgagatgcaggctcagcaccctccggaggggacccggccttcctgggcatggccgtgagcaccctgtgtggcgaggtgccgctctactacatctaggacgcctccggtgagcagggtcagtggaagccccaacgggaaaggaaacgccccgggcaaagggtcttttgcagcttttgcagacgggcaagaagctgcttctgcccacaccgcagggacaagccctggagaaatgggagcttggggagaggatgggagtgggcagaggtggcgcccaggggcccgggaactcctgccacaacagaataaagcagcctgattgaaaagc

SEQ ID NO: 4063 - DNA, 1046 bp, Homo sapiens
  source 1..1046: mol_type = genomic DNA
ggaggagaggagagcatagcacctgcagcaagatggatgtgggcagcaaagaggtcctgatggagagcccgccggactactccgcagctccccggggccgatttggcattccctgctgcccagtgcacctgaaacgccttcttatcgtggtggtggtggtggtcctcatcgtcgtggtgattgtgggagccctgctcatgggtctccacatgagccagaaacacacggagatggttctggagatgagcattggggcgccggaagcccagcaacgcctggccctgagtgagcacctggttaccactgccaccttctccatcggctccactggcctcgtggtgtatgactaccagcagctgctgatcgcctacaagccagcccctggcacctgctgctacatcatgaagatagctccagagagcatccccagtcttgaggctctcactagaaaagtccacaacttccaggccaagcccgcagtgcctacgtctaagctgggccaggcagaggggcgagatgcaggctcagcaccctccggaggggacccggccttcctgggcatggccgtgagcaccctgtgtggcgaggtgccgctctactacatctaggacgcctccggtgagcaggtgtgatcccagggcccctgatcagcagcggaggagcgctcgggccacctgcccgggctgtggaggagcgctcgcgctgaccaggcgctggggcgtccactgaagcggggtcatccaggcaactcgggggaggggaagctcacagaccggtacttcccactcccctgattctctctgtccatcctcaacattcctttgcttcacagggtcagtggaagccccaacgggaaaggaaacgccccgggcaaagggtcttttgcagcttttgcagacgggcaagaagctgcttctgcccacaccgcagggacaagccctggagaaatgggagcttggggagaggatgggagtgggcagaggtggcgcccaggggcccgggaactcctgccacaacagaataaagcagcctgattgaaaagcaaa

SEQ ID NO: 4064 - DNA, 1690 bp, Homo sapiens
  source 1..1690: mol_type = genomic DNA
ctgcgcactgagggcggcctggtcgtcgtctgcggcggcggcggcggctgaggagcccggctgaggcgccagtacccggcccggtccgcatttcgccttccggcttcggtttccctcggcccagcacgccccggccccgccccagccctcctgatccctcgcagcccggctccggccgcccgcctctgccgccgcaatgatgatgatggcgctgagcaagaccttcgggcagaagcccgtgaagttccagctggaggacgacggcgagttctacatgatcggctccgaggtgggaaactacctccgtatgttccgaggttctctgtacaagagatacccctcactctggaggcgactagccactgtggaagagaggaagaaaatagttgcatcgtcacatggtaaaaaaacaaaacctaacactaaggatcacggatacacgactctagccaccagtgtgaccctgttaaaagcctcggaagtggaagagattctggatggcaacgatgagaagtacaaggctgtgtccatcagcacagagccccccacctacctcagggaacagaaggccaagaggaacagccagtgggtacccaccctgcccaacagctcccaccacttagatgccgtgccatgctccacaaccatcaacaggaaccgcatgggccgagacaagaagagaaccttccccctttgctttgatgaccatgacccagctgtgatccatgagaacgcatctcagcccgaggtgctggtccccatccggctggacatggagatcgatgggcagaagctgcgagacgccttcacctggaacatgaatgagaagttgatgacgcctgagatgttttcagaaatcctctgtgacgatctggatttgaacccgctgacgtttgtgccagccatcgcctctgccatcagacagcagatcgagtcctaccccacggacagcatcctggaggaccagtcagaccagcgcgtcatcatcaagctgaacatccatgtgggaaacatttccctggtggaccagtttgagtgggacatgtcagagaaggagaactcaccagagaagtttgccctgaagctgtgctcggagctggggttgggcggggagtttgtcaccaccatcgcatacagcatccggggacagctgagctggcatcagaagacctacgccttcagcgagaaccctctgcccacagtggagattgccatccggaacacgggcgatgcggaccagtggtgcccactgctggagactctgacagacgctgagatggagaagaagatccgcgaccaggacaggaacacgaggcggatgaggcgtcttgccaacacggccccggcctggtaaccagcccatcagcacacggctcccacggagcatctcagaagattgggccgcctctcctccatcttctggcaaggacagaggcgaggggacagcccagcgccatcctgaggatcgggtgggggtggagtgggggcttccaggtggcccttcccggcacacattccatttgttgagccccagtcctgccccccaccccaccctccctacccctccccagtctctggggtcaggaagaaaccttattttaggttgtgttttgtttttgtataggagccccaggcagggctagtaacagtttttaaataaaaggcaacaggtcatgttcaatttcttcaa

SEQ ID NO: 4065 - DNA, 1643 bp, Homo sapiens
  source 1..1643: mol_type = genomic DNA
ggtcgtcgtctgcggcggcggcggcggctgaggagcccggctgaggcgccagtacccggcccggtccgcatttcgccttccggcttcggtttccctcggcccagcacgccccggccccgccccagccctcctgatccctcgcagcccggctccggccgcccgcctctgccgccgcaatgatgatgatggcgctgagcaagaccttcgggcagaagcccgtgaagttccagctggaggacgacggcgagttctacatgatcggctccgaggtgggaaactacctccgtatgttccgaggttctctgtacaagagatacccctcactctggaggcgactagccactgtggaagagaggaagaaaatagttgcatcgtcacatgatcacggatacacgactctagccaccagtgtgaccctgttaaaagcctcggaagtggaagagattctggatggcaacgatgagaagtacaaggctgtgtccatcagcacagagccccccacctacctcagggaacagaaggccaagaggaacagccagtgggtacccaccctgcccaacagctcccaccacttagatgccgtgccatgctccacaaccatcaacaggaaccgcatgggccgagacaagaagagaaccttccccctttgctttgatgaccatgacccagctgtgatccatgagaacgcatctcagcccgaggtgctggtccccatccggctggacatggagatcgatgggcagaagctgcgagacgccttcacctggaacatgaatgagaagttgatgacgcctgagatgttttcagaaatcctctgtgacgatctggatttgaacccgctgacgtttgtgccagccatcgcctctgccatcagacagcagatcgagtcctaccccacggacagcatcctggaggaccagtcagaccagcgcgtcatcatcaagctgaacatccatgtgggaaacatttccctggtggaccagtttgagtgggacatgtcagagaaggagaactcaccagagaagtttgccctgaagctgtgctcggagctggggttgggcggggagtttgtcaccaccatcgcatacagcatccggggacagctgagctggcatcagaagacctacgccttcagcgagaaccctctgcccacagtggagattgccatccggaacacgggcgatgcggaccagtggtgcccactgctggagactctgacagacgctgagatggagaagaagatccgcgaccaggacaggaacacgaggcggatgaggcgtcttgccaacacggccccggcctggtaaccagcccatcagcacacggctcccacggagcatctcagaagattgggccgcctctcctccatcttctggcaaggacagaggcgaggggacagcccagcgccatcctgaggatcgggtgggggtggagtgggggcttccaggtggcccttcccggcacacattccatttgttgagccccagtcctgccccccaccccaccctccctacccctccccagtctctggggtcaggaagaaaccttattttaggttgtgttttgtttttgtataggagccccaggcagggctagtaacagtttttaaataaaaggcaacaggtcatgttcaatttcttcaa

SEQ ID NO: 4066 - DNA, 191 bp, Homo sapiens
  source 1..191: mol_type = genomic DNA
tggaggcgactagccactgtggaagagaggaagaaaatagttgcatcgtcacatgctttgatgaccatgacccagctgtgatccatgagaacgcatctcagcccgaggtgctggtccccatccggctggacatggagatcgatgggcagggctagtaacagtttttaaataaaaggcaacaggtcatgttc

SEQ ID NO: 4067 - DNA, 8823 bp, Homo sapiens
  source 1..8823: mol_type = genomic DNA
ggaagagttctagcctgaaagggaactcgggcgtcgtcctggcgtcctctccggattgcgccgcaccctcgcttcctgccagggaggggctgccgggctttggcggctcccgagcatcgagaacggggccagagcagcttcctgcctgccccccgcgaccatagagcgcgggcccagggcgccgcccgcgggtgggggacgttcccaggacggaagtggccgagagagtgtcgaagggagggcgaggccggagcccgagggcgacccgagaagcggcggggcggcgggccggcgggcggggcgcagagccaggcagcgcaggtatagccaggctggagaaaagaagctgccaccatggttgcactttcactgaagatcagcattgggaatgtggtgaagacgatgcagtttgagccgtctaccatggtgtacgacgcctgccgcatcattcgtgagcggatcccagaggccccagctggtcctcccagcgactttgggctctttctgtcagatgatgaccccaaaaagggtatatggctggaggctgggaaagctttggactactacatgctccgaaatggggacactatggagtacaggaagaaacagagacccctgaagatccgtatgctggatggaactgtgaagacgatcatggtggatgactctaagactgtcactgacatgctcatgaccatctgtgcccgcattggcatcaccaatcatgatgaatattcattggttcgagagctgatggaagagaaaaaggaggaaataacagggaccttaagaaaggacaagacattgctgcgagatgaaaagaagatggagaaactaaagcagaaattgcacacagatgatgagttgaactggctggaccatggtcggacactgagggagcagggtgtagaggagcacgagacgctgctgctgcggaggaagttcttttactcagaccagaatgtggattcccgggaccctgtacagctgaacctcctgtatgtgcaggcacgagatgacatcctgaatggctcccaccctgtctcctttgacaaggcctgtgagtttgctggcttccaatgccagatccagtttgggccccacaatgagcagaagcacaaggctggcttccttgacctgaaggacttcctgcccaaggagtatgtgaagcagaagggagagcgtaagatcttccaggcacacaagaattgtgggcagatgagtgagattgaggccaaggtccgctacgtgaagctagcccgttctctcaagacttacggtgtctccttcttcctggtgaaggaaaaaatgaaagggaagaacaagctagtgcccaggcttctgggcatcaccaaggagtgtgtgatgcgagtggatgagaagaccaaggaagtgatccaggagtggaacctcaccaacatcaaacgctgggctgcgtctcccaaaagcttcaccctggattttggagattaccaagatggctattactcagtacagacaactgaaggggagcagattgcacagctcattgccggctacatcgatatcatcctgaagaagaaaaaaagcaaggatcactttgggctggaaggagatgaggagtctactatgctggaggactcagtgtcccccaaaaagtcaacagtcctgcagcagcaatacaaccgggtggggaaagtggagcatggctctgtggccctgcctgccatcatgcgctctggagcctctggtcctgagaatttccaggtgggcagcatgccccctgcccagcagcagattaccagcggccagatgcaccgaggacacatgcctcctctgacttcagcccagcaggcactcactggaaccattaactccagcatgcaggccgtgcaggctgcccaggccaccctggatgactttgacactctgccgcctcttggccaggatgctgcctctaaggcctggcgtaaaaacaagatggatgaatcaaagcatgagatccactctcaggtagatgccatcacagctggtactgcgtctgtggtgaacctgacagcaggggaccctgctgagacagactataccgcagtgggctgtgcagtcaccacaatctcctccaacctgacggagatgtcccgtggggtgaagctgctggctgccttgctggaggacgaaggcggcagtggtcggcccctgttgcaggcagcaaagggccttgcgggagcagtgtcagaactgctgcgcagtgcccaaccagccagtgctgagccccgtcagaacctgctgcaagcagctgggaacgtgggccaggccagtggggagctgttgcaacaaattggggaaagtgatactgacccccacttccaggatgcgctaatgcagctcgccaaagctgtggcaagtgctgcagctgccctggtcctcaaggccaagagtgtggcccagcggacagaggactcgggacttcagacccaagttattgctgcagcaacacagtgtgccctatccacttcccaactagtggcctgtactaaggtggtggcacctacaatcagctcacctgtctgccaagagcaactggtggaggctggacgactggtagccaaagccgtggagggctgtgtgtctgcctcccaggcagctacagaggatgggcaactgttgcgaggggtaggagcagcagccacagctgtcacccaggccctaaatgagctgctgcagcatgtgaaagcccatgccacaggggctgggcctgctggccgttatgaccaggctactgacaccatcctaaccgtcactgagaacatctttagctccatgggtgatgctggggagatggtgcgacaggcccgcatcctggcccaagccacatctgacctggtcaatgccatcaaggctgatgctgagggggaaagtgatctggagaactcccgcaagctcttaagtgctgccaagatcctagctgatgccacagccaagatggtagaggctgccaagggagcagctgcccaccctgacagtgaggagcagcagcagcggctgcgggaggcagctgaggggctgcgcatggccaccaatgcagctgcgcagaatgccatcaagaaaaagctggtgcagcgcctggagcatgcagccaagcaggctgcagcctcagccacacagaccatcgctgcagctcagcacgcagcctctacccccaaggcctctgccggcccccagcccctgctggtgcagagctgcaaggcagtggcagagcagattccactgctggtgcagggcgtccgaggaagccaagcccagcctgacagccccagcgctcagcttgccctcattgctgccagccagagcttcctgcagccaggtgggaagatggtggcagctgcaaaggcctcagtgccaacgattcaggaccaggcttcagccatgcagctgagtcagtgtgccaagaacctgggcaccgcgctggctgaactccggacggctgcccagaaggctcaggaagcatgtggacctttggagatggattctgcactgagtgtggtacagaatctagagaaagatctacaggaagtgaaggcagcagctcgagatggcaagcttaaacccttacctggggagacaatggagaagtgtacccaggacctgggcaacagcaccaaagccgtgagctcagccatcgcccagctactgggagaggttgcccagggcaatgagaattatgcaggtattgcagctcgggatgtggcaggtgggctgcggtcactggcccaggccgctaggggagtcgctgcactgacgtcagatcctgcagtgcaggccattgtacttgatacggccagtgatgtgctggacaaggccagcagcctcattgaggaggcgaaaaaggcagctggccatccaggggaccctgagagccagcagcggcttgcccaggtggctaaagcagtgacccaggctctgaaccgctgtgtcagctgcctacctggccagcgcgatgtggataatgccctgagggcagttggagatgccagcaagcgactcctgagtgactcgcttcctcctagcactgggacatttcaagaagctcagagccggttgaatgaagctgctgctgggctgaatcaggcagccacagaactggtgcaggcctctcggggaacccctcaggacctggctcgagcctcaggccgatttggacaggacttcagcaccttcctggaagctggtgtggagatggcaggccaggctccgagccaggaggaccgagcccaagttgtgtccaacttgaagggcatctccatgtcttcaagcaaacttcttctggctgccaaggccctgtccacggaccctgctgcccctaacctcaagagtcagctggctgcagctgccagggcagtaactgacagcatcaatcagctcatcactatgtgcacccagcaggcacccggccagaaggagtgtgataacgccctgcgggaattggagacggtccgggaactcctggagaacccagtccagcccatcaatgacatgtcctactttggttgcctggacagtgtaatggagaactcaaaggtgctgggcgaggccatgactggcatctcccaaaatgccaagaacggaaacctgccagagtttggagatgccatttccacagcctcaaaggcactttgtggcttcaccgaggcagctgcacaggctgcatatctggttggtgtctctgaccccaatagccaagctggacagcaagggctagtggagcccacacagtttgcccgtgcaaaccaggcaattcagatggcctgccagagtttgggagagcctggctgtacccaggcccaggtgctctctgcagccaccattgtggctaaacacacctctgcactgtgtaacagctgtcgcctggcttctgcccgtaccaccaatcctactgccaagcgccagtttgtacagtcagccaaggaggtggccaacagcacagctaatcttgtcaagaccatcaaggcgctagatggggccttcacagaggagaaccgtgcccagtgccgagcagcaacagcccctctgctggaggctgtggacaatctgagtgcctttgcgtccaaccctgagttctccagcattcctgcccagatcagccctgagggtcgggctgccatggagcccattgtgatctctgccaagacaatgttagagagtgccgggggactcatccagacagcccgggccctcgcagtcaatccccgggaccccccgagctggtcggtgctggccggccactcccgtactgtctcagactccatcaagaagctaattacaagcatgagggacaaggctccagggcagctggagtgtgaaacggccattgcagctctgaacagttgtctacgggacctagaccaggcttccctcgctgcagtcagccagcagcttgctccccgtgagggaatctctcaagaggccttgcacactcagatgctcactgcagtccaagagatctcccatctcattgagccgctggccaatgctgcccgggctgaagcctcccagctgggacacaaggtgtcccagatggcgcagtactttgagccgctcaccctggctgcagtgggtgctgcctccaagaccctgagccacccgcagcagatggcactcctggaccagactaaaacattggcagagtctgccctgcagttgctatacactgccaaggaggctggtggtaacccaaagcaagcagctcacacccaggaagccctggaggaggctgtgcagatgatgaccgaggccgtagaggacctgacaacaaccctcaacgaggcagccagtgctgctggggtcgtgggtggcatggtggactccatcacccaggccatcaaccagctagatgaaggaccaatgggtgaaccagaaggttccttcgtggattaccaaacaactatggtgcggacagccaaggccattgcagtgaccgttcaggagatggttaccaagtcaaacaccagcccagaggagctgggccctcttgctaaccagctgaccagtgactatggccgtctggcctcggaggccaagcctgcagcggtggctgctgaaaatgaagagataggttcccatatcaaacaccgggtacaggagctgggccatggctgtgccgctctggtcaccaaggcaggcgccctgcagtgcagccccagtgatgcctacaccaagaaggagctcatagagtgtgcccggagagtctctgagaaggtctcccacgtcctggctgcgctccaggctgggaatcgtggcacccaggcctgcatcacagcagccagcgctgtgtctggtatcattgctgacctcgacaccaccatcatgttcgccactgctggcacgctcaatcgtgagggtactgaaactttcgctgaccaccgggagggcatcctgaagactgcgaaggtgctggtggaggacaccaaggtcctggtgcaaaacgcagctgggagccaggagaagttggcgcaggctgcccagtcctccgtggcgaccatcacccgcctcgctgatgtggtcaagctgggtgcagccagcctgggagctgaggaccctgagacccaggtggtactaatcaacgcagtgaaagatgtagccaaagccctgggagacctcatcagtgcaacgaaggctgcagctggcaaagttggagatgaccctgctgtgtggcagctaaagaactctgccaaggtgatggtgaccaatgtgacatcattgcttaagacagtaaaagccgtggaagatgaggccaccaaaggcactcgggccctggaggcaaccacagaacacatacggcaggagctggcggttttctgttccccagagccacctgccaagacctctaccccagaagacttcatccgaatgaccaagggtatcaccatggcaaccgccaaggccgttgctgctggcaattcctgtcgccaggaagatgtcattgccacagccaatctgagccgccgtgctattgcagatatgcttcgggcttgcaaggaagcagcttaccacccagaagtggcccctgatgtgcggcttcgagccctgcactatggccgggagtgtgccaatggctacctggaactgctggaccatgtactgctgaccctgcagaagccaagcccagaactgaagcagcagttgacaggacattcaaagcgtgtggctggttccgtcactgagctcatccaggctgctgaagccatgaagggaacagaatgggtagacccagaggaccccacagtcattgctgagaatgagctcctgggagctgcagccgccattgaggctgcagccaaaaagctagagcagctgaagccccgggccaaacccaaggaggcagatgagtccttgaactttgaggagcagatactagaagctgccaagtccattgcagcagccaccagtgcactggtaaaggctgcgtcggctgcccagagagaactagtggcccaagggaaggtgggtgccattccagccaatgcactggacgatgggcagtggtcccagggcctcatttctgctgcccggatggtggctgcggccaccaacaatctgtgtgaggcagccaatgcagctgtacaaggccatgccagccaggagaagctcatctcatcagccaagcaggtagctgcctccacagcccagctccttgtggcctgcaaggtcaaggctgaccaggactcggaggcaatgaaacgacttcaggctgctggcaacgcagtgaagcgagcctcagataatctggtgaaagcagcacagaaggctgcagcctttgaagagcaggagaatgagacagtggtggtgaaagagaagatggttggcggcattgcccagatcatcgcagcacaggaagaaatgcttcggaaggaacgagagctggaagaggcgcggaagaaactggcccagatccggcagcagcagtacaagtttctgccttcagagcttcgagatgagcactaaagaagcctcttctatttaatgcagacccggcccagagactgtgcgtgccactaccaaagccttctgggctgtcggggcccaacctgcccaaccccagcactccccaaagtgcctgccaaaccccagggcctggccccgcccagtcccgcagtacatcccctgtcccctccccaaccccaagtgccttcatgccctagggccccccaagtgcctgcccctccccagagtattaacgctccaagagtattattaacgctgctgtacctcgatctgaatctgccggggccccagcccactccaccctgccagcagcttccggccagtccccacagcctcatcagctctcttcaccgttttttgatactatcttcccccacccccagctacccataggggctgcagagttataagccccaaacaggtcatgctccaataaaaatgattctacctacaacctctgcctggcttcaagggagatacaagttttctcccagggcagtaggagagacagtggggttgaattctgtcacccagcttgatccagcttgaaatgggagaggggaagactggcagtctgcacctgaggtcccttcctccttgcacccggaccctaaagttatccaatggggaagttgtgcctgagaagtcatactcctgttatcctcacctccctggccagcacctaagcctcacaaagtgtcgttctgctgctgctgggacagcagctaccacagttccttgtggctaccaggacattctgttcttcatagctactcagggtatgtcaacaaatccagtccttgaccaaattcaaattttcaaaagaagctttgctaaaaataa

SEQ ID NO: 4068 - DNA, 8098 bp, Homo sapiens
  source 1..8098: mol_type = genomic DNA
ggaagagttctagcctgaaagggaactcgggcgtcgtcctggcgtcctctccggattgcgccgcaccctcgcttcctgccagggaggggctgccgggctttggcggctcccgagcatcgagaacggggccagagcagcttcctgcctgccccccgcgaccatagagcgcgggcccagggcgccgcccgcgggtgggggacgttcccaggacggaagtggccgagagagtgtcgaagggagggcgaggccggagcccgagggcgacccgagaagcggcggggcggcgggccggcgggcggggcgcagagccaggcagcgcaggtatagccaggctggagaaaagaagctgccaccatggttgcactttcactgaagatcagcattgggaatgtggtgaagacgatgcagtttgagccgtctaccatggtgtacgacgcctgccgcatcattcgtgagcggatcccagaggccccagctggtcctcccagcgactttgggctctttctgtcagatgatgaccccaaaaagggtatatggctggaggctgggaaagctttggactactacatgctccgaaatggggacactatggagtacaggaagaaacagagacccctgaagatccgtatgctggatggaactgtgaagacgatcatggtggatgactctaagactgtcactgacatgctcatgaccatctgtgcccgcattggcatcaccaatcatgatgaatattcattggttcgagagctgatggaagagaaaaaggaggaaataacagggaccttaagaaaggacaagacattgctgcgagatgaaaagaagatggagaaactaaagcagaaattgcacacagatgatgagttgaactggctggaccatggtcggacactgagggagcagggtgtagaggagcacgagacgctgctgctgcggaggaagttcttttactcagaccagaatgtggattcccgggaccctgtacagctgaacctcctgtatgtgcaggcacgagatgacatcctgaatggctcccaccctgtctcctttgacaaggcctgtgagtttgctggcttccaatgccagatccagtttgggccccacaatgagcagaagcacaaggctggcttccttgacctgaaggacttcctgcccaaggagtatgtgaagcagaagggagagcgtaagatcttccaggcacacaagaattgtgggcagatgagtgagattgaggccaaggtccgctacgtgaagctagcccgttctctcaagacttacggtgtctccttcttcctggtgaaggaaaaaatgaaagggaagaacaagctagtgcccaggcttctgggcatcaccaaggagtgtgtgatgcgagtggatgagaagaccaaggaagtgatccaggagtggaacctcaccaacatcaaacgctgggctgcgtctcccaaaagcttcaccctggattttggagattaccaagatggctattactcagtacagacaactgaaggggagcagattgcacagctcattgccggctacatcgatatcatcctgaagaagaaaaaaagcaaggatcactttgggctggaaggagatgaggagtctactatgctggaggactcagtgtcccccaaaaagtcaacagtcctgcagcagcaatacaaccgggtggggaaagtggagcatggctctgtggccctgcctgccatcatgcgctctggagcctctggtcctgagaatttccaggtgggcagcatgccccctgcccagcagcagattaccagcggccagatgcaccgaggacacatgcctcctctgacttcagcccagcaggcactcactggaaccattaactccagcatgcaggccgtgcaggctgcccaggccaccctggatgactttgacactctgccgcctcttggccaggatgctgcctctaaggcctggcgtaaaaacaagatggatgaatcaaagcatgagatccactctcaggtagatgccatcacagctggtactgcgtctgtggtgaacctgacagcaggggaccctgctgagacagactataccgcagtgggctgtgcagtcaccacaatctcctccaacctgacggagatgtcccgtggggtgaagctgctggctgccttgctggaggacgaaggcggcagtggtcggcccctgttgcaggcagcaaagggccttgcgggagcagtgtcagaactgctgcgcagtgcccaaccagccagtgctgagccccgtcagaacctgctgcaagcagctgggaacgtgggccaggccagtggggagctgttgcaacaaattggggaaagtgatactgacccccacttccaggatgcgctaatgcagctcgccaaagctgtggcaagtgctgcagctgccctggtcctcaaggccaagagtgtggcccagcggacagaggactcgggacttcagacccaagttattgctgcagcaacacagtgtgccctatccacttcccaactagtggcctgtactaaggtggtggcacctacaatcagctcacctgtctgccaagagcaactggtggaggctggacgactggtagccaaagccgtggagggctgtgtgtctgcctcccaggcagctacagaggatgggcaactgttgcgaggggtaggagcagcagccacagctgtcacccaggccctaaatgagctgctgcagcatgtgaaagcccatgccacaggggctgggcctgctggccgttatgaccaggctactgacaccatcctaaccgtcactgagaacatctttagctccatgggtgatgctggggagatggtgcgacaggcccgcatcctggcccaagccacatctgacctggtcaatgccatcaaggctgatgctgagggggaaagtgatctggagaactcccgcaagctcttaagtgctgccaagatcctagctgatgccacagccaagatggtagaggctgccaagggagcagctgcccaccctgacagtgaggagcagcagcagcggctgcgggaggcagctgaggggctgcgcatggccaccaatgcagctgcgcagaatgccatcaagaaaaagctggtgcagcgcctggagcatgcagccaagcaggctgcagcctcagccacacagaccatcgctgcagctcagcacgcagcctctacccccaaggcctctgccggcccccagcccctgctggtgcagagctgcaaggcagtggcagagcagattccactgctggtgcagggcgtccgaggaagccaagcccagcctgacagccccagcgctcagcttgccctcattgctgccagccagagcttcctgcagccaggtgggaagatggtggcagctgcaaaggcctcagtgccaacgattcaggaccaggcttcagccatgcagctgagtcagtgtgccaagaacctgggcaccgcgctggctgaactccggacggctgcccagaaggctcaggaagcatgtggacctttggagatggattctgcactgagtgtggtacagaatctagagaaagatctacaggaagtgaaggcagcagctcgagatggcaagcttaaacccttacctggggagacaatggagaagtgtacccaggacctgggcaacagcaccaaagccgtgagctcagccatcgcccagctactgggagaggttgcccagggcaatgagaattatgcaggtattgcagctcgggatgtggcaggtgggctgcggtcactggcccaggccgctaggggagtcgctgcactgacgtcagatcctgcagtgcaggccattgtacttgatacggccagtgatgtgctggacaaggccagcagcctcattgaggaggcgaaaaaggcagctggccatccaggggaccctgagagccagcagcggcttgcccaggtggctaaagcagtgacccaggctctgaaccgctgtgtcagctgcctacctggccagcgcgatgtggataatgccctgagggcagttggagatgccagcaagcgactcctgagtgactcgcttcctcctagcactgggacatttcaagaagctcagagccggttgaatgaagctgctgctgggctgaatcaggcagccacagaactggtgcaggcctctcggggaacccctcaggacctggctcgagcctcaggccgatttggacaggacttcagcaccttcctggaagctggtgtggagatggcaggccaggctccgagccaggaggaccgagcccaagttgtgtccaacttgaagggcatctccatgtcttcaagcaaacttcttctggctgccaaggccctgtccacggaccctgctgcccctaacctcaagagtcagctggctgcagctgccagggcagtaactgacagcatcaatcagctcatcactatgtgcacccagcaggcacccggccagaaggagtgtgataacgccctgcgggaattggagacggtccgggaactcctggagaacccagtccagcccatcaatgacatgtcctactttggttgcctggacagtgtaatggagaactcaaaggtgctgggcgaggccatgactggcatctcccaaaatgccaagaacggaaacctgccagagtttggagatgccatttccacagcctcaaaggcactttgtggcttcaccgaggcagctgcacaggctgcatatctggttggtgtctctgaccccaatagccaagctggacagcaagggctagtggagcccacacagtttgcccgtgcaaaccaggcaattcagatggcctgccagagtttgggagagcctggctgtacccaggcccaggtgctctctgcagccaccattgtggctaaacacacctctgcactgtgtaacagctgtcgcctggcttctgcccgtaccaccaatcctactgccaagcgccagtttgtacagtcagccaaggaggtggccaacagcacagctaatcttgtcaagaccatcaaggcgctagatggggccttcacagaggagaaccgtgcccagtgccgagcagcaacagcccctctgctggaggctgtggacaatctgagtgcctttgcgtccaaccctgagttctccagcattcctgcccagatcagccctgagggtcgggctgccatggagcccattgtgatctctgccaagacaatgttagagagtgccgggggactcatccagacagcccgggccctcgcagtcaatccccgggaccccccgagctggtcggtgctggccggccactcccgtactgtctcagactccatcaagaagctaattacaagcatgagggacaaggctccagggcagctggagtgtgaaacggccattgcagctctgaacagttgtctacgggacctagaccaggcttccctcgctgcagtcagccagcagcttgctcccctccaagagatctcccatctcattgagccgctggccaatgctgcccgggctgaagcctcccagctgggacacaaggtgtcccagatggcgcagtactttgagccgctcaccctggctgcagtgggtgctgcctccaagaccctgagccacccgcagcagatggcactcctggaccagactaaaacattggcagagtctgccctgcagttgctatacactgccaaggaggctggtggtaacccaaagctagatgaaggaccaatgggtgaaccagaaggttccttcgtggattaccaaacaactatggtgcggacagccaaggccattgcagtgaccgttcaggagatgataggttcccatatcaaacaccgggtacaggagctgggccatggctgtgccgctctggtcaccaaggcaggcgccctgcagtgcagccccagtgatgcctacaccaagaaggagctcatagagtgtgcccggagagtctctgagaaggtctcccacgtcctggctgcgctccaggctgggaatcgtggcacccaggcctgcatcacagcagccagcgctgtgtctggtatcattgctgacctcgacaccaccatcatgttcgccactgctggcacgctcaatcgtgagggtactgaaactttcgctgaccaccgggagggcatcctgaagactgcgaaggtgctggtggaggacaccaaggtcctggtgcaaaacgcagctgggagccaggagaagttggcgcaggctgcccagtcctccgtggcgaccatcacccgcctcgctgatgtggtcaagctgggtgcagccagcctgggagctgaggaccctgagacccaggtggtactaatcaacgcagtgaaagatgtagccaaagccctgggagacctcatcagtgcaacgaaggctgcagctggcaaagttggagatgaccctgctgtgtggcagctaaagaactctgccaaggtgatggtgaccaatgtgacatcattgcttaagacagtaaaagccgtggaagatgaggccaccaaaggcactcgggccctggaggcaaccacagaacacatacggcaggagctggcgccacctgccaagacctctaccccagaagacttcatccgaatgaccaagggtatcaccatggcaaccgccaaggccgttgctgctggcaattcctgtcgccaggaagatgtcattgccacagccaatctgagccgccgtgctattgcagatatgcttcgggcttgcaaggaagcagcttaccacccagaagtggcccctgatgtgcggcttcgagccctgcactatggccgggagtgtgccaatggctacctggaactgctggaccatgtactgctgaccctgcagaagccaagcccagaactgaagcagcagttgacaggacattcaaagcgtgtggctggttccgtcactgagctcatccaggctgctgaagccatgaagggaacagaatgggtagacccagaggaccccacagtcattgctgagaatgagctcctgggagctgcagccgccattgaggctgcagccaaaaagctagagcagctgaagccccgggccaaacccaaggaggcagatgagtccttgaactttgaggagcagatactagaagctgccaagtccattgcagcagccaccagtgcactggtaaaggctgcgtcggctgcccagagagaactagtggcccaagggaaggtgggtgccattccagccaatgcactggacgatgggcagtggtcccagggcctcatttctgctgcccggatggtggctgcggccaccaacaatctgtgtgaggcagccaatgcagctgtacaaggccatgccagccaggagaagctcatctcatcagccaagcaggtagctgcctccacagcccagctccttgtggcctgcaaggtcaaggctgaccaggactcggaggcaatgaaacgacttcaggctgctggcaacgcagtgaagcgagcctcagataatctggtgaaagcagcacagaaggctgcagcctttgaagagcaggagaatgagacagtggtggtgaaagagaagatggttggcggcattgcccagatcatcgcagcacaggaagaaatgcttcggaaggaacgagagctggaagaggcgcggaagaaactggcccagatccggcagcagcagtacaagtttctgccttcagagcttcgagatgagcactaaagaagcctcttctatttaatgcagacccggcccagagactgtgcgtgccactaccaaagccttctgggctgtcggggcccaacctgcccaaccccagcactccccaaagtgcctgccaaaccccagggcctggccccgcccagtcccgcagtacatcccctgtcccctccccaaccccaagtgccttcatgccctagggccccccaagtgcctgcccctccccagagtattaacgctccaagagtattattaacgctgctgtacctcgatctgaatctgccggggccccagcccactccaccctgccagcagcttccggccagtccccacagcctcatcagctctcttcaccgttttttgatactatcttcccccacccccagctacccataggggctgcagagttataagccccaaacaggtcatgctccaataaaaatgattctacctacaa

SEQ ID NO: 4069 - DNA, 9620 bp, Homo sapiens
  source 1..9620: mol_type = genomic DNA
agtgacagtgctaggggagtccgaagatggcggcgtcgcgtcgctctcagcatcatcaccaccatcatcaacaacagctccagcccgccccaggggcttcagcgccgccgccgccacctcctcccccactcagccctggcctggccccggggaccaccccagcctctcccacggccagcggcctggcccccttcgcctccccgcggcacggcctagcgctgccggagggggatggcagtcgggatccgcccgacaggccccgatccccggacccggttgacggtaccagctgttgcagtaccaccagcacaatctgtaccgtcgccgccgctcccgtggtcccagcggtttctacttcatctgccgctggggtcgctcccaacccagccggcagtggcagtaacaattcaccgtcgtcctcttcttccccgacttcttcctcatcttcctctccatcctcccctggatcgagcttggcggagagccccgaggcggccggagttagcagcacagcaccactggggcctggggcagcaggacctgggacaggggtcccagcagtgagcggggccctacgggaactgctggaggcctgtcgcaatggggacgtgtcccgggtaaagaggctggtggacgcggcaaacgtaaatgcaaaggacatggccggccggaagtcttctcccctgcacttcgctgcaggttttggaaggaaggatgttgtagaacacttactacagatgggtgctaatgtccacgctcgtgatgatggaggtctcatcccgcttcataatgcctgttcttttggccatgctgaggttgtgagtctgttattgtgccaaggagctgatccaaatgccagggataactggaactatacacctctgcatgaagctgctattaaagggaagatcgatgtgtgcattgtgctgctgcagcacggagctgacccaaacattcggaacactgatgggaaatcagccctggacctggcagatccttcagcaaaagctgtccttacaggtgaatacaagaaagacgaactcctagaagctgctaggagtggtaatgaagaaaaactaatggctttactgactcctctaaatgtgaattgccatgcaagtgatgggcgaaagtcgactcctttacatctagcagcgggctacaacagagttcgaatagttcagcttcttcttcagcatggtgctgatgttcatgcaaaagacaaaggtggacttgtgcctcttcataatgcatgttcatatggacattatgaagtcacagaactgctactaaagcatggagcttgtgttaatgccatggatctctggcagtttactccactgcacgaggctgcttccaagaaccgtgtagaagtctgctctttgttacttagccatggcgctgatcctacattagtcaactgccatggcaaaagtgctgtggatatggctccaactccggagcttagggagagattgacttatgaatttaaaggtcattctttactacaagcagccagagaagcagacttagctaaagttaaaaaaacactcgctctggaaatcattaatttcaaacaaccgcagtctcatgaaacagcactgcactgtgctgtggcctctctgcatcccaaacgtaaacaagtgacagaattgttacttagaaaaggagcaaatgttaatgaaaaaaataaagatttcatgactcccctgcatgttgcagccgaaagagcccataatgatgtcatggaagttctgcataagcatggcgccaagatgaatgcactggacacccttggtcagactgctttgcatagagccgccctagcaggtcacctgcagacctgccgcctcctgctgagttacggctctgacccctccatcatctccttacaaggcttcacagcagcacagatgggcaatgaagcagtgcagcagattctgagtgagagtacacctatacgtacttctgatgttgattatcgactcttagaggcatctaaagctggagacttggaaactgtgaagcaactttgcagctctcaaaatgtgaattgtagagacttagagggccggcattccacgcccttacacttcgcagcaggctacaaccgcgtgtctgttgtagagtacctgctacaccacggtgccgatgtccatgccaaagacaagggtggcttggtgccccttcataatgcctgttcatatggacactatgaggtggctgagcttttagtaaggcatggggcttctgtcaatgtggcggacttatggaaatttacccctctccatgaagcagcagctaaaggaaagtatgaaatctgcaagctccttttaaaacatggagcagatccaactaaaaagaacagagatggaaatacacctttggatttggtaaaggaaggagacacagatattcaggacttactgagaggggatgctgctttgttggatgctgccaagaagggctgcctggcaagagtgcagaagctctgtaccccagagaatatcaactgcagagacacccagggcagaaattcaacccctctgcacctggcagcaggctataataacctggaagtagctgaatatcttctagagcatggagctgatgttaatgcccaggacaagggtggtttaattcctcttcataatgcggcatcttatgggcatgttgacatagcggctttattgataaaatacaacacgtgtgtaaatgcaacagataagtgggcgtttactcccctccatgaagcagcccagaaaggaaggacgcagctgtgcgccctcctcctagcgcatggtgcagaccccaccatgaagaaccaggaaggccagacgcctctggatctggcaacagctgacgatatcagagctttgctgatagatgccatgcccccagaggccttacctacctgttttaaacctcaggctactgtagtgagtgcctctctgatctcaccagcatccaccccctcctgcctctcggctgccagcagcatagacaacctcactggccctttagcagagttggccgtaggaggagcctccaatgcaggggatggcgccgcgggaacagaaaggaaggaaggagaagttgctggtcttgacatgaatatcagccaatttctaaaaagccttggccttgaacaccttcgggatatctttgaaacagaacagattacactagatgtgttggctgatatgggtcatgaagagttgaaagaaataggcatcaatgcatatgggcaccgccacaaattaatcaaaggagtagaaagactcttaggtggacaacaaggcaccaatccttatttgacttttcactgtgttaatcagggaacgattttgctggatcttgctccagaagataaagaatatcagtcagtggaagaagagatgcaaagtactattcgagaacacagagatggtggtaatgctggcggcatcttcaacagatacaatgtcattcgaattcaaaaagttgtcaacaagaagttgagggagcggttctgccaccgacagaaggaagtgtctgaggagaatcacaaccatcacaatgagcgcatgttgtttcatggttctcctttcattaatgccattattcataaagggtttgatgagcgacatgcatacataggaggaatgtttggggccgggatttattttgctgaaaactcctcaaaaagcaaccaatatgtttatggaattggaggaggaacaggctgccctacacacaaggacaggtcatgctatatatgtcacagacaaatgctcttctgtagagtgacccttgggaaatcctttctgcagtttagcaccatgaaaatggcccacgcgcctccagggcaccactcagtcattggtagaccgagcgtcaatgggctggcatatgctgaatatgtcatctacagaggagaacaggcatacccagagtatcttatcacttaccagatcatgaagccagaagccccttcccagaccgcaacagccgcagagcagaagacctagtgaatgcctgctggtgaaggccagatcagatttcaacctgggactggattacagaggattgtttctaataacaacatcaatattctagaagtccctgacagcctagaaataagctgtttgtcttctataaagcattgctatagtgatgaatagtatgagtaactgatacatactcaactgctactgttccctttgaggaaatgtttacaggggcggccttttaacatatctcaggctcattttcattgcaattatccatttctaaaacaagattgcttcgatctagacttggaaatggaaaataagaaaaccaatgctttttcaaatgttcacaattcacacactacatttgttttgttatgcatgacgtgtctataacaaatatacacatacgacaggcaacaagcttgtttttgatttgccagacatgcatcattggctattgtttgtttgttttttgtttttttgtgttttttgggttactttgaaaatgagccagagccttcttgaggatattttgcacaaagtcacgctgacaaaatcattagcagtgcaacccaagcttctggctgagcaagattcagtttccactttttaaaatttttttattttgctctgtagctgcacttctcgttatcataaattgagatgaaaaggaaaaaacatcaagttttagtacctttttatgaattggcctatcttacaagagaagggcacaaacaccaacctgacttaggaacgcctaaattcagagaagtcaaagccggtgaaggccacttgctctttccaacacaagcctgccacagaggtcttcgggacagtactggagatgcaggttgacacgggcttgagttccaaggtgaaaaaactggggaggctgtgaaggaagagctgcattaaggagggtgaggagcgtgtggttctgtatcatggcagccccaatggatccaggggatgcctccaaaaaatacatgcttcccttcccttaatctgtactgttgggattgttacccctccaaattagctgccttatttcaaaagtcagtgaaattactgcacttgatgagggtcacaaaaataccacttgattgtttctttagttgagaatgctgggattcagactcgaatagtggatagatacacacaaatgcaaggacttttttgtttactccagatttggggtttattttgagtggcatgcttcaaatagttcataaagatccttgcattaaatttctgaaccatttcttcaaacttcttagtgtgtttagacaaggagaacaaaaattgaaaccaaagccctttctgttattttttcaatgaaggtgagaaagaaataccatacaattttctttgtgaaattactgtttattttcatcaacatttaccaagtgccattgacatttataaaaaaaaatgatcctttatagttcttacacttgcccttttcaccttaactgaatatgaattgagtgcactaacttatttacttgatatactgtgcatctactctgctttgaagcgaaagaaatataaacacgaggaggaataggaaagacagtgtgacacaaacttgccattgcaattcaaagccctgaaaacgatgggtttaatgcaaggtgattaagctgtgacctcctttaatctcctgaagcaaaataaaatggttacatgcaaaacttctagaaatagactcttaaaatatatacattttgctttgattttggcttcaacccagtgctggaactaggcatccagactagtttgaatgtttgtagctgaatttttatgggtcctcaaaattaaatcgagaattagcctcagttgttgcttcttttgaagtttcagtgacccaagctgggtgtttgtgtcttggctacttgtttaatagcactagaattccaggtgaagctttgagagttgatattcattaagagggctttttttccccttctttccttctcttttgctgtaacaaagggttgaagaaattgccatctgtgtagttttcagtagctgtcaagtgtgtcttacttaccttcccccagacgtagtttaaaatggtaaacacagctgtgatttttagttaagtaaaagagttaatatgatatagatatggaaagctttatggcttcattaaaaagataaaccactacctaactgtggttgtatgttgtttccatcatactaactagatgaatggatgcgccagttttcatcttggtccttacacttgagaagttaaactgtggttcagtatttaaactgccagtgttatacgtctcatgctctgtgtgccaggtgaaggtactgtgtaaggaagacatttgcggtgcttcttgtcctataatgattcaagtatatagtagttcttgaaagagtgtgcatatattactcatctgcttaagagagtgggttaatggatatatcagaggagccaaatacatttttttcagaacttgaaaaccaaaggtcatcatgagtgcactcaaaagttaggacaagtttattacatttgggattttcatctgtagccgtatgaagaaccctttccaatataaaagcatggcattaaattaggctgaagtcttttattttttgtatatgtactatatagaaatactagcaagttaggatcatccaatatggcctaccccgaaatggcccctctgtttccctaaccacatggaagaaagaatctgaacgtctccaccggctctacccgagttccaaaactaaagggcttctccagacctgatggttccagtttacctgctgttggcctgctggatacttgactcaggcataaattaagtgccctggtcccgaactttctccctgtatttgacctccttccctctttcctaaattactagtctggaattaaaattagctccagcaatgacctttgactccattcattttctcctcatcttgggtcttaaaaaaggagaccagatacctcctagcttttgtatcacaaccaggaatgggtattaggcctcatgcgctttgctcagaacactgccgctttgttaacaaatgacagcatggaacccagagttttgattcgatgcaaaataacagcagtgcaaccaggattcttgttttccttttccttcttggagtttggaatttctagcttttcaagcagcataagtagaatcaacattaggatgttttcatgaaatagcatccttatacttctttgagcttgatgttagtggctagactgatttccctttgctctcaaaatacaaagtgcattgaagtatacagagaaatgcctgaatatggcaagcaaataatgtagattaacattctattattgtatccgttttacaaaaaataaaattttgatatatgccggagaacggcattagaatgcaataagttgtctaggtttttctgtttcagtgtctctcccaatggcacgaagggttattgggcattgtccccacccccgcctttttaacatgtgcactatctggattcctgtaaatggccttgcaaacagaagtggtgtgtattttcaagcacctttcccccattgtatccgaatccctcttgtgtgatatctgtgacaaatagccttcttcttgtgttttctgttggactaattgtctcacgtaaagctatagaccttactaatttggcaggtattcaaaactgccattaagataggatttcatgtcagatacgtatttaaagagtaaagtcaaatttgtttaatgtcagatcagtgacagaagtgaaaagaaagtaattgtgaaagtgatgtttgagctattgtacacatctagcatatggaaagcaaatgcactcgaaaactactattctagaacatgaggcttcttcagcaacttgtgcactctgccattaataaattaaatttttcccctctagaaagccttaactatggcggaaactttttaaccttttatattttaataaataaaacattgtagtcccatttcttagtgtttgaaaggtgtgtcagtgagtcggccatgtctccatgtgtttcagacctgttcatcttattttatgatggtatatttcataagtaatattcccttacatgcaatggagctgattaaaattaatccatttcaatttctccatattggaacttcctcagctaccagatttctggtttggagaagtgctggaaagatttcaaagcctattcagttgtgtatgtggggatacgacagcaactgtgataccttgtagaatatgagtgatatgcaagctgtgttttttaattgttttaaaatgtaaattatggttatgctaaagtgaaaacctagaggaagctaatgattttatatactttgcacgaccaaatatggtcgtagtatgacgagttttatacattgccagagagttctgcctcctctgaaataacattcgcactgtagattgcatttcggcttttcctcctttcacattcttttttgctttacacttcacgtcttcgcacctgccctacctcccatcctttcaaagaggtttctttcacgttccagaattcagattgttctgtgatttcttttacatcagtctacccatttctgcaggcagccctgaaagcccttgtgttgattcagagtgtttgcagagaaatgcagttgaaccctggtagtggggtgtccctcacacacccgcgcacccctcccaaagttcaggatgaaaggctagaaaacccattcaaagttaggaaagaacacagatctttgaggccgatagcctagacctagaagatgaccttgagtatgtaaacattgtctccgtgacacaaaacactgaaactcttcatgtgcatataacacctgcttctgctcccattgtttcaagctcatcttatctttgtagtagtaatgtttgtctttgatacctacaaactaaaaaggtacttttatcaaggtttctcaaaacatttacaaaaccagctttgagaaaatgttatgttgcctggcaacagcactcggagtagtaattgtgttttctcattgtgatgttggtctgtgtgagcaaccagtgtagtgactctttggttcattattcgtgttgtttttatttttagtctctgtgtgacccaacagtggcaggggttacaaccccctctcctttcttttttgtatttatctatttgtaggattgtcagatcaagtacaagatgcccagttaagtttgaatttcagagaaacaatttcacgttaagaatgtttcatgcaatatttggcatatatttacagtaaaagcattcattatttgtctgaaattcaaatttaactgagcatgctggtttttctcattgtttggtttttctaaatctggcaatcctacagctgtggtcatgggaaatcacctacagcatgttaaagtcctctagtcatcatctcgtcacctgaaatggaagtcctttttccctcaccctccacttctttccaaaggagggcatcaaggaacttaacctgcctgcctggtgggtttctatttaagacatctttgtgattatatttaacctgcaattgtgctttggcttaatgtctagctcactgtacttgtaaatgattaatattcaataaaaccatttttaaagta

SEQ ID NO: 4070 - DNA, 6157 bp, Homo sapiens
  source 1..6157: mol_type = genomic DNA
cgcgccgcctcgctagccgaaacctgcccagccggtgcccggccactgcgcacgcgcgggacgacgtcacgtgcgctcccggggctggacggagctggcaggaggggccttgccagcttccgccgccgcgtcgtttcaggacccggacggcggattcgcgctgcctccgccgccgcggggcagccggggggcagggagcccagcgaggggcgcgcgtgggcgcggccatgggactgcgccggatccggtgacagcagggagccaagcggcccgggccctgagcgcgtcttctccggggggcctcgccctcctgctcgcggggccggggctcctgctccggttgctggcgctgttgctggctgtggcggcggccaggatcatgtcgggtcgccgctgcgccggcgggggagcggcctgcgcgagcgccgcggccgaggccgtggagccggccgcccgagagctgttcgaggcgtgccgcaacggggacgtggaacgagtcaagaggctggtgacgcctgagaaggtgaacagccgcgacacggcgggcaggaaatccaccccgctgcacttcgccgcaggttttgggcggaaagacgtagttgaatatttgcttcagaatggtgcaaatgtccaagcacgtgatgatgggggccttattcctcttcataatgcatgctcttttggtcatgctgaagtagtcaatctccttttgcgacatggtgcagaccccaatgctcgagataattggaattatactcctctccatgaagctgcaattaaaggaaagattgatgtttgcattgtgctgttacagcatggagctgagccaaccatccgaaatacagatggaaggacagcattggatttagcagatccatctgccaaagcagtgcttactggtgaatataagaaagatgaactcttagaaagtgccaggagtggcaatgaagaaaaaatgatggctctactcacaccattaaatgtcaactgccacgcaagtgatggcagaaagtcaactccattacatttggcagcaggatataacagagtaaagattgtacagctgttactgcaacatggagctgatgtccatgctaaagataaaggtgatctggtaccattacacaatgcctgttcttatggtcattatgaagtaactgaacttttggtcaagcatggtgcctgtgtaaatgcaatggacttgtggcaattcactcctcttcatgaggcagcttctaagaacagggttgaagtatgttctcttctcttaagttatggtgcagacccaacactgctcaattgtcacaataaaagtgctatagacttggctcccacaccacagttaaaagaaagattagcatatgaatttaaaggccactcgttgctgcaagctgcacgagaagctgatgttactcgaatcaaaaaacatctctctctggaaatggtgaatttcaagcatcctcaaacacatgaaacagcattgcattgtgctgctgcatctccatatcccaaaagaaagcaaatatgtgaactgttgctaagaaaaggagcaaacatcaatgaaaagactaaagaattcttgactcctctgcacgtggcatctgagaaagctcataatgatgttgttgaagtagtggtgaaacatgaagcaaaggttaatgctctggataatcttggtcagacttctctacacagagctgcatattgtggtcatctacaaacctgccgcctactcctgagctatgggtgtgatcctaacattatatcccttcagggctttactgctttacagatgggaaatgaaaatgtacagcaactcctccaagagggtatctcattaggtaattcagaggcagacagacaattgctggaagctgcaaaggctggagatgtcgaaactgtaaaaaaactgtgtactgttcagagtgtcaactgcagagacattgaagggcgtcagtctacaccacttcattttgcagctgggtataacagagtgtccgtggtggaatatctgctacagcatggagctgatgtgcatgctaaagataaaggaggccttgtacctttgcacaatgcatgttcttatggacattatgaagttgcagaacttcttgttaaacatggagcagtagttaatgtagctgatttatggaaatttacacctttacatgaagcagcagcaaaaggaaaatatgaaatttgcaaacttctgctccagcatggtgcagaccctacaaaaaaaaacagggatggaaatactcctttggatcttgttaaagatggagatacagatattcaagatctgcttaggggagatgcagctttgctagatgctgccaagaagggttgtttagccagagtgaagaagttgtcttctcctgataatgtaaattgccgcgatacccaaggcagacattcaacacctttacatttagcagctggttataataatttagaagttgcagagtatttgttacaacacggagctgatgtgaatgcccaagacaaaggaggacttattcctttacataatgcagcatcttacgggcatgtagatgtagcagctctactaataaagtataatgcatgtgtcaatgccacggacaaatgggctttcacacctttgcacgaagcagcccaaaagggacgaacacagctttgtgctttgttgctagcccatggagctgacccgactcttaaaaatcaggaaggacaaacacctttagatttagtttcagcggatgatgtcagcgctcttctgacagcagccatgcccccatctgctctgccctcttgttacaagcctcaagtgctcaatggtgtgagaagcccaggagccactgcagatgctctctcttcaggtccatctagcccatcaagcctttctgcagccagcagtcttgacaacttatctgggagtttttcagaactgtcttcagtagttagttcaagtggaacagagggtgcttccagtttggagaaaaaggaggttccaggagtagattttagcataactcaattcgtaaggaatcttggacttgagcacctaatggatatatttgagagagaacagatcactttggatgtattagttgagatggggcacaaggagctgaaggagattggaatcaatgcttatggacataggcacaaactaattaaaggagtcgagagacttatctccggacaacaaggtcttaacccatatttaactttgaacacctctggtagtggaacaattcttatagatctgtctcctgatgataaagagtttcagtctgtggaggaagagatgcaaagtacagttcgagagcacagagatggaggtcatgcaggtggaatcttcaacagatacaatattctcaagattcagaaggtttgtaacaagaaactatgggaaagatacactcaccggagaaaagaagtttctgaagaaaaccacaaccatgccaatgaacgaatgctatttcatgggtctccttttgtgaatgcaattatccacaaaggctttgatgaaaggcatgcgtacataggtggtatgtttggagctggcatttattttgctgaaaactcttccaaaagcaatcaatatgtatatggaattggaggaggtactgggtgtccagttcacaaagacagatcttgttacatttgccacaggcagctgctcttttgccgggtaaccttgggaaagtctttcctgcagttcagtgcaatgaaaatggcacattctcctccaggtcatcactcagtcactggtaggcccagtgtaaatggcctagcattagctgaatatgttatttacagaggagaacaggcttatcctgagtatttaattacttaccagattatgaggcctgaaggtatggtcgatggataaatagttattttaagaaactaattccactgaacctaaaatcatcaaagcagcagtggcctctacgttttactcctttgctgaaaaaaaatcatcttgcccacaggcctgtggcaaaaggataaaaatgtgaacgaagtttaacattctgacttgataaagctttaataatgtacagtgttttctaaatatttcctgttttttcagcactttaacagatgccattccaggttaaactgggttgtctgtactaaattataaacagagttaacttgaaccttttatatgttatgcattgattctaacaaactgtaatgccctcaacagaactaattttactaatacaatactgtgttctttaaaacacagcatttacactgaatacaatttcatttgtaaaactgtaaataagagcttttgtactagcccagtatttatttacattgctttgtaatataaatctgttttagaactgcagcggtttacaaaattttttcatatgtattgttcatctatacttcatcttacatcgtcatgattgagtgatctttacatttgattccagaggctatgttcagttgttagttgggaaagattgagttatcagatttaatttgccgatgggagcctttatctgtcattagaaatctttctcatttaagaacttatgaatatgctgaagatttaatttgtgatacctttgtatgtatgagacacattccaaagagctctaactatgataggtcctgattactaaagaagcttctttactggcctcaatttctagctttcatgttggaaaattttctgcagtccttctgtgaaaattagagcaaagtgctcctgttttttagagaaactaaatcttgctgttgaacaattattgtgttcttttcatggaacataagtaggatgttacatttccagggtgggaagggtaatcctaaatcatttcccaatctattctaattaccttaaatctaaaggggaaaaaaaaaatcacaaacaggactgggtagttttttatcctaagtatattttttcctgttctttttacttggttttattgctgtatttatagccaatctatacatcatgggtaaacttaacccagaactataaaatgtagttgtctcagtcccctccaggcctcctgaatgggcaagtgcagtgaaacaggtgcttcttgctcctgggttttctctccatgatgttatgcccaattggaaatatgctgtcagtttgtgcaccatatggtgaccacgcctgtgctcagtttggcagctatagaaggaaatgctgtcccataaaatgccattcctattttctaatataaaactcttttccaggaagcatgcttaagcatcttgttacagagacatacatccattatggcttggcaatctcttttatttgttgactctagctcccttcaaagtcgaggaaagatctttactcacttaatgaggacattccccatcactgtctgtaccagttcacctttattttacgttttattcagtctgtaaattaactggccctttgcagtaacttgtacataaagtgctagaaaatcatgttccttgtcctgagtaagagttaatcagagtaaatgcatttctggagttgtttctgtgatgtaaattatgatcattatttaagaagtcaaatcctgatcttgaagtgctttttatacagctctctaataattacaaatatccgaaagtcatttcttggaacacaagtggagtatgccaaattttatatgaatttttcagattatctaagcttccaggttttataattagaagataatgagagaattaatggggtttatatttacattatctctcaactatgtagcccatattactcaccctatgagtgaatctggaattgcttttcatgtgaaatcattgtggtctatgagtttacaatactgcaaactgtgttattttatctaatccattgcttaatgagtgtgtttttccatgaatgaatataccgtggttcatatgttagcatggcagcattttcagatagctttttgtttgttgggaagttggggttttggggggagggggagtattagtacgttgcatgaaatagcttactttataatgatggaattgctttttcttttgtcttgtgatttttttttttgaagtgaaatttaactttttgtgcaagtagtactattatacccatcttcagtgtcttacttgtactgtatcacattccataccctcatttaattcttaataaaactgttcacttgtt

SEQ ID NO: 4071 - DNA, 3339 bp, Homo sapiens
  source 1..3339: mol_type = genomic DNA
cagagatcacgacaagatctaaccagtcgcgcgtggtccccggcgccggagcgggccagctcagcccggcccagcccggccccgcgcagagcccccgccgcccccgcgcacagagccgggtgccccttgcggtgcgccggacgggaagccccgaggagcagctgctgcgcccgccacccgggtcgtccgtccaccgcgcgcgccgccgcccgggccgggggtccgagccgcgcgcccccggccccggccccggcccccgggcgcctgggccggatgtcccgatgagagagccggcgctggcggccagcgccatggcttaccacccgttccacgcgccacggcccgccgacttccccatgtccgcctttctggcggcggcgcagccctccttcttcccggcactcgcgctgccgcccggcgcgctggccaagccgctgcccgacccgggcctggcgggggcggcggccgcggcggcggcggcggcagcagcggccgaggcggggctgcacgtctcggcactgggcccgcacccgcccgccgcgcatctgcgctccctcaagagcctggagcccgaggacgaggtggaggacgaccccaaggtgacgctggaggccaaggagctgtgggaccagttccacaagctaggcacggagatggtcatcaccaagtccgggaggcggatgttcccccccttcaaggtgcgagtcagcggcctggacaagaaggccaagtatatcctgctgatggacattgtagccgctgacgattgccgctataagttccacaactcgcgctggatggtggcgggcaaggccgaccctgagatgcccaaacgcatgtacatccacccagacagcccagccacgggggagcagtggatggctaagcctgtggccttccacaagctgaagctgaccaacaacatctctgacaagcacggcttcaccatcctaaactccatgcacaagtaccagccgcgcttccacatagtgcgagccaacgacatcctgaagctgccttacagcaccttccgcacctacgtgttcccggagaccgacttcatcgccgtcactgcctaccagaatgacaagatcacacagctgaagatcgacaacaacccgtttgccaagggcttccgggacaccgggaacggccggcgggagaaaaggaagcagctgacgctgccgtctctacgcttgtacgaggagcactgcaaacccgagcgcgatggcgcggagtcagacgcctcgtcgtgcgaccctccccccgcgcgggaaccacccacctccccgggcgcagcgcccagtccgctgcgcctgcaccgggcccgagctgaggagaagtcgtgcgccgcggacagcgacccggagcctgagcggttgagcgaggagcgtgcgggggcgccgctaggccgcagcccggctccagacagcgccagccccactcgcttgaccgaacccgagcgcgcccgggagcggcgtagtcccgagaggggcaaggagccggccgagagcggcggggacggcccgttcggcctgaggagcctggagaaggagcgcgccgaagctcggaggaaggacgaggggcgcaaggaggcggccgagggcaaggagcagggcctggcgccgctggtggtgcagacagacagtgcgtcccccctgggcgccggacacctgcccggcctggccttttccagccacttgcacgggcagcagttctttgggccgctgggagccggccagccgctcttcctgcaccctggacagttcaccatgggccctggcgccttctccgccatgggcatgggtcacctactggcctcggtggcaggcggcggcaacggcggaggtggcgggcctgggaccgccgcggggctggacgcaggcgggctgggtcccgcggccagcgcagcaagcaccgccgcgcccttcccgttccacctctcccagcacatgctggcatctcagggaattccaatgcccactttcggaggcctcttcccctacccctacacctacatggcagcagcagccgcagccgcctcggctttgcccgccactagtgctgcagctgccgccgccgcagccgccggctccctctcccggagccccttcctgggcagtgcccggccccgactgcgtttcagcccctatcagatcccggtcaccatcccgcctagcactagcctcctcaccaccgggctggcctctgagggctccaaggccgctggtggaaacagccgggagcctagccccctgcccgagctggctctccgcaaagtaggggccccatcccgcggtgccctgtcgcccagtggctcggccaaggaggcggccaatgaactgcagagcatccagagactggtgagtgggctggagagccagcgagccctctccccaggccgggagtcgcccaagtgaggggctgcccagctgctcccctgccacgcaggccacccgggctgcctgcccctgctgcttgggacgtgtacagcacagaatgagtatttatttaaataaaggagaaaagtgggctgcagcagccggaatagagcctcgtctggcaagtcggggcctgggacacttccctgggcctcaacaaggatcaggctgctggaaacacagtcacttgggagctgctgggctaggtccagatccgctccagcgtcaaggtggcatccgaaggtgtctctggtcttccagcgaggtgggagaggcctcatccagggcccagcggtccctgcagaagccagaaggtgcaggggccaggggtgggagcatcggagggagtcccagagccctggaccttgggcctagaccgcgtgataaaactgggttgagggatgctggaaccagttacgactgaagtcagtgtagacctgagctgggagggaacctgttagtctccccacctcttccctgaagagacaggcacccctcccagccgtggtcaacggagggagtggcacttctgccttgagtccccaggggaaaaaaaaaaaagatatttatgaaataaatggtaatttgtgtaaataagctttaaggttcccagaatatgcaaattggtattaatttattcaaaggtgtacattgctgtgtacatatatttagagattaactcatacatttaaagtttttttcattttacgtgagcatctatattgtacagggctgggggggcccttggctgcgggagaaggcccagagccctggaggagccaccaccccgccggcccctcgacccctcggcccctcggcccctccgcccgggtttggctcgcccggcccgcgggctccacctcaggttttcacttttcgctccggagcgagaacgaaa

SEQ ID NO: 4072 - DNA, 1421 bp, Homo sapiens
  source 1..1421: mol_type = genomic DNA
cagagatcacgacaagatctaaccagtcgcgcgtggtccccggcgccggagcgggccagctcagcccggcccagcccggccccgcgcagagcccccgccgcccccgcgcacagagccgggtgccccttgcggtgcgccggacgggaagccccgaggagcagctgctgcgcccgccacccgggtcgtccgtccaccgcgcgcgccgccgcccgggccgggggtccgagccgcgcgcccccggccccggccccggcccccgggcgcctgggccggatgtcccgatgagagagccggcgctggcggccagcgccatggcttaccacccgttccacgcgccacggcccgccgacttccccatgtccgcctttctggcggcggcgcagccctccttcttcccggcactcgcgctgccgcccggcgcgctggccaagccgctgcccgacccgggcctggcgggggcggcggccgcggcggcggcggcggcagcagcggccgaggcggggctgcacgtctcggcactgggcccgcacccgcccgccgcgcatctgcgctccctcaagagcctggagcccgaggacgaggtggaggacgaccccaaggtgacgctggaggccaaggagctgtgggaccagttccacaagctaggcacggagatggtcatcaccaagtccgggaggcggatgttcccccccttcaaggtgcgagtcagcggcctggacaagaaggccaagtatatcctgctgatggacattgtagccgctgacgattgccgctataagttccacaactcgcgctggatggtggcgggcaaggccgaccctgagatgcccaaacgcatgtacatccacccagacagcccagccacgggggagcagtggatggctaagcctgtggccttccacaagctgaagctgaccaacaacatctctgacaagcacggcttcaccatcctaaactccatgcacaagtaccagccgcgcttccacatagtgcgagccaacgacatcctgaagctgccttacagcaccttccgcacctacgtgttcccggagaccgacttcatcgccgtcactgcctaccagaatgacaagatcacacagctgaagatcgacaacaacccgtttgccaagggcttccgggacaccgggaacggccggcgggagaaaaggaagcagctgacgctgccgtctctacgcttgtacgaggagcactgcaaacccgagcgcgatggcgcggagtcagacgcctcgtcgtgcgaccctccccccgcgcgggaaccacccacctccccgggcgcagcgcccagtccgctgcgcctgcaccgggcccgaggtgagggtcggaccggaggagggacagggaggtggggggggtcctcaggtcgctgggctggtcttttgctgagccacccgctaacctga

SEQ ID NO: 4073 - DNA, 5001 bp, Homo sapiens
  source 1..5001: mol_type = genomic DNA
gcccgggactatcccttcgcggtgtagcggcagccggagacctggctgaggaggcaaccgcgtagacacctccctgcttagaaaacaaacactgaaccagaccgatcccagttggagggttcgaaaatgttccagacagcctgtcgggaggggttgttgttgctgttggactaaatagctattcctgattggtcatgtatagggttttttaaggcgggtggggggaggagggggtagaggaaaggctccaaacacctgcaggttgggggcggaaagctgtttgcgattccctggactggttggtcggggacaggaggtaattcccagccattgacccccatttctctctctccctccctcttgccctgcctctttctctccacccctatctttcctggaaactcgctttgggcgcggcagatcgcccaggaccacaccgcagcgtaactgcaggcctctcagcgaaaaagggggaaagcaaagacccgggtgtgcatcctcttcctcggcttccgcccctttccggcggagtggagatcctattcagaggggccggtctctctaaatatgccccaggatgaccgagcggccgccgagcgaggcggctcgcagtgacccccagctagagggacgggacgcggccgaggccagcatggcccccccgcacctggtcctgctgaacggcgtcgccaaggagacgagccgcgcggccgcagcggagcccccagtcatcgaactgggcgcgcgcggaggcccggggggcggccctgccggtgggggcggcgccgcgagagacttaaagggccgcgacgcggcgacggccgaagcgcgccatcgggtgcccaccaccgagctgtgcagacctcccgggcccgccccggcccccgcgcccgcctcggttacagcggagctgcccggcgacggccgcatggtgcagctgagtcctcccgcgctggctgcccccgccgcccccggccgcgcgctgctctacagcctcagccagccgctggcctctctcggcagcgggttctttggggagccggatgccttccctatgttcaccaccaacaatcgagtgaagaggagaccttccccctatgagatggagattactgatggtccccacaccaaagttgtgcggcgtatcttcaccaacagccgggagcgatggcggcagcagaatgtgaacggggcctttgccgagctccgcaagctgatccccacacatcccccggacaagaagctcagcaagaatgagatcctccgcctggccatgaagtatatcaacttcttggccaagctgctcaatgaccaggaggaggagggcacccagcgggccaagactggcaaggaccctgtggtgggggctggtgggggtggaggtgggggagggggcggcgcgcccccagatgacctcctgcaagacgtgctttcccccaactccagctgcggcagctccctggatggggcagccagcccggacagctacacggaggagcccgcgcccaaacacacggcccgcagcctccatcctgccatgctgcctgccgccgatggagccggccctcggtgatgggtctgggccaccaggatcagccaggagggcgttcttaggctgctgggatggtgggcttcagggcaggtggggtgagaattgggcggctctgaagcaaggcggtggacttgaactttcctggatgtctgaactttgggaagcctttactgaccctggggctggcttttctgtttcctgtaccagtaggagatcagaaaaatggagcaaagtggtaggtactttttgtgaagacggcacggtcttccctcttccctcagtcccaaatccttcccaagtaagaggctggagttgtcactgcttttggcctggagtttgggatccctgtctttcctaagacctggggttgtcagctctcatctgaggcatccagcagtctctgccttgcctttagcccctcccaagctggctggggtggcctgtgtggccacttctgtccatatttataggtacccaatagctgcccatttcgtgagccccatcttcacccaggcctatgttgatccatccagcttgccagatgctgcagagtcacaagcctcgaggtgccttcttcagggcctggttgaagaagatgatcagtggacagtctgctctagatgagctgggccggagggtcaggaaacccagtcgcccttacttcttgccctggggatcaaagttctgctttctccccaatgagacttgccttcctaagcctgtggctgtggagacaatgtctgcagccctgagaaagccctgtcgggctttgtgtgaaggcagagaaagggacaatgatagtagagtgatatggagcaagagatattttgggcatgtgggcttcaactcctcgacatcactgttcatgctggcgagtgaatgccagtgtgctgatgggcgtacgctggtgctgagtagatgcgcagccccatctgtgcattctcctggatgcttagagggatttctttgctgtaagatgtctgtttgctgatggtctggtctatgttccgaattgagcacaaaacctgtcctatgaatgctttgcatttggaatttttgcttgacttcagttattggtggaatctttagcgctcaataggaccaggatccagcctcacttctagggtatgggaaatccaatcagagaccaggccctggctaagacccaaacatatgcacattcacttagcagaaccttaaacacccctcagttgtgcagcttttggtcatcaagggtgcgtctgggaggttggtttaatgcaatagaagtgctcccctctgaaagttgtacatgaaatttttgtaaatcacatccttatccttcatcttttaaagaaataaccactgcaagtccttttgtaaagtgaagaatccttttgtagaatgaaccactgccccttcattgatttcctgtgtcaatccagatggtgggatgtggttttcttaaggtgaggcctgtctgtgacctgcatctaagcccatgggacaaattgcacagaagtcctgtatgtctgtcattgtacccttaagtcaccctagccctctccctctaggctctgccttcgaggtcagaggagagatagcctgtggccctgtcctgccatgcaagaactcatcactgtggctgtctggaaagcccccccttatagtttgggcttcagcctagtggcttgtcctcaccatgatggggccctaattcagccatgtacagacagagaatatgtctgctcctttccccttccttttaagtaaggtccaattctcgagcttggggcaacattgttcacctttgtagcactcaggctctccattcaatttcaggctccccagatcatgttttggtgaaaattagggttggttcctttccaacgtttggaagatcctgtgaggagccccatctgtctaaagatagagtcattgctgtaggatctaaggctgtttgcttcaccgtggattcgcttgagttaggaatgagaagtagccacagtatggatgggtggatgggttttatgagatggatcacatattttattaagaactcaaacttctggctccctcttctttcagacttgccatgtgactctggcttggcctatctcctagggctatggtgtggactgaatgggatcatgaaagtagacagttttgagaacgtaaagaactttttcttttccctcaatctcaatcctgcagtggggtttcgcagcctgagtccacgacctaggcagtaggccggtgtgcctgactgcccagcatttgggtaatttagattgtaaaccgctttggcctgagttattgagattgtcctcatttctccagattatctatttgtgtgtgtgtgtgtgtgtgtgtgagagacggtgtcttgttctgtcactcaggctggagtacagtggtgccatcattgctgtctgcagccttgaactctgggctcaagcaatcctctcacctcagcctcccgagtagggaggaccacaggtgtgagccaccacacctggctaatttttacttttttttttttttggtagagatggagtcttgctatattgcccaggctggtcttgaagtcctggcttcaggcaattctcctgcctttgcctccagaagcactgggatcacaggtgtcagccattgcacccagcccagattgtcttaatttctatcttgttccaaggccagggacagtaataagaatggaaaagagatatgggaacactggcagactgtgtaaaatgtaatgcaactacccaaaacaagcctggtaggaaagggcaagtctttaggtctttgtaagaactaaagaagatctgtaatttttattttcaccctctgtaccccatgaccttatccttcctctccttccttgttacccatgaaaaactggcaacattccaagaatagcatctgtacaaaggggaaagaacataaaggtaaaacaaaacaaaacaacattttgagaacaaagatgaccataaccactgaagggaatcacatcttttaagacaaattcatattcttttatttgttatggcagatgacaagatggtacaacctttattcttttccaaaataaaacaaagggcacagcatctgtagtcagccgacaactatttcggccttttgggggtgggtctggccgtacttgtgatttcgatggtacgtgaccctctgctgaagacttgccccctgcccgtgtacatagtgcattgtttctgtgggcgggcccagcactttccgtcaacgttgtactgtatgtgatgaattgcgttggtctctgcatttttctgcagaagaggagtaaccgctccaggtaccttgacctttgtacagcccagaggccaacactgtgggtgtgtgactctttagcaaaaaaaacccatgtggtgatgatgtgtatatatatgtgaggatgtatcgggaagatttctaaataaaagttttacaaaggg

SEQ ID NO: 4074 - DNA, 5008 bp, Homo sapiens
  source 1..5008: mol_type = genomic DNA
gcccgggactatcccttcgcggtgtagcggcagccggagacctggctgaggaggcaaccgcgtagacacctccctgcttagaaaacaaacactgaaccagaccgatcccagttggagggttcgaaaatgttccagacagcctgtcgggaggggttgttgttgctgttggactaaatagctattcctgattggtcatgtatagggttttttaaggcgggtggggggaggagggggtagaggaaaggctccaaacacctgcaggttgggggcggaaagctgtttgcgattccctggactggttggtcggggacaggaggtaattcccagccattgacccccatttctctctctccctccctcttgccctgcctctttctctccacccctatctttcctggaaactcgctttgggcgcggcagatcgcccaggaccacaccgcagcgtaactgcaggcctctcagcgaaaaagggggaaagcaaagacccgggtgtgcatcctcttcctcggcttccgcccctttccggcggagtggagatcctattcagaggggccggtctctctaaatatgccccaggatgaccgagcggccgccgagcgaggcggctcgcagtgacccccagctagagggacgggacgcggccgaggccagcatggcccccccgcacctggtcctgctgaacggcgtcgccaaggagacgagccgcgcggccgcagcggagcccccagtcatcgaactgggcgcgcgcggaggcccggggggcggccctgccggtgggggcggcgccgcgagagacttaaagggccgcgacgcggcgacggccgaagcgcgccatcgggtgcccaccaccgagctgtgcagacctcccgggcccgccccggcccccgcgcccgcctcggttacagcggagctgcccggcgacggccgcatggtgcagctgagtcctcccgcgctggctgcccccgccgcccccggccgcgcgctgctctacagcctcagccagccgctggcctctctcggcagccacagcgggttctttggggagccggatgccttccctatgttcaccaccaacaatcgagtgaagaggagaccttccccctatgagatggagattactgatggtccccacaccaaagttgtgcggcgtatcttcaccaacagccgggagcgatggcggcagcagaatgtgaacggggcctttgccgagctccgcaagctgatccccacacatcccccggacaagaagctcagcaagaatgagatcctccgcctggccatgaagtatatcaacttcttggccaagctgctcaatgaccaggaggaggagggcacccagcgggccaagactggcaaggaccctgtggtgggggctggtgggggtggaggtgggggagggggcggcgcgcccccagatgacctcctgcaagacgtgctttcccccaactccagctgcggcagctccctggatggggcagccagcccggacagctacacggaggagcccgcgcccaaacacacggcccgcagcctccatcctgccatgctgcctgccgccgatggagccggccctcggtgatgggtctgggccaccaggatcagccaggagggcgttcttaggctgctgggatggtgggcttcagggcaggtggggtgagaattgggcggctctgaagcaaggcggtggacttgaactttcctggatgtctgaactttgggaagcctttactgaccctggggctggcttttctgtttcctgtaccagtaggagatcagaaaaatggagcaaagtggtaggtactttttgtgaagacggcacggtcttccctcttccctcagtcccaaatccttcccaagtaagaggctggagttgtcactgcttttggcctggagtttgggatccctgtctttcctaagacctggggttgtcagctctcatctgaggcatccagcagtctctgccttgcctttagcccctcccaagctggctggggtggcctgtgtggccacttctgtccatatttataggtacccaatagctgcccatttcgtgagccccatcttcacccaggcctatgttgatccatccagcttgccagatgctgcagagtcacaagcctcgaggtgccttcttcagggcctggttgaagaagatgatcagtggacagtctgctctagatgagctgggccggagggtcaggaaacccagtcgcccttacttcttgccctggggatcaaagttctgctttctccccaatgagacttgccttcctaagcctgtggctgtggagacaatgtctgcagccctgagaaagccctgtcgggctttgtgtgaaggcagagaaagggacaatgatagtagagtgatatggagcaagagatattttgggcatgtgggcttcaactcctcgacatcactgttcatgctggcgagtgaatgccagtgtgctgatgggcgtacgctggtgctgagtagatgcgcagccccatctgtgcattctcctggatgcttagagggatttctttgctgtaagatgtctgtttgctgatggtctggtctatgttccgaattgagcacaaaacctgtcctatgaatgctttgcatttggaatttttgcttgacttcagttattggtggaatctttagcgctcaataggaccaggatccagcctcacttctagggtatgggaaatccaatcagagaccaggccctggctaagacccaaacatatgcacattcacttagcagaaccttaaacacccctcagttgtgcagcttttggtcatcaagggtgcgtctgggaggttggtttaatgcaatagaagtgctcccctctgaaagttgtacatgaaatttttgtaaatcacatccttatccttcatcttttaaagaaataaccactgcaagtccttttgtaaagtgaagaatccttttgtagaatgaaccactgccccttcattgatttcctgtgtcaatccagatggtgggatgtggttttcttaaggtgaggcctgtctgtgacctgcatctaagcccatgggacaaattgcacagaagtcctgtatgtctgtcattgtacccttaagtcaccctagccctctccctctaggctctgccttcgaggtcagaggagagatagcctgtggccctgtcctgccatgcaagaactcatcactgtggctgtctggaaagcccccccttatagtttgggcttcagcctagtggcttgtcctcaccatgatggggccctaattcagccatgtacagacagagaatatgtctgctcctttccccttccttttaagtaaggtccaattctcgagcttggggcaacattgttcacctttgtagcactcaggctctccattcaatttcaggctccccagatcatgttttggtgaaaattagggttggttcctttccaacgtttggaagatcctgtgaggagccccatctgtctaaagatagagtcattgctgtaggatctaaggctgtttgcttcaccgtggattcgcttgagttaggaatgagaagtagccacagtatggatgggtggatgggttttatgagatggatcacatattttattaagaactcaaacttctggctccctcttctttcagacttgccatgtgactctggcttggcctatctcctagggctatggtgtggactgaatgggatcatgaaagtagacagttttgagaacgtaaagaactttttcttttccctcaatctcaatcctgcagtggggtttcgcagcctgagtccacgacctaggcagtaggccggtgtgcctgactgcccagcatttgggtaatttagattgtaaaccgctttggcctgagttattgagattgtcctcatttctccagattatctatttgtgtgtgtgtgtgtgtgtgtgtgagagacggtgtcttgttctgtcactcaggctggagtacagtggtgccatcattgctgtctgcagccttgaactctgggctcaagcaatcctctcacctcagcctcccgagtagggaggaccacaggtgtgagccaccacacctggctaatttttacttttttttttttttggtagagatggagtcttgctatattgcccaggctggtcttgaagtcctggcttcaggcaattctcctgcctttgcctccagaagcactgggatcacaggtgtcagccattgcacccagcccagattgtcttaatttctatcttgttccaaggccagggacagtaataagaatggaaaagagatatgggaacactggcagactgtgtaaaatgtaatgcaactacccaaaacaagcctggtaggaaagggcaagtctttaggtctttgtaagaactaaagaagatctgtaatttttattttcaccctctgtaccccatgaccttatccttcctctccttccttgttacccatgaaaaactggcaacattccaagaatagcatctgtacaaaggggaaagaacataaaggtaaaacaaaacaaaacaacattttgagaacaaagatgaccataaccactgaagggaatcacatcttttaagacaaattcatattcttttatttgttatggcagatgacaagatggtacaacctttattcttttccaaaataaaacaaagggcacagcatctgtagtcagccgacaactatttcggccttttgggggtgggtctggccgtacttgtgatttcgatggtacgtgaccctctgctgaagacttgccccctgcccgtgtacatagtgcattgtttctgtgggcgggcccagcactttccgtcaacgttgtactgtatgtgatgaattgcgttggtctctgcatttttctgcagaagaggagtaaccgctccaggtaccttgacctttgtacagcccagaggccaacactgtgggtgtgtgactctttagcaaaaaaaacccatgtggtgatgatgtgtatatatatgtgaggatgtatcgggaagatttctaaataaaagttttacaaagggg

SEQ ID NO: 4075 - DNA, 4641 bp, Homo sapiens
  source 1..4641: mol_type = genomic DNA
cgttttcttcgttgcgtacgattgtgctccgttggtgttctcagcagggatctgattctatcgcccaggaccacaccgcagcgtaactgcaggcctctcagcgaaaaagggggaaagcaaagacccgggtgtgcatcctcttcctcggcttccgcccctttccggcggagtggagatcctattcagaggggccggtctctctaaatatgccccaggatgaccgagcggccgccgagcgaggcggctcgcagtgacccccagctagagggacgggacgcggccgaggccagcatggcccccccgcacctggtcctgctgaacggcgtcgccaaggagacgagccgcgcggccgcagcggagcccccagtcatcgaactgggcgcgcgcggaggcccggggggcggccctgccggtgggggcggcgccgcgagagacttaaagggccgcgacgcggcgacggccgaagcgcgccatcgggtgcccaccaccgagctgtgcagacctcccgggcccgccccggcccccgcgcccgcctcggttacagcggagctgcccggcgacggccgcatggtgcagctgagtcctcccgcgctggctgcccccgccgcccccggccgcgcgctgctctacagcctcagccagccgctggcctctctcggcagcgggttctttggggagccggatgccttccctatgttcaccaccaacaatcgagtgaagaggagaccttccccctatgagatggagattactgatggtccccacaccaaagttgtgcggcgtatcttcaccaacagccgggagcgatggcggcagcagaatgtgaacggggcctttgccgagctccgcaagctgatccccacacatcccccggacaagaagctcagcaagaatgagatcctccgcctggccatgaagtatatcaacttcttggccaagctgctcaatgaccaggaggaggagggcacccagcgggccaagactggcaaggaccctgtggtgggggctggtgggggtggaggtgggggagggggcggcgcgcccccagatgacctcctgcaagacgtgctttcccccaactccagctgcggcagctccctggatggggcagccagcccggacagctacacggaggagcccgcgcccaaacacacggcccgcagcctccatcctgccatgctgcctgccgccgatggagccggccctcggtgatgggtctgggccaccaggatcagccaggagggcgttcttaggctgctgggatggtgggcttcagggcaggtggggtgagaattgggcggctctgaagcaaggcggtggacttgaactttcctggatgtctgaactttgggaagcctttactgaccctggggctggcttttctgtttcctgtaccagtaggagatcagaaaaatggagcaaagtggtaggtactttttgtgaagacggcacggtcttccctcttccctcagtcccaaatccttcccaagtaagaggctggagttgtcactgcttttggcctggagtttgggatccctgtctttcctaagacctggggttgtcagctctcatctgaggcatccagcagtctctgccttgcctttagcccctcccaagctggctggggtggcctgtgtggccacttctgtccatatttataggtacccaatagctgcccatttcgtgagccccatcttcacccaggcctatgttgatccatccagcttgccagatgctgcagagtcacaagcctcgaggtgccttcttcagggcctggttgaagaagatgatcagtggacagtctgctctagatgagctgggccggagggtcaggaaacccagtcgcccttacttcttgccctggggatcaaagttctgctttctccccaatgagacttgccttcctaagcctgtggctgtggagacaatgtctgcagccctgagaaagccctgtcgggctttgtgtgaaggcagagaaagggacaatgatagtagagtgatatggagcaagagatattttgggcatgtgggcttcaactcctcgacatcactgttcatgctggcgagtgaatgccagtgtgctgatgggcgtacgctggtgctgagtagatgcgcagccccatctgtgcattctcctggatgcttagagggatttctttgctgtaagatgtctgtttgctgatggtctggtctatgttccgaattgagcacaaaacctgtcctatgaatgctttgcatttggaatttttgcttgacttcagttattggtggaatctttagcgctcaataggaccaggatccagcctcacttctagggtatgggaaatccaatcagagaccaggccctggctaagacccaaacatatgcacattcacttagcagaaccttaaacacccctcagttgtgcagcttttggtcatcaagggtgcgtctgggaggttggtttaatgcaatagaagtgctcccctctgaaagttgtacatgaaatttttgtaaatcacatccttatccttcatcttttaaagaaataaccactgcaagtccttttgtaaagtgaagaatccttttgtagaatgaaccactgccccttcattgatttcctgtgtcaatccagatggtgggatgtggttttcttaaggtgaggcctgtctgtgacctgcatctaagcccatgggacaaattgcacagaagtcctgtatgtctgtcattgtacccttaagtcaccctagccctctccctctaggctctgccttcgaggtcagaggagagatagcctgtggccctgtcctgccatgcaagaactcatcactgtggctgtctggaaagcccccccttatagtttgggcttcagcctagtggcttgtcctcaccatgatggggccctaattcagccatgtacagacagagaatatgtctgctcctttccccttccttttaagtaaggtccaattctcgagcttggggcaacattgttcacctttgtagcactcaggctctccattcaatttcaggctccccagatcatgttttggtgaaaattagggttggttcctttccaacgtttggaagatcctgtgaggagccccatctgtctaaagatagagtcattgctgtaggatctaaggctgtttgcttcaccgtggattcgcttgagttaggaatgagaagtagccacagtatggatgggtggatgggttttatgagatggatcacatattttattaagaactcaaacttctggctccctcttctttcagacttgccatgtgactctggcttggcctatctcctagggctatggtgtggactgaatgggatcatgaaagtagacagttttgagaacgtaaagaactttttcttttccctcaatctcaatcctgcagtggggtttcgcagcctgagtccacgacctaggcagtaggccggtgtgcctgactgcccagcatttgggtaatttagattgtaaaccgctttggcctgagttattgagattgtcctcatttctccagattatctatttgtgtgtgtgtgtgtgtgtgtgtgagagacggtgtcttgttctgtcactcaggctggagtacagtggtgccatcattgctgtctgcagccttgaactctgggctcaagcaatcctctcacctcagcctcccgagtagggaggaccacaggtgtgagccaccacacctggctaatttttacttttttttttttttggtagagatggagtcttgctatattgcccaggctggtcttgaagtcctggcttcaggcaattctcctgcctttgcctccagaagcactgggatcacaggtgtcagccattgcacccagcccagattgtcttaatttctatcttgttccaaggccagggacagtaataagaatggaaaagagatatgggaacactggcagactgtgtaaaatgtaatgcaactacccaaaacaagcctggtaggaaagggcaagtctttaggtctttgtaagaactaaagaagatctgtaatttttattttcaccctctgtaccccatgaccttatccttcctctccttccttgttacccatgaaaaactggcaacattccaagaatagcatctgtacaaaggggaaagaacataaaggtaaaacaaaacaaaacaacattttgagaacaaagatgaccataaccactgaagggaatcacatcttttaagacaaattcatattcttttatttgttatggcagatgacaagatggtacaacctttattcttttccaaaataaaacaaagggcacagcatctgtagtcagccgacaactatttcggccttttgggggtgggtctggccgtacttgtgatttcgatggtacgtgaccctctgctgaagacttgccccctgcccgtgtacatagtgcattgtttctgtgggcgggcccagcactttccgtcaacgttgtactgtatgtgatgaattgcgttggtctctgcatttttctgcagaagaggagtaaccgctccaggtaccttgacctttgtacagcccagaggccaacactgtgggtgtgtgactctttagcaaaaaaaacccatgtggtgatgatgtgtatatatatgtgaggatgtatcgggaagatttctaaataaaagttttacaaagggg

SEQ ID NO: 4076 - DNA, 3910 bp, Homo sapiens
  source 1..3910: mol_type = genomic DNA
ttccccacagatacaaacttccaaccagcacgtaggtttccaggctaacccacaaaagcaagttgagtctagctcctccatattgatccacaccaatcatagctattctgaaatgtactttcctcacatctgtaaaatagggagaatactcatctcgaaggattggtgtagagtttatattgttctccataatactaacatctgtcttgttgtatttgcttctttgcttattgtctgaccccctctatagaatgtaagcttcatgaggtcaggacctttgttttgttcactgctatgtcccccatgcctagaacagtgcctgacacatagtgagtacagtactcaataaatattattgaataaagagatacattctttgttattcacccaagatgaccatattttgttgtttggggctgtattcttcaggagagaacagaaatgaataagccactctctgcctccaagaagatctcttcaagtggaggtgacagacatgcccaaagcaaatagattgcaataagacttgatgggagagaatgtgagtcttcacatcctagcatctttccagatagagacagggcctacccaaaagtctaatctgaaactgaactgaaatagaacagaaatagatcccaagtgatggaacctgtgcctttcccaaagcttggcttctaaaaggtagcaaacattttctactggagaggggaaagacaggaagaagaaaaagggagtttcctccttttctcttgggctctcagccagacagccactggcaaaacgttggaaaggcctaaatttgtcctggatgcacttccctgatcctagtcccaccaatcccagcccccacggccttaagcccctatggctccctcccaagattccaaacgtaagaaaagaacacacaccacagtccaaaggcttcttgtctggaatagccaaccctggggtaattgttaggtggaatgcaatctggttgaattcattcaaacactgtaggaattgcctctttcgaaccctgtaggattttacttcttgacgcatctgtttatttaaaaccaaaggggtatgttgaggcatgggcaccctggcagcagaccccaaaccaaccctcttgacttgtgcctgcctttcaggatatgttcccttcctgaatttgtctaagaaggctgagttggggggtggttgctgatttttataacatatagccagttgttcataggcctgtgttttaaagaagggcaagcctgaactcaccgtcctgcctcagggcctgggctccatacctggggagtagacagtcttctactttctaaaaagctggacttgaaatttggagtaaatctcctggttgagtgacaggtgtttcgcagctgagcccttgaggagattctccagttgggcagagacatcccttcctcagacgccttgtgggctggactcctttggcccagttcaaagtgaggggagggctcccaacaggccgggaagacagttgacttcaccctccttgggtttgtctgtctgtccgtctctgggaatggtcgcttcctgttttcccttttccttttaagcctcgccttgttcccctcttctctctcttcatgaactactccgagtcttggtctccgtccctctatctctggctcctgcatctgtctcggcttctggccttcctctccccctcccctcccctccctcgcgctgtcattcaccccgctcctctccgcgcacagccaatggagagacccagtcgaaaccgcgaagctctcttgcaccgggctttttcgcctggtgattgatgtcccagagtcaacagcgagcgagcagccggagcggggaagcagaagccagagaggggaagaatacggcgccccctctctccctcccctcccccttctactttagcctttctgcgcacttcgcttccaagtctccgcgcagccaggagccgctgttgcctcccagcccctgctagctgccccccgagccgagcgcagcgagcgccgccgcccgggccccccggtggggccagggccagcatggagcacctgggtccgcaccacctccacccgggtcacgcagagcccattagcttcggcatcgaccagatcctcaacagcccggaccagggtggctgcatgggacccgcctcgcgcctccaggacggagaatacggccttggctgcttggtcggaggcgcctacacttacggcggcgggggctccgcggccgcgacgggggctggaggagcgggggcctatggtactggaggtcccggcggccccggaggcccggcaggcggcggcggcgcctgcagcatgggtcctctgaccggctcctacaacgtgaacatggccttggcaggcggccccggtcctggcggcggcggcggcagcagcggcggtgccggggcactcagcgctgcgggggtaatccgggtgccggcacacaggccgctcgccggagccgtggcccacccccagcccctggccaccggcttgcccaccgtgccctctgtgcctgccatgccgggcgtcaacaacctcactggcctcaccttcccctggatggagagtaaccgcagatacacaaaggacaggttcacaggtcacccctatcagaaccggacgccccccaagaagaagaagccgcgcacgtccttcacacgcctgcagatctgcgagctggagaagcgcttccaccgccagaagtacctggcctcggccgagcgcgccgccctggccaaggcgctcaaaatgaccgatgcgcaggtcaaaacctggttccagaaccggcggacaaagtggagacggcagactgcggaggaacgggaggccgagaggcagcaagcgaaccgcatcctcctgcagttgcagcaggaggccttccagaagagcctggcacagccgctgcccgctgaccctctgtgcgtgcacaactcgtcgctcttcgccctgcagaatctgcagccgtggtctgacgactcgaccaaaatcactagcgtcacgtcggtggcgtcggcctgcgagtgagcctgcccattctgccctgtgggaccccaggcccactcaggggtcactgaggcctgagacccaggactcctccccaccctcctggcctcagactgcacccaggaggggaacactgccctcgcacggccccgaagggcccccacatttgtgccgacactgttctcccttcggtggaagagctcaagggacaaggacacgcgcccccctcccagaggcgtcccgcacctgtctgaactgttaagaaatctgtttttgtttatttcattttattttaatttttaacgtgggattcagagaaaggcaagggaggtaagggaggaggagcttctggggtccccagggctgtcatctgaatttgccctgggaaaccccttctctgtgacccacttctcatcacacacatggaaacccataggcccacacacaggtggtgtcactgtccctcctggtgtcaccccagagccacacatgggcatctatgggagagtgtcaaccagacagagggtcacagtgtttacactttggaccttacgatcaggcacaggtcaggggtgacacagactcatcctgaacagcatggcactccctccagcacaaacacaaggtcatggccacactgtgacacactacaccacacacaacagccaacagctacaacagcctcacttggtctgccaggcccccaccacacatcccagcccaatccaggtacgcacagacaggttttcacataaatgcagcccatttctccagaacccatttgaggggtgggggggtgttaatttatgcacttataaggtgttttctgtgtaaccattttataaagtgcttgtgtaatttatgtgaaaaaaataaataaaagcctccggatccgg

SEQ ID NO: 4077 - DNA, 1838 bp, Homo sapiens
  source 1..1838: mol_type = genomic DNA
tcccagagtcaacagcgagcgagcagccggagcggggaagcagaagccagagaggggaagaatacggcgccccctctctccctcccctcccccttctactttagcctttctgcgcacttcgcttccaagtctccgcgcagccaggagccgctgttgcctcccagcccctgctagctgccccccgagccgagcgcagcgagcgccgccgcccgggccccccggtggggccagggccagcatggagcacctgggtccgcaccacctccacccgggtcacgcagagcccattagcttcggcatcgaccagatcctcaacagcccggaccagggtggctgcatgggacccgcctcgcgcctccaggacggagaatacggccttggctgcttggtcggaggcgcctacacttacggcggcgggggctccgcggccgcgacgggggctggaggagcgggggcctatggtactggaggtcccggcggccccggaggcccggcaggcggcggcggcgcctgcagcatgggtcctctgaccggctcctacaacgtgaacatggccttggcaggcggccccggtcctggcggcggcggcggcagcagcggcggtgccggggcactcagcgctgcgggggtaatccgggtgccggcacacaggccgctcgccggagccgtggcccacccccagcccctggccaccggcttgcccaccgtgccctctgtgcctgccatgccgggcgtcaacaacctcactggcctcaccttcccctggatggagagtaaccgcagatacacaaaggacaggttcacaggtcacccctatcagaaccggacgccccccaagaagaagaagccgcgcacgtccttcacacgcctgcagatctgcgagctggagaagcgcttccaccgccagaagtacctggcctcggccgagcgcgccgccctggccaaggcgctcaaaatgaccgatgcgcaggtcaaaacctggttccagaaccggcggacaaagtggaggtaacggcttgttcccggtgcagacggcagactgcggaggaacgggaggccgagaggcagcaagcgaaccgcatcctcctgcagttgcagcaggaggccttccagaagagcctggcacagccgctgcccgctgaccctctgtgcgtgcacaactcgtcgctcttcgccctgcagaatctgcagccgtggtctgacgactcgaccaaaatcactagcgtcacgtcggtggcgtcggcctgcgagtgagcctgcccattctgccctgtgggaccccaggcccactcaggggtcactgaggcctgagacccaggactcctccccaccctcctggcctcagactgcacccaggaggggaacactgccctcgcacggccccgaagggcccccacatttgtgccgacactgttctcccttcggtggaagagctcaagggacaaggacacgcgcccccctcccagaggcgtcccgcacctgtctgaactgttaagaaatctgtttttgtttatttcattttattttaatttttaacgtgggattcagagaaaggcaagggaggtaagggaggaggagcttctggggtccccagggctgtcatctgaatttgccctgggaaaccccttctctgtgacccacttctcatcacacacatggaaacccataggcccacacacaggtggtgtcactgtccctcctggtgtcaccccagagccacacatgggcatctatgggagagtgtcaaccagacagagggtcacagtgtttacactttggaccttacgatcaggcacaggtcaggggtgacacagactcatcctgaacagcatggcact

SEQ ID NO: 4078 - DNA, 1395 bp, Homo sapiens
  source 1..1395: mol_type = genomic DNA
gtcctcccgccccgccgcttggtggcggccgcatgctgcccggatataaagggtcggccccacatcccagggaccagcgagcggccttgagaggctctggctcttgcttcttaggcggcccgaggacgccatggccgagtgcccgacactcggggaggcagtcaccgaccacccggaccgcctgtgggcctgggagaagttcgtgtatttggacgagaagcagcacgcctggctgcccttaaccatcgagataaaggataggttacagttacgggtgctcttgcgtcgggaagacgtcgtcctggggaggcctatgacccccacccagataggcccaagcctgctgcctatcatgtggcagctctaccctgatggacgataccgatcctcagactccagtttctggcgcttagtgtaccacatcaagattgacggcgtggaggacatgcttctcgagctgctgccagatgactgatgtatggtcttggcagcacctgtctcctttcaccccagggcctgagcctggccagcctacaatggggatgttgtgtttctgttcaccttcgtttactatgcctgtgtcttctccaccacgctggggtctgggaggaatggacagacagaggatgagctctacccagggcctgcaggacctgcctgtagcccactctgctcgccttagcactaccactcctgccaaggaggattccatttggcagagcttcttccaggtgcccagctatacctgtgcctcggcttttctcagctggatgatggtcttcagcctctttctgtcccttctgtccctcacagcactagtatttcatgttgcacacccactcagctccgtgaacttgtgagaacacagccgattcacctgagcaggacctctgaaaccctggaccagtggtctcacatggtgctacgcctgcatgtaaacacgcctgcaaacgctgcctgccggtaaacacgcctgcaaacgctgcctgcccgtaaacacgcctgcaaacgctgcctgcccacacaggttcacgtgcagctcaaggaaaggcctgaaaggagcccttatctgtgctcaggactcagaagcctctgggtcagtggtccacatcccgggacgcagcaggaggccaggccggcgagccctgtggatgagccctcagaacccttggcttgcccacgtggaaaagggatagaggttgggtttccccccttttatagatggtcacgcacctgggtgttacaaagttgtatgtggcatgaatactttttgtaatgattgattaaatgcaagatagtttatctaacttcgtgcggaatcagcttctatccttgacttagattctggtggagagaagtgagaataggcagcccccaaataaaaaatattcatgg

SEQ ID NO: 4079 - DNA, 1391 bp, Homo sapiens
  source 1..1391: mol_type = genomic DNA
gtcctcccgccccgccgcttggtggcggccgcatgctgcccggatataaagggtcggccccacatcccagggaccagcgagcggccttgagaggctctggctcttgcttcttaggcggcccgaggacgccatggccgagtgcccgacactcggggaggcagtcaccgaccacccggaccgcctgtgggcctgggagaagttcgtgtatttggacgagaagcagcacgcctggctgcccttaaccatcgagataaaggataggttacagttacgggtgctcttgcgtcgggaagacgtcgtcctggggaggcctatgacccccacccagataggcccaagcctgctgcctatcatgtggcagctctaccctgatggacgataccgatcctcagactccagtttctggcgcttagtgtaccacatcaagattgacggcgtggaggacatgcttctcgagctgctgccagatgactgatgtcttggcagcacctgtctcctttcaccccagggcctgagcctggccagcctacaatggggatgttgtgtttctgttcaccttcgtttactatgcctgtgtcttctccaccacgctggggtctgggaggaatggacagacagaggatgagctctacccagggcctgcaggacctgcctgtagcccactctgctcgccttagcactaccactcctgccaaggaggattccatttggcagagcttcttccaggtgcccagctatacctgtgcctcggcttttctcagctggatgatggtcttcagcctctttctgtcccttctgtccctcacagcactagtatttcatgttgcacacccactcagctccgtgaacttgtgagaacacagccgattcacctgagcaggacctctgaaaccctggaccagtggtctcacatggtgctacgcctgcatgtaaacacgcctgcaaacgctgcctgccggtaaacacgcctgcaaacgctgcctgcccgtaaacacgcctgcaaacgctgcctgcccacacaggttcacgtgcagctcaaggaaaggcctgaaaggagcccttatctgtgctcaggactcagaagcctctgggtcagtggtccacatcccgggacgcagcaggaggccaggccggcgagccctgtggatgagccctcagaacccttggcttgcccacgtggaaaagggatagaggttgggtttccccccttttatagatggtcacgcacctgggtgttacaaagttgtatgtggcatgaatactttttgtaatgattgattaaatgcaagatagtttatctaacttcgtgcggaatcagcttctatccttgacttagattctggtggagagaagtgagaataggcagcccccaaataaaaaatattcatgga

SEQ ID NO: 4080 - DNA, 717 bp, Homo sapiens
  source 1..717: mol_type = genomic DNA
ccagggaccagcgagcggccttgagaggctctggctcttgcttcttaggcggcccgaggacgccatggccgagtgcccgacactcggggaggcagtcaccgaccacccggaccgcctgtgggcctgggagaagttcgtgtatttggacgagaagcagcacgcctggctgcccttaaccatcgagataaaggataggttacagttacgggtgctcttgcgtcgggaagacgtcgtcctggggaggcctatgacccccacccagataggcccaagcctgctgcctatcatgtggcagctctaccctgatggacgataccgatcctcagactccagtttctggcgcttagtgtaccacatcaagattgacggcgtggaggacatgcttctcgagctgctgccagatgactgatgtatggtgagctccactggagcctgacccctcttagtccacagtggctgtatcagaaagaaagaccaccccttctccatgaaggcagtgctaacccctccccgactgctgccatctgagggtccctagggatgggagaggcttcctggaggcactcatgtctcccttaccacttcgggagccaagggctttgtaggcagccccctttatcgcagctgctcatatctataaagtacttcacaagtttcagctggcactttcatttaccattgcttttttttttttttgagatgagtctggctctgtgg

SEQ ID NO: 4081 - DNA, 872 bp, Homo sapiens
  source 1..872: mol_type = genomic DNA
ggctcttgcttcttaggcggcccgaggacgccatggccgagtgcccgacactcggggaggcagtcaccgaccacccggaccgcctgtgggcctgggagaagttcgtgtatttggacgagaagcagcacgcctggctgcccttaaccatcgagataaaggataggttacagttacgggtgctcttgcgtcgggaagacgtcgtcctggggaggcctatgacccccacccagataggcccaagcctgctgcctatcatgtggcagctctaccctgatggacgataccgatcctcagactccagtttctggcgcttagtgtaccacatcaagattgacggcgtggaggacatgcttctcgagctgctgccagatgactgatcactagtatttcatgttgcacacccactcagctccgtgaacttgtgagaacacagccgattcacctgagcaggacctctgaaaccctggaccagtggtctcacatggtgctacgcctgcatgtaaacacgcctgcaaacgctgcctgccggtaaacacgcctgcaaacgctgcctgcccgtaaacacgcctgcaaacgctgcctgcccacacaggttcacgtgcagctcaaggaaaggcctgaaaggagcccttatctgtgctcaggactcagaagcctctgggtcagtggtccacatcccgggacgcagcaggaggccaggccggcgagccctgtggatgagccctcagaacccttggcttgcccacgtggaaaagggatagaggttgggtttccccccttttatagatggtcacgcacctgggtgttacaaagttgtatgtggcatgaatactttttgtaatgattgattaaatgcaagatagtttatctaa

SEQ ID NO: 4082 - DNA, 1846 bp, Homo sapiens
  source 1..1846: mol_type = genomic DNA
agtttcccgcctatgagaggatacccctattgtttctgaaaatgctgaccgggacccacacttccaacaaaaattcctctgcccctacagcagcagcaaaagcagcagcagaagcaacagcaacagataagtgttttgatgaattgcgagatggatagggcttgagtgcccccagccctgctgataccaaatgcctttaagatacagcctttcccatcctaatctacaaaggaaacaggaaaaaggaacttaaaactccctgtgctcagacagaaatgagactgttacagcctgcttctgtgctgttccttcttgcctctaacttgtaaacaagacgtagtaggacgatgctaatggaaagtcacaaaccgctgggtttttgaaaggatccttgggacctcatgcacatttgtggaaactggatggagagatttggggaagcatggactctttagccagcttagttctctgtggagtcagcttgctcctttctggaactgtggaaggtgccatggacttgatcttgatcaattccctacctcttgtatctgatgctgaaacatctctcacctgcattgcctctgggtggcgcccccatgagcccatcaccataggaagggactttgaagccttaatgaaccagcaccaggatccgctggaagttactcaagatgtgaccagagaatgggctaaaaaagttgtttggaagagagaaaaggctagtaagatcaatggtgcttatttctgtgaagggcgagttcgaggagaggcaatcaggatacgaaccatgaagatgcgtcaacaagcttccttcctaccagctactttaactatgactgtggacaagggagataacgtgaacatatctttcaaaaaggtattgattaaagaagaagatgcagtgatttacaaaaatggttccttcatccattcagtgccccggcatgaagtacctgatattctagaagtacacctgcctcatgctcagccccaggatgctggagtgtactcggccaggtatataggaggaaacctcttcacctcggccttcaccaggctgatagtccggagatgtgaagcccagaagtggggacctgaatgcaaccatctctgtactgcttgtatgaacaatggtgtctgccatgaagatactggagaatgcatttgccctcctgggtttatgggaaggacgtgtgagaaggcttgtgaactgcacacgtttggcagaacttgtaaagaaaggtgcagtggacaagagggatgcaagtcttatgtgttctgtctccctgacccctatgggtgttcctgtgccacaggctggaagggtctgcagtgcaatgaaggcatacagaggatgaccccaaagatagtggatttgccagatcatatagaagtaaacagtggtaaatttaatcccatttgcaaagcttctggctggccgctacctactaatgaagaaatgaccctggtgaagccggatgggacagtgctccatccaaaagactttaaccatacggatcatttctcagtagccatattcaccatccaccggatcctcccccctgactcaggagtttgggtctgcagtgtgaacacagtggctgggatggtggaaaagcccttcaacatttctgttaaagttcttccaaagcccctgaatgccccaaacgtgattgacactggacataactttgctgtcatcaacatcagctctgagccttactttggggatggaccaatcaaatccaagaagcttctatacaaacccgttaatcactatgaggcttggcaacatattcaagtatccatggagaaacagaggctgactaaagcaaatagtgacata

SEQ ID NO: 4083 - DNA, 4760 bp, Homo sapiens
  source 1..4760: mol_type = genomic DNA
agtttcccgcctatgagaggatacccctattgtttctgaaaatgctgaccgggacccacacttccaacaaaaattcctctgcccctacagcagcagcaaaagcagcagcagaagcaacagcaacagataagtgttttgatgaattgcgagatggatagggcttgagtgcccccagccctgctgataccaaatgcctttaagatacagcctttcccatcctaatctacaaaggaaacaggaaaaaggaacttaaaactccctgtgctcagacagaaatgagactgttacagcctgcttctgtgctgttccttcttgcctctaacttgtaaacaagacgtagtaggacgatgctaatggaaagtcacaaaccgctgggtttttgaaaggatccttgggacctcatgcacatttgtggaaactggatggagagatttggggaagcatggactctttagccagcttagttctctgtggagtcagcttgctcctttctggaactgtggaaggtgccatggacttgatcttgatcaattccctacctcttgtatctgatgctgaaacatctctcacctgcattgcctctgggtggcgcccccatgagcccatcaccataggaagggactttgaagccttaatgaaccagcaccaggatccgctggaagttactcaagatgtgaccagagaatgggctaaaaaagttgtttggaagagagaaaaggctagtaagatcaatggtgcttatttctgtgaagggcgagttcgaggagaggcaatcaggatacgaaccatgaagatgcgtcaacaagcttccttcctaccagctactttaactatgactgtggacaagggagataacgtgaacatatctttcaaaaaggtattgattaaagaagaagatgcagtgatttacaaaaatggttccttcatccattcagtgccccggcatgaagtacctgatattctagaagtacacctgcctcatgctcagccccaggatgctggagtgtactcggccaggtatataggaggaaacctcttcacctcggccttcaccaggctgatagtccggagatgtgaagcccagaagtggggacctgaatgcaaccatctctgtactgcttgtatgaacaatggtgtctgccatgaagatactggagaatgcatttgccctcctgggtttatgggaaggacgtgtgagaaggcttgtgaactgcacacgtttggcagaacttgtaaagaaaggtgcagtggacaagagggatgcaagtcttatgtgttctgtctccctgacccctatgggtgttcctgtgccacaggctggaagggtctgcagtgcaatgaagcatgccaccctggtttttacgggccagattgtaagcttaggtgcagctgcaacaatggggagatgtgtgatcgcttccaaggatgtctctgctctccaggatggcaggggctccagtgtgagagagaaggcatacagaggatgaccccaaagatagtggatttgccagatcatatagaagtaaacagtggtaaatttaatcccatttgcaaagcttctggctggccgctacctactaatgaagaaatgaccctggtgaagccggatgggacagtgctccatccaaaagactttaaccatacggatcatttctcagtagccatattcaccatccaccggatcctcccccctgactcaggagtttgggtctgcagtgtgaacacagtggctgggatggtggaaaagcccttcaacatttctgttaaagttcttccaaagcccctgaatgccccaaacgtgattgacactggacataactttgctgtcatcaacatcagctctgagccttactttggggatggaccaatcaaatccaagaagcttctatacaaacccgttaatcactatgaggcttggcaacatattcaagtgacaaatgagattgttacactcaactatttggaacctcggacagaatatgaactctgtgtgcaactggtccgtcgtggagagggtggggaagggcatcctggacctgtgagacgcttcacaacagcttctatcggactccctcctccaagaggtctaaatctcctgcctaaaagtcagaccactctaaatttgacctggcaaccaatatttccaagctcggaagatgacttttatgttgaagtggagagaaggtctgtgcaaaaaagtgatcagcagaatattaaagttccaggcaacttgacttcggtgctacttaacaacttacatcccagggagcagtacgtggtccgagctagagtcaacaccaaggcccagggggaatggagtgaagatctcactgcttggacccttagtgacattcttcctcctcaaccagaaaacatcaagatttccaacattacacactcctcagctgtgatttcttggacaatattggatggctattctatttcttctattactatccgttacaaggttcaaggcaagaatgaagaccagcacgttgatgtgaagataaagaatgccaccatcactcagtatcagctcaagggcctagagcctgaaacagcataccaggtggacatttttgcagagaacaacatagggtcaagcaacccagccttttctcatgaactggtgaccctcccagaatctcaagcaccagcggacctcggaggggggaagatgctgcttatagccatccttggctctgctggaatgacctgcctgactgtgctgttggcctttctgatcatattgcaattgaagagggcaaatgtgcaaaggagaatggcccaagccttccaaaacgtgagggaagaaccagctgtgcagttcaactcagggactctggccctaaacaggaaggtcaaaaacaacccagatcctacaatttatccagtgcttgactggaatgacatcaaatttcaagatgtgattggggagggcaattttggccaagttcttaaggcgcgcatcaagaaggatgggttacggatggatgctgccatcaaaagaatgaaagaatatgcctccaaagatgatcacagggactttgcaggagaactggaagttctttgtaaacttggacaccatccaaacatcatcaatctcttaggagcatgtgaacatcgaggctacttgtacctggccattgagtacgcgccccatggaaaccttctggacttccttcgcaagagccgtgtgctggagacggacccagcatttgccattgccaatagcaccgcgtccacactgtcctcccagcagctccttcacttcgctgccgacgtggcccggggcatggactacttgagccaaaaacagtttatccacagggatctggctgccagaaacattttagttggtgaaaactatgtggcaaaaatagcagattttggattgtcccgaggtcaagaggtgtatgtgaaaaagacaatgggaaggctcccagtgcgctggatggccatcgagtcactgaattacagtgtgtacacaaccaacagtgatgtatggtcctatggtgtgttactatgggagattgttagcttaggaggcacaccctactgcgggatgacttgtgcagaactctacgagaagctgccccagggctacagactggagaagcccctgaactgtgatgatgaggtgtatgatctaatgagacaatgctggcgggagaagccttatgagaggccatcatttgcccagatattggtgtccttaaacagaatgttagaggagcgaaagacctacgtgaataccacgctttatgagaagtttacttatgcaggaattgactgttctgctgaagaagcggcctaggacagaacatctgtataccctctgtttccctttcactggcatgggagacccttgacacctgctgagaaaacatgcctctgccaaaggatgtgatatataagtgtacatatgtgctgtacacctgggaccttcaccactgtagatcccatgcatggatctatgtagtatgctctgactctaataggactgtatatactgttttaagaatgggctgaaatcagaatgcctgtttgtggtttcatatgcaataatatatttttttaaaaatgtggacttcataggaaggcgtgagtacaattagtataatgcataactcattgttgtcctagatattttgatatttacctttatgttgaatgctattaaatgttttcctgtgtcaaagtaaaatattgttaataaacctaacaatgaccctgatagtacaggttaagtgagagaactatatgaattctaacaagtcataggttaatatttaagacactgaaaaatctaagtgatataaatcagattcttctctctcaattttatccctcacctgtagcagccagtcccgtttcatttagtcatgtgaccactctgtcttgtgtttccacagcctgcaagtcagtccaggatgctaacatctaaaaatagacttaaatctcattgcttacaagcctaagaatctttagagaagtatacataagtttaggataaaataatgggattttcttttcttttctctggtaatattgacttgtatattttaagaaataacagaaagcctgggtgacatttgggagacatgtgacatttatatattgaattaatatccctacatgtattgcacattgtaaaaagttttagttttgatgagttgtgagtttaccttgtatactgtaggcacactttgcactgatatatcatgagtgaataaatgtcttgcctactcacgtctcat

SEQ ID NO: 4084 - DNA, 3935 bp, Homo sapiens
  source 1..3935: mol_type = genomic DNA
agacagaaatgagactgttacagcctgcttctgtgctgttccttcttgcctctaacttgtaaacaagacgtagtaggacgatgctaatggaaagtcacaaaccgctgggtttttgaaaggatccttgggacctcatgcacatttgtggaaactggatggagagatttggggaagcatggactctttagccagcttagttctctgtggagtcagcttgctcctttctggaactgtggaaggtgccatggacttgatcttgatcaattccctacctcttgtatctgatgctgaaacatctctcacctgcattgcctctgggtggcgcccccatgagcccatcaccataggaagggactttgaagccttaatgaaccagcaccaggatccgctggaagttactcaagatgtgaccagagaatgggctaaaaaagttgtttggaagagagaaaaggctagtaagatcaatggtgcttatttctgtgaagggcgagttcgaggagaggcaatcaggatacgaaccatgaagatgcgtcaacaagcttccttcctaccagctactttaactatgactgtggacaagggagataacgtgaacatatctttcaaaaaggtattgattaaagaagaagatgcagtgatttacaaaaatggttccttcatccattcagtgccccggcatgaagtacctgatattctagaagtacacctgcctcatgctcagccccaggatgctggagtgtactcggccaggtatataggaggaaacctcttcacctcggccttcaccaggctgatagtccggagatgtgaagcccagaagtggggacctgaatgcaaccatctctgtactgcttgtatgaacaatggtgtctgccatgaagatactggagaatgcatttgccctcctgggtttatgggaaggacgtgtgagaaggcttgtgaactgcacacgtttggcagaacttgtaaagaaaggtgcagtggacaagagggatgcaagtcttatgtgttctgtctccctgacccctatgggtgttcctgtgccacaggctggaagggtctgcagtgcaatgaaggcatacagaggatgaccccaaagatagtggatttgccagatcatatagaagtaaacagtggtaaatttaatcccatttgcaaagcttctggctggccgctacctactaatgaagaaatgaccctggtgaagccggatgggacagtgctccatccaaaagactttaaccatacggatcatttctcagtagccatattcaccatccaccggatcctcccccctgactcaggagtttgggtctgcagtgtgaacacagtggctgggatggtggaaaagcccttcaacatttctgttaaagttcttccaaagcccctgaatgccccaaacgtgattgacactggacataactttgctgtcatcaacatcagctctgagccttactttggggatggaccaatcaaatccaagaagcttctatacaaacccgttaatcactatgaggcttggcaacatattcaagtgacaaatgagattgttacactcaactatttggaacctcggacagaatatgaactctgtgtgcaactggtccgtcgtggagagggtggggaagggcatcctggacctgtgagacgcttcacaacagcttctatcggactccctcctccaagaggtctaaatctcctgcctaaaagtcagaccactctaaatttgacctggcaaccaatatttccaagctcggaagatgacttttatgttgaagtggagagaaggtctgtgcaaaaaagtgatcagcagaatattaaagttccaggcaacttgacttcggtgctacttaacaacttacatcccagggagcagtacgtggtccgagctagagtcaacaccaaggcccagggggaatggagtgaagatctcactgcttggacccttagtgacattcttcctcctcaaccagaaaacatcaagatttccaacattacacactcctcagctgtgatttcttggacaatattggatggctattctatttcttctattactatccgttacaaggttcaaggcaagaatgaagaccagcacgttgatgtgaagataaagaatgccaccatcactcagtatcagctcaagggcctagagcctgaaacagcataccaggtggacatttttgcagagaacaacatagggtcaagcaacccagccttttctcatgaactggtgaccctcccagaatctcaagcaccagcggacctcggaggggggaagatgctgcttatagccatccttggctctgctggaatgacctgcctgactgtgctgttggcctttctgatcatattgcaattgaagagggcaaatgtgcaaaggagaatggcccaagccttccaaaacgtgagggaagaaccagctgtgcagttcaactcagggactctggccctaaacaggaaggtcaaaaacaacccagatcctacaatttatccagtgcttgactggaatgacatcaaatttcaagatgtgattggggagggcaattttggccaagttcttaaggcgcgcatcaagaaggatgggttacggatggatgctgccatcaaaagaatgaaagaatatgcctccaaagatgatcacagggactttgcaggagaactggaagttctttgtaaacttggacaccatccaaacatcatcaatctcttaggagcatgtgaacatcgaggctacttgtacctggccattgagtacgcgccccatggaaaccttctggacttccttcgcaagagccgtgtgctggagacggacccagcatttgccattgccaatagcaccgcgtccacactgtcctcccagcagctccttcacttcgctgccgacgtggcccggggcatggactacttgagccaaaaacagtttatccacagggatctggctgccagaaacattttagttggtgaaaactatgtggcaaaaatagcagattttggattgtcccgaggtcaagaggtgtatgtgaaaaagacaatgggaaggctcccagtgcgctggatggccatcgagtcactgaattacagtgtgtacacaaccaacagtgatgtatggtcctatggtgtgttactatgggagattgttagcttaggaggcacaccctactgcgggatgacttgtgcagaactctacgagaagctgccccagggctacagactggagaagcccctgaactgtgatgatgaggtgtatgatctaatgagacaatgctggcgggagaagccttatgagaggccatcatttgcccagatattggtgtccttaaacagaatgttagaggagcgaaagacctacgtgaataccacgctttatgagaagtttacttatgcaggaattgactgttctgctgaagaagcggcctaggacagaacatctgtataccctctgtttccctttcactggcatgggagacccttgacacctgctgagaaaacatgcctctgccaaaggatgtgatatataagtgtacatatgtgctgtacacctgggaccttcaccactgtagatcccatgcatggatctatgtagtatgctctgactctaataggactgtatatactgttttaagaatgggctgaaatcagaatgcctgtttgtggtttcatatgcaataatatatttttttaaaaatgtggacttcataggaaggcgtgagtacaattagtataatgcataactcattgttgtcctagatattttgatatttacctttatgttgaatgctattaaatgttttcctgtgtcaaagtaaaatattgttaataaacctaacaatgaccctgatagtacaggttaagtgagagaactatatgaattctaacaagtcataggttaatatttaagacactgaaaaatctaagtgatataaatcagattc

SEQ ID NO: 4085 - DNA, 4333 bp, Homo sapiens
  source 1..4333: mol_type = genomic DNA
gcagcagcaaaagcagcagcagaagcaacagcaacagataagtgttttgatgaattgcgagatggatagggcttgagtgcccccagccctgctgataccaaatgcctttaagatacagcctttcccatcctaatctacaaaggaaacaggaaaaaggaacttaaaactccctgtgctcagacagaaatgagactgttacagcctgcttctgtgctgttccttcttgcctctaacttgtaaacaagacgtagtaggacgatgctaatggaaagtcacaaaccgctgggtttttgaaaggatccttgggacctcatgcacatttgtggaaactggatggagagatttggggaagcatggactctttagccagcttagttctctgtggagtcagcttgctcctttctggaactgtggaaggtgccatggacttgatcttgatcaattccctacctcttgtatctgatgctgaaacatctctcacctgcattgcctctgggtggcgcccccatgagcccatcaccataggaagggactttgaagccttaatgaaccagcaccaggatccgctggaagttactcaagatgtgaccagagaatgggctaaaaaagttgtttggaagagagaaaaggctagtaagatcaatggtgcttatttctgtgaagggcgagttcgaggagaggcaatcaggatacgaaccatgaagatgcgtcaacaagcttccttcctaccagctactttaactatgactgtggacaagggagataacgtgaacatatctttcaaaaaggtattgattaaagaagaagatgcagtgatttacaaaaatggttccttcatccattcagtgccccggcatgaagtacctgatattctagaagtacacctgcctcatgctcagccccaggatgctggagtgtactcggccaggtatataggaggaaacctcttcacctcggccttcaccaggctgatagtccggagatgtgaagcccagaagtggggacctgaatgcaaccatctctgtactgcttgtatgaacaatggtgtctgccatgaagatactggagaatgcatttgccctcctgggtttatgggaaggacgtgtgagaaggcttgtgaactgcacacgtttggcagaacttgtaaagaaaggtgcagtggacaagagggatgcaagtcttatgtgttctgtctccctgacccctatgggtgttcctgtgccacaggctggaagggtctgcagtgcaatgaagcatgccaccctggtttttacgggccagattgtaagcttaggtgcagctgcaacaatggggagatgtgtgatcgcttccaaggatgtctctgctctccaggatggcaggggctccagtgtgagagagaaggcatacagaggatgaccccaaagatagtggatttgccagatcatatagaagtaaacagtggtaaatttaatcccatttgcaaagcttctggctggccgctacctactaatgaagaaatgaccctggtgaagccggatgggacagtgctccatccaaaagactttaaccatacggatcatttctcagtagccatattcaccatccaccggatcctcccccctgactcaggagtttgggtctgcagtgtgaacacagtggctgggatggtggaaaagcccttcaacatttctgttaaagttcttccaaagcccctgaatgccccaaacgtgattgacactggacataactttgctgtcatcaacatcagctctgagccttactttggggatggaccaatcaaatccaagaagcttctatacaaacccgttaatcactatgaggcttggcaacatattcaagtgacaaatgagattgttacactcaactatttggaacctcggacagaatatgaactctgtgtgcaactggtccgtcgtggagagggtggggaagggcatcctggacctgtgagacgcttcacaacagcttctatcggactccctcctccaagaggtctaaatctcctgcctaaaagtcagaccactctaaatttgacctggcaaccaatatttccaagctcggaagatgacttttatgttgaagtggagagaaggtctgtgcaaaaaagtgatcagcagaatattaaagttccaggcaacttgacttcggtgctacttaacaacttacatcccagggagcagtacgtggtccgagctagagtcaacaccaaggcccagggggaatggagtgaagatctcactgcttggacccttagtgacattcttcctcctcaaccagaaaacatcaagatttccaacattacacactcctcagctgtgatttcttggacaatattggatggctattctatttcttctattactatccgttacaaggttcaaggcaagaatgaagaccagcacgttgatgtgaagataaagaatgccaccatcactcagtatcagctcaagggcctagagcctgaaacagcataccaggtggacatttttgcagagaacaacatagggtcaagcaacccagccttttctcatgaactggtgaccctcccagaatctcaagcaccagcggacctcggaggggggaagatgctgcttatagccatccttggctctgctggaatgacctgcctgactgtgctgttggcctttctgatcatattgcaattgaagagggcaaatgtgcaaaggagaatggcccaagccttccaaaacgtgagggaagaaccagctgtgcagttcaactcagggactctggccctaaacaggaaggtcaaaaacaacccagatcctacaatttatccagtgcttgactggaatgacatcaaatttcaagatgtgattggggagggcaattttggccaagttcttaaggcgcgcatcaagaaggatgggttacggatggatgctgccatcaaaagaatgaaagaatatgcctccaaagatgatcacagggactttgcaggagaactggaagttctttgtaaacttggacaccatccaaacatcatcaatctcttaggagcatgtgaacatcgaggctacttgtacctggccattgagtacgcgccccatggaaaccttctggacttccttcgcaagagccgtgtgctggagacggacccagcatttgccattgccaatagcaccgcgtccacactgtcctcccagcagctccttcacttcgctgccgacgtggcccggggcatggactacttgagccaaaaacagtttatccacagggatctggctgccagaaacattttagttggtgaaaactatgtggcaaaaatagcagattttggattgtcccgaggtcaagaggtgtatgtgaaaaagacaatgggaaggctcccagtgcgctggatggccatcgagtcactgaattacagtgtgtacacaaccaacagtgatgtatggtcctatggtgtgttactatgggagattgttagcttaggaggcacaccctactgcgggatgacttgtgcagaactctacgagaagctgccccagggctacagactggagaagcccctgaactgtgatgatgaggtgtatgatctaatgagacaatgctggcgggagaagccttatgagaggccatcatttgcccagatattggtgtccttaaacagaatgttagaggagcgaaagacctacgtgaataccacgctttatgagaagtttacttatgcaggaattgactgttctgctgaagaagcggcctaggacagaacatctgtataccctctgtttccctttcactggcatgggagacccttgacacctgctgagaaaacatgcctctgccaaaggatgtgatatataagtgtacatataactatatgaattctaacaagtcataggttaatatttaagacactgaaaaatctaagtgatataaatcagattcttctctctcaattttatccctcacctgtagcagccagtcccgtttcatttagtcatgtgaccactctgtcttgtgtttccacagcctgcaagtcagtccaggatgctaacatctaaaaatagacttaaatctcattgcttacaagcctaagaatctttagagaagtatacataagtttaggataaaataatgggattttcttttcttttctctggtaatattgacttgtatattttaagaaataacagaaagcctgggtgacatttgggagacatgtgacatttatatattgaattaatatccctacatgtattgcacattgtaaaaagttttagttttgatgagttgtgagtttaccttgtatactgtaggcacactttgcactgatatatcatgagtgaataaatgtcttgcctactca

SEQ ID NO: 4086 - DNA, 3836 bp, Homo sapiens
  source 1..3836: mol_type = genomic DNA
ttattctcagtttcccgcctatgagaggatacccctattgtttctgaaaatgctgaccgggacccacacttccaacaaaaattcctctgcccctacagcagcagcaaaagcagcagcagaagcaacagcaacagataagtgttttgatgaattgcgagatggatagggcttgagtgcccccagccctgctgataccaaatgcctttaagatacagcctttcccatcctaatctacaaaggaaacaggaaaaaggaacttaaaactccctgtgctcagacagaaatgagactgttacagcctgcttctgtgctgttccttcttgcctctaacttgtaaacaagacgtagtaggacgatgctaatggaaagtcacaaaccgctgggtttttgaaaggatccttgggacctcatgcacatttgtggaaactggatggagagatttggggaagcatggactctttagccagcttagttctctgtggagtcagcttgctcctttctgcttccttcctaccagctactttaactatgactgtggacaagggagataacgtgaacatatctttcaaaaaggtattgattaaagaagaagatgcagtgatttacaaaaatggttccttcatccattcagtgccccggcatgaagtacctgatattctagaagtacacctgcctcatgctcagccccaggatgctggagtgtactcggccaggtatataggaggaaacctcttcacctcggccttcaccaggctgatagtccggagatgtgaagcccagaagtggggacctgaatgcaaccatctctgtactgcttgtatgaacaatggtgtctgccatgaagatactggagaatgcatttgccctcctgggtttatgggaaggacgtgtgagaaggcttgtgaactgcacacgtttggcagaacttgtaaagaaaggtgcagtggacaagagggatgcaagtcttatgtgttctgtctccctgacccctatgggtgttcctgtgccacaggctggaagggtctgcagtgcaatgaaggcatacagaggatgaccccaaagatagtggatttgccagatcatatagaagtaaacagtggtaaatttaatcccatttgcaaagcttctggctggccgctacctactaatgaagaaatgaccctggtgaagccggatgggacagtgctccatccaaaagactttaaccatacggatcatttctcagtagccatattcaccatccaccggatcctcccccctgactcaggagtttgggtctgcagtgtgaacacagtggctgggatggtggaaaagcccttcaacatttctgttaaagttcttccaaagcccctgaatgccccaaacgtgattgacactggacataactttgctgtcatcaacatcagctctgagccttactttggggatggaccaatcaaatccaagaagcttctatacaaacccgttaatcactatgaggcttggcaacatattcaagtgacaaatgagattgttacactcaactatttggaacctcggacagaatatgaactctgtgtgcaactggtccgtcgtggagagggtggggaagggcatcctggacctgtgagacgcttcacaacagcttctatcggactccctcctccaagaggtctaaatctcctgcctaaaagtcagaccactctaaatttgacctggcaaccaatatttccaagctcggaagatgacttttatgttgaagtggagagaaggtctgtgcaaaaaagtgatcagcagaatattaaagttccaggcaacttgacttcggtgctacttaacaacttacatcccagggagcagtacgtggtccgagctagagtcaacaccaaggcccagggggaatggagtgaagatctcactgcttggacccttagtgacattcttcctcctcaaccagaaaacatcaagatttccaacattacacactcctcagctgtgatttcttggacaatattggatggctattctatttcttctattactatccgttacaaggttcaaggcaagaatgaagaccagcacgttgatgtgaagataaagaatgccaccatcactcagtatcagctcaagggcctagagcctgaaacagcataccaggtggacatttttgcagagaacaacatagggtcaagcaacccagccttttctcatgaactggtgaccctcccagaatctcaagcaccagcggacctcggaggggggaagatgctgcttatagccatccttggctctgctggaatgacctgcctgactgtgctgttggcctttctgatcatattgcaattgaagagggcaaatgtgcaaaggagaatggcccaagccttccaaaacagggaagaaccagctgtgcagttcaactcagggactctggccctaaacaggaaggtcaaaaacaacccagatcctacaatttatccagtgcttgactggaatgacatcaaatttcaagatgtgattggggagggcaattttggccaagttcttaaggcgcgcatcaagaaggatgggttacggatggatgctgccatcaaaagaatgaaagaatatgcctccaaagatgatcacagggactttgcaggagaactggaagttctttgtaaacttggacaccatccaaacatcatcaatctcttaggagcatgtgaacatcgaggctacttgtacctggccattgagtacgcgccccatggaaaccttctggacttccttcgcaagagccgtgtgctggagacggacccagcatttgccattgccaatagcaccgcgtccacactgtcctcccagcagctccttcacttcgctgccgacgtggcccggggcatggactacttgagccaaaaacagtttatccacagggatctggctgccagaaacattttagttggtgaaaactatgtggcaaaaatagcagattttggattgtcccgaggtcaagaggtgtatgtgaaaaagacaatgggaaggctcccagtgcgctggatggccatcgagtcactgaattacagtgtgtacacaaccaacagtgatgtatggtcctatggtgtgttactatgggagattgttagcttaggaggcacaccctactgcgggatgacttgtgcagaactctacgagaagctgccccagggctacagactggagaagcccctgaactgtgatgatgaggtgtatgatctaatgagacaatgctggcgggagaagccttatgagaggccatcatttgcccagatattggtgtccttaaacagaatgttagaggagcgaaagacctacgtgaataccacgctttatgagaagtttacttatgcaggaattgactgttctgctgaagaagcggcctaggacagaacatctgtataccctctgtttccctttcactggcatgggagacccttgacacctgctgagaaaacatgcctctgccaaaggatgtgatatataagtgtacatatgtgctgtacacctgggaccttcaccactgtagatcccatgcatggatctatgtagtatgctctgactctaataggactgtatatactgttttaagaatgggctgaaatcagaatgcctgtttgtggtttcatatgcaataatatatttttttaaaaatgtggacttcataggaaggcgtgagtacaattagtataatgcataactcattgttgtcctagatattttgatatttacctttatgttgaatgctattaaatgttttcctgtgtcaaagtaaaatattgttaataaacctaacaatgaccctgatagtacaggttaagtgagagaactatatgaattct

SEQ ID NO: 4087 - DNA, 10695 bp, Homo sapiens
  source 1..10695: mol_type = genomic DNA
ggaatcggacgccccaggcatatacaagctgagtttcagccatggaaaaactccatgggcatgtgtctgcccatccagacatcctctccttggagaaccggtgcctggctatgctccctgacttacagcccttggagaaactacatcagcatgtatctacccactcagatatcctctccttgaagaaccagtgcctagccacgcttcctgacctgaagaccatggaaaaaccacatggatatgtgtctgcccacccagacatcctctccttggagaaccagtgcctggccacactttctgacctgaagaccatggagaaaccacatggacatgtttctgcccacccagacatcctctccttggagaaccggtgcctggccaccctctctagtctaaagagcactgtgtctgccagccccttgttccagagtctacagatatctcacatgacgcaagctgatttgtaccgtgtgaacaacagcaattgcctgctctctgagcctccaagttggagggctcagcatttctctaagggactagacctttcaacctgccctatagccctgaaatccatctctgccacagagacagctcaggaagcaactttgggtcgttggtttgattcagaagagaagaaaggggcagagacccaaatgccttcttatagtctgagcttgggagaggaggaggaggtggaggatctggccgtgaagctcacctctggagactctgaatctcatccagagcctactgaccatgtccttcaggaaaagaagatggctctactgagcttgctgtgctctactctggtctcagaagtaaacatgaacaatacatctgaccccaccctggctgccatttttgaaatctgtcgtgaacttgccctcctggagcctgagtttatcctcaaggcatctttgtatgccaggcagcagctgaacgtccggaatgtggccaataacatcttggccattgctgctttcttgccggcgtgtcgcccccacctgcgacgatatttctgtgccattgtccagctgccttctgactggatccaggtggctgagctttaccagagcctggctgagggagataagaataagctggtgcccctgcccgcctgtctccgtactgccatgacggacaaatttgcccagtttgacgagtaccagctggctaagtacaaccctcggaagcaccgggccaagagacacccccgccggccaccccgctctccagggatggagcctccattttctcacagatgttttccaaggtacatagggtttctcagagaagagcagagaaagtttgagaaggccggtgatacagtgtcagagaaaaagaatcctccaaggttcaccctgaagaagctggttcagcgactgcacatccacaagcctgcccagcacgttcaagccctgctgggttacagatacccctccaacctacagctcttttctcgaagtcgccttcctgggccttgggattctagcagagctgggaagaggatgaagctgtctaggccagagacctgggagcgggagctgagcctacgggggaacaaagcgtcggtctgggaggaactcattgaaaatgggaagcttcccttcatggccatgcttcggaacctgtgcaacctgctgcgggttggaatcagttcccgccaccatgagctcattctccagagactccagcatgcgaagtcggtgatccacagtcggcagtttccattcagatttcttaacgcccatgatgccattgatgccctcgaggctcaactcagaaatcaagcattgccctttccttcgaatataacactgatgaggcggatactaactagaaatgaaaagaaccgtcccaggcggaggtttctttgccacctaagccgtcagcagcttcggatggcaatgaggatacctgtgttgtatgagcagctcaagagggagaagctgagagtacacaaggccagacagtggaaatatgatggtgagatgctgaacaggtaccgacaggccctagagacagctgtgaacctctctgtgaagcacagcctgcccctgctgccaggccgcactgtcttggtctatctgacagatgctaatgcagacaggctctgtccaaagagcaacccacaagggcccccgctgaactatgcactgctgttgattgggatgatgatcacgagggcggagcaggtggacgtcgtgctgtgtggaggtgacactctgaagactgcagtgcttaaggcagaagaaggcatcctgaagactgccatcaagctccaggctcaagtccaggagtttgatgaaaatgatggatggtccctgaatacttttgggaaatacctgctgtctctggctggccaaagggttcctgtggacagggtcatcctccttggccaaagcatggatgatggaatgataaatgtggccaaacagctttactggcagcgtgtgaattccaagtgcctctttgttggtatcctcctaagaagggtacaatacctgtcaacagatttgaatcccaatgatgtgacactctcaggctgtactgatgcgatactgaagttcattgcagagcatggggcctcccatcttctggaacatgtgggccaaatggacaaaatattcaagattccaccacccccaggaaagacaggggtccagtctctccggccactggaagaggacactccaagccccttggctcctgtttcccagcaaggatggcgcagcatccggcttttcatttcatccactttccgagacatgcatggggagcgggacctgctgctgaggtctgtgctgccagcactgcaggcccgagcggcccctcaccgtatcagccttcacggaatcgacctccgctggggcgtcactgaggaggagacccgtaggaacagacaactggaagtgtgccttggggaggtggagaacgcacagctgtttgtggggattctgggctcccgttatggatacattccccccagctacaaccttcctgaccatccacacttccactgggcccagcagtacccttcagggcgctctgtgacagagatggaggtgatgcagttcctgaaccggaaccaacgtctgcagccctctgcccaagctctcatctacttccgggattccagcttcctcagctctgtgccagatgcctggaaatctgactttgtttctgagtctgaagaggccgcacgtcggatctcagaactgaagagctacctaagcagacagaaagggatcacctgccgcagatacccctgtgagtgggggggtgtggcagctggccggccctatgttggcgggctggaggagtttgggcagttggttctgcaggatgtatggaatatgatccagaagctctacctgcagcctggggccctgctggagcagccagtgtccatcccagacgatgacttggtccaggccaccttccagcagctgcagaagccaccgagtcctgcccggccacgccttcttcaggacacagtgcaacggctgatgctgccccacggaaggctgagcctggtgacggggcagtcaggacagggcaagacagccttcctggcatctcttgtgtcagccctgcaggctcctgatggggccaaggtggcatcattagtcttcttccacttttctggggctcgtcctgaccagggtcttgccctcactctgctcagacgcctctgtacctatctgcgtggccaactaaaagagccaggtgccctccccagcacctaccgaagcctggtgtgggagctgcagcagaggctgctgcccaagtctgctgagtccctgcatcctggccagacccaggtcctgatcatcgatggggctgataggttagtggaccagaatgggcagctgatttcagactggatcccaaagaagcttccccggtgtgtacacctggtgctgagtgtgtctagtgatgcaggcctaggggagacccttgagcagagccagggtgcccacgtgctggccttggggcctctggaggcctctgctcgggcccggctggtgagagaggagctggccctgtacgggaagcggctggaggagtcaccatttaacaaccagatgcgactgctgctggtgaagcgggaatcaggccggccgctctacctgcgcttggtcaccgatcacctgaggctcttcacgctgtatgagcaggtgtctgagagactccggaccctgcctgccactgtccccctgctgctgcagcacatcctgagcacactggagaaggagcacgggcctgatgtccttccccaggccttgactgccctagaagtcacacggagtggtttgactgtggaccagctgcacggagtgctgagtgtgtggcggacactaccgaaggggactaagagctgggaagaagcagtggctgctggtaacagtggagacccctaccccatgggcccgtttgcctgcctcgtccagagtctgcgcagtttgctaggggagggccctctggagcgccctggtgcccggctgtgcctccctgatgggcccctgagaacagcagctaaacgttgctatgggaagaggccagggctagaggacacggcacacatcctcattgcagctcagctctggaagacatgtgacgctgatgcctcaggcaccttccgaagttgccctcctgaggctctgggagacctgccttaccacctgctccagagcgggaaccgtggacttctttcgaagttccttaccaacctccatgtggtggctgcacacttggaattgggtctggtctctcggctcttggaggcccatgccctctatgcttcttcagtccccaaagaggaacaaaagctccccgaggctgacgttgcagtgtttcgcaccttcctgaggcagcaggcttcaatcctcagccagtacccccggctcctgccccagcaggcagccaaccagcccctggactcacctctttgccaccaagcctcgctgctctcccggagatggcacctccaacacacactacgatggcttaataaaccccggaccatgaaaaatcagcaaagctccagcctgtctctggcagtttcctcatcccctactgctgtggccttctccaccaatgggcaaagagcagctgtgggcactgccaatgggacagtttacctgttggacctgagaacttggcaggaggagaagtctgtggtgagtggctgtgatggaatctctgcttgtttgttcctctccgatgatacactctttcttactgccttcgacgggctcctggagctctgggacctgcagcatggttgtcgggtgctgcagactaaggctcaccagtaccaaatcactggctgctgcctgagcccagactgccggctgctagccaccgtgtgcttgggaggatgcctaaagctgtgggacacagtccgtgggcagctggccttccagcacacctaccccaagtccctgaactgtgttgccttccacccagaggggcaggtaatagccacaggcagctgggctggcagcatcagcttcttccaggtggatgggctcaaagtcaccaaggacctgggggcacccggagcctctatccgtaccttggccttcaatgtgcctgggggggttgtggctgtgggccggctggacagtatggtggagctgtgggcctggcgagaaggggcacggctggctgccttccctgcccaccatggctttgttgctgctgcgcttttcctgcatgcgggttgccagttactgacggctggagaggatggcaaggttcaggtgtggtcagggtctctgggtcggccccgtgggcacctgggttccctttctctctctcctgccctctctgtggcactcagcccagatggtgatcgggtggctgttggatatcgagcggatggcattaggatctacaaaatctcttcaggttcccagggggctcagggtcaggcactggatgtggcagtgtccgccctggcctggctaagccccaaggtattggtgagtggtgcagaagatgggtccttgcagggctgggcactcaaggaatgctcccttcagtccctctggctcctgtccagattccagaagcctgtgctaggactggccacttcccaggagctcttggcttctgcctcagaggatttcacagtgcagctgtggccaaggcagctgctgacgcggccacacaaggcagaagactttccctgtggcactgagctgcggggacatgagggccctgtgagctgctgtagtttcagcactgatggaggcagcctggccaccgggggccgggatcggagtctcctctgctgggacgtgaggacacccaaaacccctgttttgatccactccttccctgcctgtcaccgtgactgggtcactggctgtgcctggaccaaagataacctactgatatcctgctccagtgatggctctgtggggctctgggacccagagtcaggacagcggcttggtcagttcctgggtcatcagagtgctgtgagcgctgtggcagctgtggaggagcacgtggtgtctgtgagccgggatgggaccttgaaagtgtgggaccatcaaggcgtggagctgaccagcatccctgctcactcaggacccattagccactgtgcagctgccatggagccccgtgcagctggacagcctgggtcagagcttctggtggtaaccgtcgggctagatggggccacacggttatggcatccactcttggtgtgccaaacccacaccctcctgggacacagcggcccagtccgtgctgctgctgtttcagaaacctcaggcctcatgctgaccgcctctgaggatggttctgtacggctctggcaggttcctaaggaagcagatgacacatgtataccaaggagttctgcagccgtcactgctgtggcttgggcaccagatggttccatggcagtatctggaaatcaagctggggaactaatcttgtggcaggaagctaaggctgtggccacagcacaggctccaggccacattggtgctctgatctggtcctcggcacacaccttttttgtcctcagtgctgatgagaaaatcagcgagtggcaagtgaaactgcggaagggttcggcacccggaaatttgagtcttcacctgaaccgaattctacaggaggacttaggggtgctgacaagtctggattgggctcctgatggtcactttctcatcttggccaaagcagatttgaagttactttgcatgaagccaggggatgctccatctgaaatctggagcagctatacagaaaatcctatgatattgtccacccacaaggagtatggcatatttgtcctgcagcccaaggatcctggagttctttctttcttgaggcaaaaggaatcaggagagtttgaagagaggctgaactttgatataaacttagagaatcctagtaggaccctaatatcgataactcaagccaaacctgaatctgagtcctcatttttgtgtgccagctctgatgggatcctatggaacctggccaaatgcagcccagaaggagaatggaccacaggtaacatgtggcagaaaaaagcaaacactccagaaacccaaactccagggacagacccatctacctgcagggaatctgatgccagcatggatagtgatgccagcatggatagtgagccaacaccacatctaaagacacggcagcgtagaaagattcactcgggctctgtcacagccctccatgtgctacctgagttgctggtgacagcttcgaaggacagagatgttaagctatgggagagacccagtatgcagctgctgggcctgttccgatgcgaagggtcagtgagctgcctggaaccttggctgggcgctaactccaccctgcagcttgccgtgggagacgtgcagggcaatgtgtactttctgaattgggaatgaagatgtgccactcgggaataatgataccccttgtgctagagatgcaaagcctgaagacactggtagcttttaataattataaaattaataatttcttgataattataaaaatgaagtgtcaaaaaatctcaagtgtaggcctgcctgtgttctcatgtggatttagaacaggaggatattctatgtgtatgtatatgtacattctaatgtgtgtctcttcttattcaacattaatccttactagaaccacaagaaagtgaatgaaatctttagtaggtactcttttgaaactaggttttagaattcttgcatcactcgcgggccctaggaccctaggatgccattcttgccaggaggaggaatgagagtgatgttggccaacattcaatttgaacagagcatggaagacctttcagttcatcgggaaagaatgagggagggagaataagtcagtcatgcatcagggcatttagaaagagctatgtttctgtcacagagacagcccttttctcagaactacccagaggaggccgggcatggtggctcacgcttgtaatcccagcactttgggaggccgaggtgggcagatcacgaggtcaggagatcaagaccatcctggctaacatagtgaaaccctgtctctactaaaaaatacaaaaagttagccaggtgtggcggcgggcacctgtagtcccagctacttgggaggctgaggcaggagaatggcgtgaacccaggaggcggagcttgcagtgagccgagacaccactgcactccagcctgggcaacagagcgagactctgtctaaaaaaaaaaaaaaagaactacccagatgagaggtgaggagccaagccattgaaagcggaacaaaccttctggttttcccaacttctgacacgactttcaactttagtcaatatggtaattggcattctcagaagagatcacgaaagtgtcttactctctctcaaattgaaattcacaaagattaaaactaattgagaggtggcacaatcatagccatgaactctgattttcttaagtaaaaaaccttttttttttttttttgtttttgagatagagtctggctctgtcacctaggctggagtgcaatggtgcaatctcagctcagtgcaacctctgcttcctgggttcaagcgattctcctgccttagcctcccgagtagctgggattacaggtgcccaccaccacgcccagctaatttttgtatttcagtagagacgaagtttcaccatgttggccaggtgggtctcaaactcctgacctcaggttatctgcacacctcagcctcttaaagttctgggattacaggcgtgagccattgtgcccggcccataaaagaactttattatatttctaaaattcaatcatatggaagaatctattgagcaggttagcctttgcttaactttcctcctctgttactccagccttagctggggtgttttgtagaattttcagagcatgggagacagacaactagagcttcctcctgcccttggcccatgcttttaggagagcaaaaggcaaaagattgaaaccactgactttagtttcctcaggccctttctttctgagggttaaagaagaaggaaatgtcttctgtggccaagaattcaaggacttgtaggagataagtgaaggctattacagggattttgtcctggtttggtaggtttctcttggagaaataccactacaccctggtctagaaatgagttttgaagacttggggagttaaagggcactgagttttactctcactgtaccctgattccaggttttacatggagaaataacctgagggactttatttctatccaatgccctggtttccatcctgaccagaggatgatgacatccgctgataggccatgcttctgtcttctcttatgtgcctcatgccaagcctcgaaatataccttctggaccatcatttccacatctaccttgtgactagaagtcctagttatggtattttgaaatttatgatccataatccttgccagaaatcctgcagcgaactatggcatggcatcatcctagtcattgatttcaatcttttgccttttgctcccctaaaatcttgggccaattgcaggaggaagctctatttgtctctcttccatgctctgaaaattatataaaagcatcccagctaaggctggagtgaaggggttggggaaagttaagcaaaggctaacttgaccaataggctcaatagattcagtcttgttggccaggcccacttgaagggttttttgtttcatcttggagaaggacagtgaggtcatggtataattgttatgagtaaagtcaagaacagcttctaggtaaaagtaattatgtacccaaaaggagttgaagggaaaatcaatttaggtttacattaaacatccttcaagttcttatctttaaatggagtttcagtgtctcccaaaggctggatgagttttacagttataaccactggattgtgagaccataggacatttgaacaatcttttcttctacccatctagaaaagcatcttttttatataccaaatttttacacatatatccacatctgtttttgaaatctagagcagaggtactcaaagtttggttcatggactagtgccagttcacaaattgttaatgttttataatgagataagtacggaagttgagagtaaccatttagaaactgtgtaggaatttaaaaagtaatatctgacaaatttaataataaaaatggaggcttgta

SEQ ID NO: 4088 - DNA, 10670 bp, Homo sapiens
  source 1..10670: mol_type = genomic DNA
gaatcggacgccccaggcatatacaagctgagtttcagccatggaaaaactccatgggcatgtgtctgcccatccagacatcctctccttggagaaccggtgcctggctatgctccctgacttacagcccttggagaaactacatcagcatgtatctacccactcagatatcctctccttgaagaaccagtgcctagccacgcttcctgacctgaagaccatggaaaaaccacatggatatgtgtctgcccacccagacatcctctccttggagaaccagtgcctggccacactttctgacctgaagaccatggagaaaccacatggacatgtttctgcccacccagacatcctctccttggagaaccggtgcctggccaccctctctagtctaaagagcactgtgtctgccagccccttgttccagagtctacagatatctcacatgacgcaagctgatttgtaccgtgtgaacaacagcaattgcctgctctctgagcctccaagttggagggctcagcatttctctaagggactagacctttcaacctgccctatagccctgaaatccatctctgccacagagacagctcaggaagcaactttgggtcgttggtttgattcagaagagaagaaaggggcagagacccaaatgccttcttatagtctgagcttgggagaggaggaggaggtggaggatctggccgtgaagctcacctctggagactctgaatctcatccagagcctactgaccatgtccttcaggaaaagaagatggctctactgagcttgctgtgctctactctggtctcagaagtaaacatgaacaatacatctgaccccaccctggctgccatttttgaaatctgtcgtgaacttgccctcctggagcctgagtttatcctcaaggcatctttgtatgccaggcagcagctgaacgtccggaatgtggccaataacatcttggccattgctgctttcttgccggcgtgtcgcccccacctgcgacgatatttctgtgccattgtccagctgccttctgactggatccaggtggctgagctttaccagagcctggctgagggagataagaataagctggtgcccctgcccgcctgtctccgtactgccatgacggacaaatttgcccagtttgacgagtaccagctggctaagtacaaccctcggaagcaccgggccaagagacacccccgccggccaccccgctctccagggatggagcctccattttctcacagatgttttccaaggtacatagggtttctcagagaagagcagagaaagtttgagaaggccggtgatacagtgtcagagaaaaagaatcctccaaggttcaccctgaagaagctggttcagcgactgcacatccacaagcctgcccagcacgttcaagccctgctgggttacagatacccctccaacctacagctcttttctcgaagtcgccttcctgggccttgggattctagcagagctgggaagaggatgaagctgtctaggccagagacctgggagcgggagctgagcctacgggggaacaaagcgtcggtctgggaggaactcattgaaaatgggaagcttcccttcatggccatgcttcggaacctgtgcaacctgctgcgggttggaatcagttcccgccaccatgagctcattctccagagactccagcatgcgaagtcggtgatccacagtcggcagtttccattcagatttcttaacgcccatgatgccattgatgccctcgaggctcaactcagaaatcaagcattgccctttccttcgaatataacactgatgaggcggatactaactagaaatgaaaagaaccgtcccaggcggaggtttctttgccacctaagccgtcagcagcttcggatggcaatgaggatacctgtgttgtatgagcagctcaagagggagaagctgagagtacacaaggccagacagtggaaatatgatggtgagatgctgaacaggtaccgacaggccctagagacagctgtgaacctctctgtgaagcacagcctgcccctgctgccaggccgcactgtcttggtctatctgacagatgctaatgcagacaggctctgtccaaagagcaacccacaagggcccccgctgaactatgcactgctgttgattgggatgatgatcacgagggcggagcaggtggacgtcgtgctgtgtggaggtgacactctgaagactgcagtgcttaaggcagaagaaggcatcctgaagactgccatcaagctccaggctcaagtccaggagtttgatgaaaatgatggatggtccctgaatacttttgggaaatacctgctgtctctggctggccaaagggttcctgtggacagggtcatcctccttggccaaagcatggatgatggaatgataaatgtggccaaacagctttactggcagcgtgtgaattccaagtgcctctttgttggtatcctcctaagaagggtacaatacctgtcaacagatttgaatcccaatgatgtgacactctcaggctgtactgatgcgatactgaagttcattgcagagcatggggcctcccatcttctggaacatgtgggccaaatggacaaaatattcaagattccaccacccccaggaaagacaggggtccagtctctccggccactggaagaggacactccaagccccttggctcctgtttcccagcaaggatggcgcagcatccggcttttcatttcatccactttccgagacatgcatggggagcgggacctgctgctgaggtctgtgctgccagcactgcaggcccgagcggcccctcaccgtatcagccttcacggaatcgacctccgctggggcgtcactgaggaggagacccgtaggaacagacaactggaagtgtgccttggggaggtggagaacgcacagctgtttgtggggattctgggctcccgttatggatacattccccccagctacaaccttcctgaccatccacacttccactgggcccagcagtacccttcagggcgctctgtgacagagatggaggtgatgcagttcctgaaccggaaccaacgtctgcagccctctgcccaagctctcatctacttccgggattccagcttcctcagctctgtgccagatgcctggaaatctgactttgtttctgagtctgaagaggccgcacgtcggatctcagaactgaagagctacctaagcagacagaaagggatcacctgccgcagatacccctgtgagtgggggggtgtggcagctggccggccctatgttggcgggctggaggagtttgggcagttggttctgcaggatgtatggaatatgatccagaagctctacctgcagcctggggccctgctggagcagccagtgtccatcccagacgatgacttggtccaggccaccttccagcagctgcagaagccaccgagtcctgcccggccacgccttcttcaggacacagtgcaacggctgatgctgccccacggaaggctgagcctggtgacggggcagtcaggacagggcaagacagccttcctggcatctcttgtgtcagccctgcaggctcctgatggggccaaggtggcatcattagtcttcttccacttttctggggctcgtcctgaccagggtcttgccctcactctgctcagacgcctctgtacctatctgcgtggccaactaaaagagccaggtgccctccccagcacctaccgaagcctggtgtgggagctgcagcagaggctgctgcccaagtctgctgagtccctgcatcctggccagacccaggtcctgatcatcgatggggctgataggttagtggaccagaatgggcagctgatttcagactggatcccaaagaagcttccccggtgtgtacacctggtgctgagtgtgtctagtgatgcaggcctaggggagacccttgagcagagccagggtgcccacgtgctggccttggggcctctggaggcctctgctcgggcccggctggtgagagaggagctggccctgtacgggaagcggctggaggagtcaccatttaacaaccagatgcgactgctgctggtgaagcgggaatcaggccggccgctctacctgcgcttggtcaccgatcacctgaggctcttcacgctgtatgagcaggtgtctgagagactccggaccctgcctgccactgtccccctgctgctgcagcacatcctgagcacactggagaaggagcacgggcctgatgtccttccccaggccttgactgccctagaagtcacacggagtggtttgactgtggaccagctgcacggagtgctgagtgtgtggcggacactaccgaaggggactaagagctgggaagaagcagtggctgctggtaacagtggagacccctaccccatgggcccgtttgcctgcctcgtccagagtctgcgcagtttgctaggggagggccctctggagcgccctggtgcccggctgtgcctccctgatgggcccctgagaacagcagctaaacgttgctatgggaagaggccagggctagaggacacggcacacatcctcattgcagctcagctctggaagacatgtgacgctgatgcctcaggcaccttccgaagttgccctcctgaggctctgggagacctgccttaccacctgctccagagcgggaaccgtggacttctttcgaagttccttaccaacctccatgtggtggctgcacacttggaattgggtctggtctctcggctcttggaggcccatgccctctatgcttcttcagtccccaaagaggaacaaaagctccccgaggctgacgttgcagtgtttcgcaccttcctgaggcagcaggcttcaatcctcagccagtacccccggctcctgccccagcaggcagccaaccagcccctggactcacctctttgccaccaagcctcgctgctctcccggagatggcacctccaacacacactacgatggcttaataaaccccggaccatgaaaaatcagcaaagctccagcctgtctctggcagtttcctcatcccctactgctgtggccttctccaccaatgggcaaagagcagctgtgggcactgccaatgggacagtttacctgttggacctgagaacttggcaggaggagaagtctgtggtgagtggctgtgatggaatctctgcttgtttgttcctctccgatgatacactctttcttactgccttcgacgggctcctggagctctgggacctgcagcatggttgtcgggtgctgcagactaaggctcaccagtaccaaatcactggctgctgcctgagcccagactgccggctgctagccaccgtgtgcttgggaggatgcctaaagctgtgggacacagtccgtgggcagctggccttccagcacacctaccccaagtccctgaactgtgttgccttccacccagaggggcaggtaatagccacaggcagctgggctggcagcatcagcttcttccaggtggatgggctcaaagtcaccaaggacctgggggcacccggagcctctatccgtaccttggccttcaatgtgcctgggggggttgtggctgtgggccggctggacagtatggtggagctgtgggcctggcgagaaggggcacggctggctgccttccctgcccaccatggctttgttgctgctgcgcttttcctgcatgcgggttgccagttactgacggctggagaggatggcaaggttcaggtgtggtcagggtctctgggtcggccccgtgggcacctgggttccctttctctctctcctgccctctctgtggcactcagcccagatggtgatcgggtggctgttggatatcgagcggatggcattaggatctacaaaatctcttcaggttcccagggggctcagggtcaggcactggatgtggcagtgtccgccctggcctggctaagccccaaggtattggtgagtggtgcagaagatgggtccttgcagggctgggcactcaaggaatgctcccttcagtccctctggctcctgtccagattccagaagcctgtgctaggactggccacttcccaggagctcttggcttctgcctcagaggatttcacagtgcagctgtggccaaggcagctgctgacgcggccacacaaggcagaagactttccctgtggcactgagctgcggggacatgagggccctgtgagctgctgtagtttcagcactgatggaggcagcctggccaccgggggccgggatcggagtctcctctgctgggacgtgaggacacccaaaacccctgttttgatccactccttccctgcctgtcaccgtgactgggtcactggctgtgcctggaccaaagataacctactgatatcctgctccagtgatggctctgtggggctctgggacccagagtcaggacagcggcttggtcagttcctgggtcatcagagtgctgtgagcgctgtggcagctgtggaggagcacgtggtgtctgtgagccgggatgggaccttgaaagtgtgggaccatcaaggcgtggagctgaccagcatccctgctcactcaggacccattagccactgtgcagctgccatggagccccgtgcagctggacagcctgggtcagagcttctggtggtaaccgtcgggctagatggggccacacggttatggcatccactcttggtgtgccaaacccacaccctcctgggacacagcggcccagtccgtgctgctgctgtttcagaaacctcaggcctcatgctgaccgcctctgaggatggttctgtacggctctggcaggttcctaaggaagcagatgacacatgtataccaaggagttctgcagccgtcactgctgtggcttgggcaccagatggttccatggcagtatctggaaatcaagctggggaactaatcttgtggcaggaagctaaggctgtggccacagcacaggctccaggccacattggtgctctgatctggtcctcggcacacaccttttttgtcctcagtgctgatgagaaaatcagcgagtggcaagtgaaactgcggaagggttcggcacccggaaatttgagtcttcacctgaaccgaattctacaggaggacttaggggtgctgacaagtctggattgggctcctgatggtcactttctcatcttggccaaagcagatttgaagttactttgcatgaagccaggggatgctccatctgaaatctggagcagctatacagaaaatcctatgatattgtccacccacaaggagtatggcatatttgtcctgcagcccaaggatcctggagttctttctttcttgaggcaaaaggaatcaggagagtttgaagagaggctgaactttgatataaacttagagaatcctagtaggaccctaatatcgataactcaagccaaacctgaatctgctctgatgggatcctatggaacctggccaaatgcagcccagaaggagaatggaccacaggtaacatgtggcagaaaaaagaacactccagaaacccaaactccagggacagacccatctacctgcagggaatctgatgccagcatggatagtgatgccagcatggatagtgagccaacaccacatctaaagacacggcagcgtagaaagattcactcgggctctgtcacagccctccatgtgctacctgagttgctggtgacagcttcgaaggacagagatgttaagctatgggagagacccagtatgcagctgctgggcctgttccgatgcgaagggtcagtgagctgcctggaaccttggctgggcgctaactccaccctgcagcttgccgtgggagacgtgcagggcaatgtgtactttctgaattgggaatgaagatgtgccactcgggaataatgataccccttgtgctagagatgcaaagcctgaagacactggtagcttttaataattataaaattaataatttcttgataattataaaaatgaagtgtcaaaaaatctcaagtgtaggcctgcctgtgttctcatgtggatttagaacaggaggatattctatgtgtatgtatatgtacattctaatgtgtgtctcttcttattcaacattaatccttactagaaccacaagaaagtgaatgaaatctttagtaggtactcttttgaaactaggttttagaattcttgcatcactcgcgggccctaggaccctaggatgccattcttgccaggaggaggaatgagagtgatgttggccaacattcaatttgaacagagcatggaagacctttcagttcatcgggaaagaatgagggagggagaataagtcagtcatgcatcagggcatttagaaagagctatgtttctgtcacagagacagcccttttctcagaactacccagaggaggccgggcatggtggctcacgcttgtaatcccagcactttgggaggccgaggtgggcagatcacgaggtcaggagatcaagaccatcctggctaacatagtgaaaccctgtctctactaaaaaatacaaaaagttagccaggtgtggcggcgggcacctgtagtcccagctacttgggaggctgaggcaggagaatggcgtgaacccaggaggcggagcttgcagtgagccgagacaccactgcactccagcctgggcaacagagcgagactctgtctaaaaaaaaaaaaaaagaactacccagatgagaggtgaggagccaagccattgaaagcggaacaaaccttctggttttcccaacttctgacacgactttcaactttagtcaatatggtaattggcattctcagaagagatcacgaaagtgtcttactctctctcaaattgaaattcacaaagattaaaactaattgagaggtggcacaatcatagccatgaactctgattttcttaagtaaaaaaccttttttttttttttttgtttttgagatagagtctggctctgtcacctaggctggagtgcaatggtgcaatctcagctcagtgcaacctctgcttcctgggttcaagcgattctcctgccttagcctcccgagtagctgggattacaggtgcccaccaccacgcccagctaatttttgtatttcagtagagacgaagtttcaccatgttggccaggtgggtctcaaactcctgacctcaggttatctgcacacctcagcctcttaaagttctgggattacaggcgtgagccattgtgcccggcccataaaagaactttattatatttctaaaattcaatcatatggaagaatctattgagcaggttagcctttgcttaactttcctcctctgttactccagccttagctggggtgttttgtagaattttcagagcatgggagacagacaactagagcttcctcctgcccttggcccatgcttttaggagagcaaaaggcaaaagattgaaaccactgactttagtttcctcaggccctttctttctgagggttaaagaagaaggaaatgtcttctgtggccaagaattcaaggacttgtaggagataagtgaaggctattacagggattttgtcctggtttggtaggtttctcttggagaaataccactacaccctggtctagaaatgagttttgaagacttggggagttaaagggcactgagttttactctcactgtaccctgattccaggttttacatggagaaataacctgagggactttatttctatccaatgccctggtttccatcctgaccagaggatgatgacatccgctgataggccatgcttctgtcttctcttatgtgcctcatgccaagcctcgaaatataccttctggaccatcatttccacatctaccttgtgactagaagtcctagttatggtattttgaaatttatgatccataatccttgccagaaatcctgcagcgaactatggcatggcatcatcctagtcattgatttcaatcttttgccttttgctcccctaaaatcttgggccaattgcaggaggaagctctatttgtctctcttccatgctctgaaaattatataaaagcatcccagctaaggctggagtgaaggggttggggaaagttaagcaaaggctaacttgaccaataggctcaatagattcagtcttgttggccaggcccacttgaagggttttttgtttcatcttggagaaggacagtgaggtcatggtataattgttatgagtaaagtcaagaacagcttctaggtaaaagtaattatgtacccaaaaggagttgaagggaaaatcaatttaggtttacattaaacatccttcaagttcttatctttaaatggagtttcagtgtctcccaaaggctggatgagttttacagttataaccactggattgtgagaccataggacatttgaacaatcttttcttctacccatctagaaaagcatcttttttatataccaaatttttacacatatatccacatctgtttttgaaatctagagcagaggtactcaaagtttggttcatggactagtgccagttcacaaattgttaatgttttataatgagataagtacggaagttgagagtaaccatttagaaactgtgtaggaatttaaaaagtaatatctgacaaatttaataataaaaatggaggcttgta

SEQ ID NO: 4089 - DNA, 2698 bp, Homo sapiens
  source 1..2698: mol_type = genomic DNA
ttccccaggccttgactgccctagaagtcacacggagtggtttgactgtggaccagctgcacggagtgctgagtgtgtggcggacactaccgaaggggactaagagctgggaagaagcagtggctgctggtaacagtggagacccctaccccatgggcccgtttgcctgcctcgtccagagtctgcgcagctcagctctggaagacatgtgacgctgatgcctcaggcaccttccgaagttgccctcctgaggctctgggagacctgccttaccacctgctccagagcgggaaccgtggacttctttcgaagttccttaccaacctccatgtggtggctgcacacttggaattgggtctggtctctcggctcttggaggcccatgccctctatgcttcttcagtccccaaagaggaacaaaagctccccgaggctgacgttgcagtgtttcgcaccttcctgaggcagcaggcttcaatcctcagccagtacccccggctcctgccccagcaggcagccaaccagcccctggactcacctctttgccaccaagcctcgctgctctcccggagatggcacctccaacacacactacgatggcttaataaaccccggaccatgaaaaatcagcaaagctccagcctgtctctggcagtttcctcatcccctactgctgtggccttctccaccaatgggcaaagagcagctgtgggcactgccaatgggacagtttacctgttggacctgagaacttggcaggaggagaagtctgtggtgagtggctgtgatggaatctctgcttgtttgttcctctccgatgatacactctttcttactgccttcgacgggctcctggagctctgggacctgcagcatggttgtcgggtgctgcagactaaggctcaccagtaccaaatcactggctgctgcctgagcccagactgccggctgctagccaccgtgtgcttgggaggatgcctaaagctgtgggacacagtccgtgggcagctggccttccagcacacctaccccaagtccctgaactgtgttgccttccacccagaggggcaggtaatagccacaggcagctgggctggcagcatcagcttcttccaggtggatgggctcaaagtcaccaaggacctgggggcacccggagcctctatccgtaccttggccttcaatgtgcctgggggggttgtggctgtgggccggctggacagtatggtggagctgtgggcctggcgagaaggggcacggctggctgccttccctgcccaccatggctttgttgctgctgcgcttttcctgcatgcgggttgccagttactgacggctggagaggatggcaaggttcaggtgtggtcagggtctctgggtcggccccgtgggcacctgggttccctttctctctctcctgccctctctgtggcactcagcccagatggtgatcgggtggctgttggatatcgagcggatggcattaggatctacaaaatctcttcaggttcccagggggctcagggtcaggcactggatgtggcagtgtccgccctggcctggctaagccccaaggtattggtgagtggtgcagaagatgggtccttgcagggctgggcactcaaggaatgctcccttcagtccctctggctcctgtccagattccagaagcctgtgctaggactggccacttcccaggagctcttggcttctgcctcagaggatttcacagtgcagctgtggccaaggcagctgctgacgcggccacacaaggcagaagactttccctgtggcactgagctgcggggacatgagggccctgtgagctgctgtagtttcagcactgatggaggcagcctggccaccgggggccgggatcggagtctcctctgctgggacgtgaggacacccaaaacccctgttttgatccactccttccctgcctgtcaccgtgactgggtcactggctgtgcctggaccaaagataacctactgatatcctgctccagtgatggctctgtggggctctgggacccagagtcaggacagcggcttggtcagttcctgggtcatcagagtgctgtgagcgctgtggcagctgtggaggagcacgtggtgtctgtgagccgggatgggaccttgaaagtgtgggaccatcaaggcgtggagctgaccagcatccctgctcactcaggacccattagccactgtgcagctgccatggagccccgtgcagctggacagcctgggtcagagcttctggtggtaaccgtcgggctagatggggccacacggttatggcatccactcttggtgtgccaaacccacaccctcctgggacacagcggcccagtccgtgctgctgctgtttcagaaacctcaggcctcatgctgaccgcctctgaggatggttctgtacggctctggcaggttcctaaggaagcagatgacacatgtataccaaggagttctgcagccgtcactgctgtggcttgggcaccagatggttccatggcagtatctggaaatcaagctggggaactaatcttgtggcaggaagctaaggctgtggccacagcacagtcttcacctgaaccgaattctacaggaggacttaggggtgctgacaagtctggattgggctcctgatggtcactttctcatcttggccaaagcagatttgaagttactttgcatg

SEQ ID NO: 4090 - DNA, 581 bp, Homo sapiens
  source 1..581: mol_type = genomic DNA
ctgctgcgggaatcggacgccccaggtcaggcacccagggtttccagccccagtctaaggcatatacaagctgagtttcagccatggaaaaactccatgggcatgtgtctgcccatccagacatcctctccttggagaaccggtgcctggctatgctccctgacttacagcccttggagaaactacatcagcatgtatctacccactcagatatcctctccttgaagaaccagtgcctagccacgcttcctgacctgaagaccatggaaaaaccacatggatatgtgtctgcccacccagacatcctctccttggagaaccagtgcctggccacactttctgacctgaagaccatggagaaaccacatggacatgtttctgcccacccagacatcctctccttggagaaccggtgcctggccaccctctctagtctaaagagcactgtgtctgccagccccttgttccagagtctacagatatctcacatgacgcaagctgatttgtaccgtgtgaacaacagcaattgcctgctctctgagcctccaagttggagggctcagcatttctctaagggacta

SEQ ID NO: 4091 - DNA, 3268 bp, Homo sapiens
  source 1..3268: mol_type = genomic DNA
agtacccaagcgagccatttaacatggcggaggatgtttcctcagcggccccgagcccgcggggctgtgcggatggtagggatgccgaccctactgaggagcagatggcagaaacagagagaaacgacgaggagcagttcgaatgccaggaactgctcgagtgccaggtgcaggtgggggcccccgaggaggaggaggaggaggaggaggacgcgggcctggtggccgaggccgaggccgtggctgccggctggatgctcgatttcctctgcctctctctttgccgagctttccgcgacggccgctccgaggacttccgcaggacccgcaacagcgcagaggctattattcatggactatccagtctaacagcttgccagttgagaacgatatacatatgtcagtttttgacaagaattgcagcaggaaaaacccttgatgcacagtttgaaaatgatgaacgaattacacccttggaatcagccctgatgatttggggttcaattgaaaaggaacatgacaaacttcatgaagaaatacagaatttaattaaaattcaggctatagctgtttgtatggaaaatggcaactttaaagaagcagaagaagtctttgaaagaatatttggtgatccaaattctcatatgcctttcaaaagcaaattgcttatgataatctctcagaaagatacatttcattccttttttcaacacttcagctacaaccacatgatggagaaaattaagagttatgtgaattatgtgctaagtgaaaaatcatcaacctttctaatgaaggcagcggcaaaagtagtagaaagcaaaaggacaagaacaataacttctcaagataaacctagtggtaatgatgttgaaatggaaactgaagctaatttggatacaagaaaaaggtctcacaagaatcttttcttatctaagttgcaacatggaacccagcaacaagaccttaataagaaagaaagaagagtaggaactcctcaaagtacaaaaaagaaaaaagaaagcagaagagccactgaaagcagaatacctgtttcaaagagtcagccggtaactcctgaaaaacatcgagctagaaaaagacaggcatggctttgggaagaagacaagaatttgagatctggcgtgaggaaatatggagagggaaactggtctaaaatactgttgcattataaattcaacaaccggacaagtgtcatgttaaaagacagatggaggaccatgaagaaactaaaactgatttcctcagacagcgaagactgattgtgtttgtaaaagcttgatgaaaggacagttaagtattttgatcactgcattttgtttgaaacttgtgtcattgatgtaatttaaaacttttgtttaaagcattacagtatttttctgtgaccatcaattaatgagggtttgtgctaccagagttaaagcatatgctatcattgtattctttaagaaccttattttgataaaatgtaaatttgttgaaccctgccacatttagtatccccacccccaaatcctgttccaatgaaaaaattaaaacctgatacgaaaaaaaaaaaattccagttaacctattttgtgtctgtaggctgacctcaaccctgtaacgtaacccattaaaatgaatttctttttttttaagacagagtttctctctgttgcccaggctggagtgcagtggcgcaatttcagctcactgcaacctctgcctcccaggttcaagtgattctcctgcctcagcctcctgagtagctgggattacaggcacacaccaccacgcccagctaatttttgtatttttagtagaggcggggtttcaccatgctggtcaggatgttctccaactcctgacttcatgatccacccacctcggcctcccaaagtgctgagattacagacgtgagccactgcgtcctgcctaaaatgaattttctagatgattgaataacagtagtcctttgatagaagataatgacttggtttatggccttaatatactacttaattacttaagatgtttattaatagaatgataaatgtacagagtaacctataagcatgacatacttttgctttcagtagtttcatgtaaagaaaaaaacttgaaaatagtaatacctgagtacccatgggaataatagacactggggaggtagggtggggagcgggagcaagagctgaaaaacttacctactggggactgtgctcactacctgggtgacaggatcatacgtaccccaaacctcaacatcacacagtatactcagctaacaaacctgcccatgtgtttcctgaatctaaaataaaaatcgaaataatttttttaaaaaagaaaaagacaatagtattacccatgggacaaaatttgtactattagcaagaatcattttgtgtctcatttagaaacaatttgacttttgttccagtgtttaaactttgacaaaaatggttttgaatagatctttataacctgatgccataaatacaagattctctgataccttcatttaatatatcaatattgggcctaaaacagtattctgtaaagcttaaattggtattaactatgatcatcttgatgtctatgatagataataaacaaggtcatacataccttactaaacaattttggtttttcaccaacattttattctttaaaagatttagactaacagaattatttagcatttcgagtcatgtgctttatttagcaagtgagtaaaaatattggaatattgaagtatttgcataaaaaatcaaatggtggtgttttgtaatctctattgtatttcctattaaggtttcatatattactttcccattgttcctgaatttgttatcctatatataaacagaaacatggatgagtaccatatacttcctgactcctttatcttgttacaccacaagatactgcactatttattggagatattttgatgattagtgccaaggctggcatcatgagccaaaatagacttgttaagtcaacctcattccaaacacctgctatagatcatcaaatctaagttgccattaattgtaagatgtcctgttatttcacacacacaactagaaaagaaaaatcggtatcaattatagtatggtgctttcttattttgaattttacttattagaagagctattttagatgtatttaaacataagatttttatcacataacttgtggatacaaaaaaagagaaattgtaagcaaaataagttgggtaatatattcctaaaacctc

SEQ ID NO: 4092 - DNA, 1677 bp, Homo sapiens
  source 1..1677: mol_type = genomic DNA
agtacccaagcgagccatttaacatggcggaggatgtttcctcagcggccccgagcccgcggggctgtgcggatggtagggatgccgaccctactgaggagcagatggcagaaacagagagaaacgacgaggagcagttcgaatgccaggaactgctcgagtgccaggtgcaggtgggggcccccgaggaggaggaggaggaggaggaggacgcgggcctggtggccgaggccgaggccgtggctgccggctggatgctcgatttcctctgcctctctctttgccgagctttccgcgacggccgctccgaggacttccgcaggacccgcaacagcgcagaggctattattcatggactatccagtctaacagcttgccagttgagaacgatatacatatgtcagtttttgacaagaattgcagcaggaaaaacccttgatgcacagtttgaaaatgatgaacgaattacacccttggaatcagccctgatgatttggggttcaattgaaaaggaacatgacaaacttcatgaagaaatacagaatttaattaaaattcaggctatagctgtttgtatggaaaatggcaactttaaagaagcagaagaagtctttgaaagaatatttggtgatccaaattctcatatgcctttcaaaagcaaattgcttatgataatctctcagaaagatacatttcattccttttttcaacacttcagctacaaccacatgatggagaaaattaagagttatgtgaattatgtgctaagtgaaaaatcatcaacctttctaatgaaggcagcggcaaaagtagtagaaagcaaaaggacaagaacaataacttctcaagataaacctagtggtaatgatgttgaaatggaaactgaagctaatttggatacaagaaaaagtgttagtgacaaacagtctgcggtaactgaatcctcagagggtacagtatccttattgaggtctcacaagaatcttttcttatctaagttgcaacatggaacccagcaacaagaccttaataagaaagaaagaagagtaggaactcctcaaagtacaaaaaagaaaaaagaaagcagaagagccactgaaagcagaatacctgtttcaaagagtcagccggtaactcctgaaaaacatcgagctagaaaaagacaggcatggctttgggaagaagacaagaatttgagatctggcgtgaggaaatatggagagggaaactggtctaaaatactgttgcattataaattcaacaaccggacaagtgtcatgttaaaagacagatggaggaccatgaagaaactaaaactgatttcctcagacagcgaagactgattgtgtttgtaaaagcttgatgaaaggacagttaagtattttgatcactgcattttgtttgaaacttgtgtcattgatgtaatttaaaacttttgtttaaagcattacagtatttttctgtgaccatcaattaatgagggtttgtgctaccagagttaaagcatatgctatcattgtattctttaagaaccttattttgataaaatgtaaatttgttgaaccctgccacatttagtatccccacccccaaatcctgttccaatgaaaaaattaaaacctgatacgaaaaaaaaaaaattccagttaacctattttgtgtctgtaggctgacctc

SEQ ID NO: 4093 - DNA, 669 bp, Homo sapiens
  source 1..669: mol_type = genomic DNA
atattttctattattcatggactatccagtctaacagcttgccagttgagaacgatatacatatgtcagtttttgacaagaattgcagcaggaaaaacccttgatgcacagtttgaaaatgatgaacgaattacacccttggaatcagccctgatgatttggggttcaattgaaaaggaacatgacaaacttcatgaagaaatacagaatttaattaaaattcaggctatagctgtttgtatggaaaatggcaactttaaagaagcagaagaagtctttgaaagaatatttggtgatccaaattctcatatgcctttcaaaagcaaattgcttatgataatctctcagaaagatacatttcattccttttttcaacacttcagctacaaccacatgatggagaaaattaagagttatgtgaattatgtgctaagtgaaaaatcatcaacctttctaatgaaggcagcggcaaaagtagtagaaagcaaaaggacaagaacaataacttctcaagataaacctagtggtaatgatgttgaaatggaaactgaagctaatttggatacaagaaaaaggtctcacaagaatcttttcttatctaagttgcaacatggaacccagcaacaagaccttaataagaaagaaagaagagtaggaactcctcaaagt

SEQ ID NO: 4094 - DNA, 2951 bp, Homo sapiens
  source 1..2951: mol_type = genomic DNA
gggacggcgggccccgcttccggcccgggcgtcgtgcgtgacccagcggcgtcacagccgaggaagcggcccggccgggagggcggggagggcgcgcggcgatcggacacgatggcgggaggaggcgggagtagcgacggcagcgggcgggcagctggcaggcgggcgtcccgcagtagcgggcgggcccggcgggggcgccacgagccggggctggggggcccggcggagcgcggcgcgggggaggcacggctggaagaggcagtcaatcgctgggtgctcaagttctacttccacgaggcgctgcgggcctttcggggtagccggtacggggacttcagacagatccgggacatcatgcaggctttgcttgtcaggcccttggggaaggagcacaccgtgtcccgattgctgcgggttatgcagtgtctgtcgcggattgaagaaggggaaaatttagactgttcctttgatatggaggctgagctcacaccactggaatcagctatcaatgtgctggagatgattaaaacggaatttacactgacagaagcagtggtcgaatccagtagaaaactggtcaaggaagctgctgtcattatttgtatcaaaaacaaagaatttgaaaaggcttcaaaaattttgaaaaaacatatgtccaaggaccccacaactcagaagctgagaaatgatctcctgaatattattcgagaaaagaacttggcccatcctgttatccagaacttttcatatgagaccttccagcagaagatgctgcgcttcctggagagccacctggatgacgccgagccctacctcctcacgatggccaaaaaggctttgaaatctgagtccgctgcctcaagtacagggaaggaagataaacagccagcaccagggcctgtggaaaagccacccagagaacccgcaaggcagctacggaatcctccaaccaccattggaatgatgactctgaaagcagctttcaagactctgtctggtgcacaggattctgaggcagcctttgcaaaactggaccagaaggatctggttcttcctactcaagctctcccagcatcaccagccctcaaaaacaagagacccagaaaagatgaaaacgaaagttcagccccggctgacggtgagggtggctcggaactgcagcccaagaacaagcgcatgacaataagcagattggtcttggaggaggacagccagagtactgagcccagcgcaggcctcaactcctcccaggaggccgcttcagcgccaccatccaagcccaccgttctcaaccaacccctccctggagagaagaatcccaaagtacccaaaggcaagtggaacagctctaatggggttgaagaaaaggagacttgggtggaagaggatgaactgtttcaagttcaggcagcaccagatgaagacagtacaaccaatataacaaaaaagcagaagtggactgtagaagaaagcgagtgggtcaaggctggagtgcagaaatatggggaaggaaactgggctgccatttctaaaaattacccatttgttaaccgaacagctgtgatgattaaggatcgctggcggaccatgaaaagacttggcatgaactgaaacaggctttcatttccacagaattcacaggagcatggttcctaataatagcccctgatagtctgctctttctttctttttcttttttttttttttttgagacagagtctcgctctgtcacccaggctggagtgcagtggcgtgatctcggctcactgcgacctccgtctcccgggctcacgccattctcctgcctcagcctcccgagtagctgggactacaggcgcccgccatcacgcccggctaatgttttgtatttttagtagagacggggtttcaccgtgttagccaggatggtctcgatctcctgacctcgtgatccacccaactcggcctcccaaagtgctgggattacaggcatgagccaccgcgcctggcatctgctgtttctttcagaagctgggctgggatgagaattttgggcaacctccttcgacgtgggggaggtcccatttccacttcatcactgttggagatcatggagctaagaagcagagccaagtccacccatgtccttggcagagatgacaggcacacagcttgtgcagtgccagaatatcattagcgtttcccttctttagtggtttgcttaaatttaaatccctggtaatctgtagaaccttctcctaggaaatggtgaagtctattaggagccacttgtgactccatgacctgttaaaaccagcaatgtgagtattatttggagtaaatttgttccacgtcaagttctggccttctgatgcaaatgcaaaggaacttagtctgttatgaacccaggttgatgacagaccagtccttgtggaataagattccctttaaaaactctttagccagtcgtgacatcaaccctagacctgtctgccttggcatttgctgtcaacatctgctgggctatgtaggcaggttaatcctccacttctcatgtggttgaaccagtgtgttttttggtaaaatggtgattgtagataagattagttccctgatcccctgccccctgtcccctgcctcttttcccaattcccttccttatgctggacttttaaagcttaaaaaaaatccgattgaatataaatgcctaatttcattctttgtgaaatggttgcttcctcctgattccctaattgtgctgtgttcgtgtcttgcactggaattcaacattcccttctccttttgtactgtgttgtgcttgctgtctctcccggacacccttaaagactgtctttttagcaaaaaatttcagtaaagtgttttctgtaatctttttttaaaaggtgagaactaattattgtccatacttgtagcattcttcattaaagtcttgcttctctcaactgtaa

SEQ ID NO: 4095 - DNA, 2175 bp, Homo sapiens
  source 1..2175: mol_type = genomic DNA
actctcgatgcgccgcggctgctgctgcgcaggcccagtgctgcgcttcgcggcagaggcgtctgcggtgacagctcagtcagttgagctctgtgtgccaggcgctcgcgagggggtagctcttctagtagtgctcggcgtcagacatggcggaggcgatggatttgggcaaagaccccaacgggcccacccattcctcgactctgttcgtgagggacgacggcagctccatgtccttctacgtgcggcccagcccggccaagcgtcggctgtcgacgctcatcctgcacggcggcggcaccgtgtgccgagtgcaggagcccggggccgtgctgctggcccagcccggggaggcgctggccgaggcctcgggtgatttcatctccacgcagtacatcctggactgcgtggagcgcaacgagaggctggagctggaggcctatcggctgggccccgcctcggcggcggacaccggctcggaagcaaagcccggggccctggccgagggcgccgcggagccggagccgcagcggcacgccgggcggatcgccttcacggatgcggacgacgtagccatccttacctacgtgaaggaaaatgcccgctcgcccagctccgtcaccggtaacgccttgtggaaagcgatggagaagagctcgctcacgcagcactcgtggcagtccctgaaggaccgctacctcaagcacctgcggggccaggagcataagtacctgctgggggacgcgccggtgagcccctcctcccagaagctcaagcggaaggcggaggaggacccggaggccgcggatagcggggaaccacagaataagagaactccagatttgcctgaagaagagtatgtgaaggaagaaatccaggagaatgaagaagcagtcaaaaagatgcttgtggaagccacccgggagtttgaggaggttgtggtggatgagagccctcctgattttgaaatacatataactatgtgtgatgatgatccacccacacctgaggaagactcagaaacacagcctgatgaggaggaagaagaagaagaagaaaaagtttctcaaccagaggtgggagctgccattaagatcattcggcagttaatggagaagtttaacttggatctatcaacagttacacaggccttcctaaaaaatagtggtgagctggaggctacttccgccttcttagcgtctggtcagagagctgatggatatcccatttggtcccgacaagatgacatagatttgcaaaaagatgatgaggataccagagaggcattggtcaaaaaatttggtgctcagaatgtagctcggaggattgaatttcgaaagaaataattggcaagataatgagaaaagaaaaaagtcatggtaggtgaggtggttaaaaaaaattgtgaccaatgaactttagagagttcttgcattggaactggcacttattttctgaccatcgctgctgttgctctgtgagtcctagatttttgtagccaagcagagttgtagagggggataaaaagaaaagaaattggatgtatttacagctgtccttgaacaagtatcaatgtgtttatgaaaggaagatctaaatcagacaggagttggtctacatagtagtaatccattgttggaatggaacccttgctatagtagtgacaaagtgaaaggaaatttaggaggcataggccatttcaggcagcataagtaatctcctgtcctttggcagaagctcctttagattgggatagattccaaataaagaatctagaaataggagaagatttaattatgaggccttgaacacggattatccccaaacccttgtcatttcccccagtgagctctgatttctagactgctttgaaaatgctgtattcattttgctaacttagtatttgggtaccctgctctttggctgttctttttttggagcccttctcagtcaagtctgccggatgtctttctttacctacccctcagttttccttaaaacgcgcacacaactctagagagtgttaagaataatgttacttggttaatgtgttatttattgagtattgtttgtgctaagcattgtgttagatttaaaaaattagtggattgactccactttgttgtgttgttttcattgttgaaaataaatataactttgtattcgagtctcgtc

SEQ ID NO: 4096 - DNA, 13132 bp, Homo sapiens
  source 1..13132: mol_type = genomic DNA
tcctccccttctcctcccctgctcgctgcagactccctcctcactgtcgctgccgagatccacagtcggttgtggctcagcccctgttgcaggggacaagtgagggagacttccctgtcctgccctgagacgccgccctcccggggttggggacagagcaggtgcagaggcactgcagctgctcggttgcccagcctcctgaatgatgccagcccagtatgctctaacctccagcctggttctcctggtgctgctgagcacagccagagcaggccccttctcttcacggtccaatgtgacactgccagccccccggccccctccccagccagggggccacacagtgggggctggagtgggaagcccctcttctcagctttacgagcacacagtggaaggaggggagaagcaggtggtattcacccaccgcattaacctgcccccttccactggctgtggctgtcccccaggcaccgagcccccagtccttgcttcagaggtacaggccctgagggtccgtctagagatcctggaggagttggtgaaggggctcaaggaacagtgcactgggggatgttgtcctgcctctgcccaagctggcacaggtcagacagatgtgcggaccctctgcagtctccatggtgtgtttgatctgagccgctgcacctgttcctgtgagccaggctggggtgggcccacctgctcagaccccacagatgctgagatccctccctcttccccaccctcagcctcggggtcctgcccagatgactgcaatgatcagggtcgctgtgtccgtggtcgttgcgtgtgctttcccggctacactggccccagctgtggctggccatcctgtcccggggactgccaaggccgtgggcgctgcgtgcagggcgtgtgtgtgtgccgggcaggcttctcaggccccgactgcagccagcgctcctgccctcgaggttgcagccagaggggacgctgtgagggtgggcgctgcgtgtgtgacccaggctacactggtgacgactgtggcatgaggagctgccctcgcggttgcagtcagagggggcgctgtgagaatgggcgctgcgtgtgtaaccccggctacactggcgaggactgtggggtgaggagctgccctcggggctgcagccagcggggacgctgcaaggacgggcgctgcgtgtgtgaccccggctacactggcgaggactgtggtacgcggagctgcccctgggactgtggcgagggcgggcgctgcgtggacggccgctgcgtgtgctggcccgggtacacaggcgaggactgcagcacgcggacatgtccgagggactgccggggccgcgggcgctgcgaggacggcgaatgcatttgcgacacgggctacagcggggacgactgcggcgtgcgcagctgccctggcgactgcaaccaaaggggccgctgcgaggacggccgctgcgtgtgctggccggggtacactggaaccgattgcggctcgcgcgcctgcccacgcgactgtagaggtcgcgggcgctgcgagaacggcgtgtgtgtttgcaatgcgggctacagcggcgaggactgcggtgtgcgcagctgtcctggggactgtcgtggccggggccgctgtgagagtggccgctgcatgtgttggccggggtacacaggccgggactgcggcacgcgcgcctgtcctggcgactgtcgcgggcgcgggcgctgcgtggatggccgctgcgtgtgcaacccgggcttcaccggtgaggactgtgggagccgtcgctgtcccggggactgccgtgggcacggcctttgcgaggatggcgtgtgcgtgtgtgacgcaggctactcaggggaagactgcagcacgcgcagctgccccgggggctgccgaggccgcggccagtgcctagatgggcggtgtgtgtgcgaggacggctactctggcgaggattgcggtgtgaggcagtgcccgaatgactgcagccagcacggcgtgtgccaggacggtgtgtgcatctgttgggaaggctacgtgagtgaggactgcagcatccgcacctgcccctccaactgccacgggaggggccgctgtgaggaagggcgctgcctgtgcgacccaggctacaccggccctacctgtgccacccgcatgtgcccggctgactgccggggacgtgggcggtgtgtgcaaggagtgtgcctgtgccacgtgggctatggcggtgaggactgcgggcaggaagagcctccagccagcgcctgccctggaggctgcgggccccgggaactgtgccgggcaggccagtgtgtgtgtgtagagggcttccgaggccctgactgtgccatccagacatgcccaggggactgccgtggccgaggagagtgtcacgatggcagctgtgtctgcaaagatgggtatgctggcgaagactgcggagaagaggtgccaaccattgagggcatgaggatgcatctcttggaggagacaacagttcggacagagtggaccccggctcctggccccgtggatgcctatgaaattcagttcatccccacgacagagggggcgagccccccattcacagcacgggttccaagctctgcctcagcctatgaccagagaggactggcccctggacaggagtaccaggtcactgtccgagcccttcgagggaccagctggggccttcctgcctccaagaccatcaccaccatgatcgatgggccccaggacctccgagtggtggctgtgacaccgacaacactggagcttggctggctgcgtccccaggctgaggtggaccgatttgtggtgtcctacgtcagtgccggcaaccagagggtgaggctggaagtgccccctgaagcagacgggacgctgctgactgacctgatgccaggcgtagaatatgtggtgactgtcacagcggagcggggccgggcagtcagctacccagcttctgtcagggccaacacagggtcctcacccttgggcctcttggggactaccgatgagcctcctccctcaggcccctcgacgacgcaaggggcccaggctcctctcctgcagcagcgcccccaggagctgggagagttgagggtgctgggcagagatgagacagggcgcctccgtgtggtctggaccgcccagcctgacacctttgcctacttccaactgcgcatgcgggtgcccgaggggccgggggcacatgaggaagtgctgccaggggacgtccgccaggctctggtgcctccaccccctcctggaaccccgtatgagctgtcacttcatggggtccctcctgggggcaagccctctgaccccatcatctaccaaggcattatggacaaggatgaggagaagcctgggaagtcctcaggcccaccacgcctgggtgagctgacggtgacagacaggacctccgactccttgctcctgcgctggacggtccccgagggcgagtttgactccttcgtgatccagtacaaagacagggacgggcagccccaggtggtgcccgtggaaggaccccagcgctcggccgtcatcacctccctggatcctggccgcaagtacaaatttgtcctgtatgggtttgttggcaagaagaggcatggtccgctggtggctgaagccaagatcttgcctcagagtgacccaagtccagggactccaccccacctgggaaacctgtgggtgacagaccctaccccagattcactgcacctctcctggactgtccctgagggccagtttgacaccttcatggtccagtacagggacagggatggacggccccaggtggtacctgtggaagggcccgagcgttcatttgttgtctcctcactggaccctgaccacaagtacagattcactctgtttggaattgcgaacaagaagcggtatggccccctcacggccgatggcaccactgctccagagaggaaagaggagcccccccgccctgagttcctggagcagcccctcctgggggaactgacagtgaccggcgtgaccccagactccttgcgtctctcatggacagtggcccagggccccttcgactcattcatggtccagtacaaggatgcacaggggcagccccaggcagtgcctgttgcgggggatgagaatgaggttactgtccccggcctggatcccgaccggaagtataagatgaacctctacgggcttcgtggcaggcagcgtgtggggcccgagtctgtggtggccaagactgctcctcaggaggatgtggacgagacccccagccccacagaactgggcacggaggccccggagtcccccgaggagccgctcctgggggagctgacagtgacaggatcctcccctgattcgctgagcctcttctggaccgtcccccagggcagcttcgactctttcaccgtgcagtacaaggacagggatgggcggccccgggcggtgcgtgttgggggcaaggagagtgaggtcaccgtgggaggcctagagcccgggcacaagtacaagatgcacctgtacggcctccacgaggggcagcgcgtgggcccggtgtccgccgtgggcgtgacagccccacaacaagaagagacccctccagccactgagtccccgctggagccacgcctaggagagctgacagtgacagatgtgacccccaactctgtgggcctctcctggacagtccccgagggccagtttgactccttcatagtccagtacaaggacaaggacgggcagccccaggtggtgccggtggcggcagaccagcgagaggtcacagtctacaacctggagcctgagagaaaatataagatgaacatgtatggactacatgatgggcaacgcatgggccccctgtctgtggtcatcgtgacggctcccctcccaccagccccagccacagaggcctccaagcctcccctggagccacgcctaggggagctgacagtgacggatataacccctgactctgtgggcctctcatggacagtccctgagggtgaattcgactcctttgtggttcagtacaaggacagggacgggcagccccaggtggtgcccgtggctgcagatcagcgggaggtcactatccctgacctggaaccctcccgcaagtacaagttcctgctctttgggatccaggatgggaaacgacgcagcccagtctctgtggaggcaaagacggttgcccgaggtgacgccagcccaggggccccaccccgccttggggagctgtgggtgacagaccccaccccagactcactgcgcctctcctggacggttcctgagggccagttcgactcttttgtggtccagttcaaggacaaagacgggccccaggtggtgcccgtggagggccatgagcgctctgtcactgtcacccctctggatgccggccgcaagtacagattcctcctctatggcctcctgggcaagaagcgccatggccctctcactgccgacggcaccacggaagcccggagtgctatggatgatactggaacaaagcgtcccccaaaaccccgtctgggggaggagctgcaggtgaccaccgtgacccagaactccgtgggcctctcctggacagtccctgagggccagtttgactcctttgtggtccagtacaaagacagggacgggcagccccaggtggtgcccgtggagggcagcctcagggaggtcagcgtgccgggcctggaccctgcccacaggtacaagctgctgctctacgggctgcaccacggcaagcgtgtgggccccatctcggccgtcgccattactgccggcagggaagaaacggaaactgagaccacggccccgacccctccagcgcctgagccccacctcggggagttgacagtggaggaggccacgtcacacaccctgcatctctcctggatggtgactgagggagaatttgactccttcgaaatccagtacacagatagagacgggcaactccaaatggtccgcataggaggtgaccggaatgacatcaccctctctggcctggaatccgaccacagatacctggtgaccctgtatggtttcagtgatgggaagcatgtaggtcctgtccatgtcgaggccctgacagtcccggaggaggagaagccttcagaacctcccaccgcaacccccgagccccccatcaagcctcgcctgggggagctgaccgtgacagatgccacccctgactccctcagcctgtcctggacagttcccgagggacagtttgaccacttcctggtccagtacaggaatggagatgggcagcccaaggcagtgagggtgccagggcacgaggaaggggtcaccatctcgggcctggagccagaccataaatacaagatgaacctgtacggcttccacggtggccagcgcatgggccctgtgtctgtcgtcggggtgacagctgcagaggaagagacccccagccccacagaacccagcatggaggccccggagcccgctgaggagccgctcctgggggagctaacagtgacaggatcctcccctgactcgctgagcctctcctggaccgtcccccagggccgcttcgactccttcaccgtgcagtacaaggacagggacgggcggccccaggtggtgcgtgttgggggcgaggagagtgaagtcaccgtggggggcctggagcctgggcgcaagtacaagatgcacctgtacggcctccacgaggggcggcgcgtgggcccagtgtctgctgtgggcgtcacggcccccgaagaggagtcccctgatgctcctcttgcaaagctgcgcctagggcagatgacagtgagagacatcacctccgactccctcagcctctcctggacagtccccgagggccagtttgaccatttcttggtccagtttaagaatggggacgggcagcccaaggcggtgcgggtgccgggacacgaggatggggtcaccatctcgggcctggagccagaccacaagtacaagatgaacctgtacggcttccacggtggccagcgcgtgggccccgtgtctgctgttggtttaactgccccaggaaaggatgaagaaatggccccagcctcgacagaacctcccacccctgaaccccccatcaagcctcgcctggaggagctgaccgtgacagatgcgacccctgactccctcagcctgtcctggacggttcccgagggacagtttgaccacttcctggtccagtacaagaatggggatgggcagcccaaggcaacacgggtgccaggacatgaggacagggtcaccatctccggcctggagccagacaacaagtacaagatgaacctgtacggcttccacggtggccagcgtgtgggccccgtgtctgccatcggggtgacagctgcagaggaagagacccccagccccacagaacccagcatggaggccccggagccccctgaggagccgctcctgggggagctaacagtgacaggatcctcccctgactcgctgagcctctcctggaccgtcccccagggccgcttcgactccttcaccgtgcagtacaaggacagggacgggcggccccaggtggtgcgtgttgggggcgaggagagcgaggtcaccgtggggggcctggagcctgggcgcaaatacaagatgcacctgtatggcctccacgaggggcggcgcgtgggcccggtgtccaccgtgggcgtgactgccccacaagaggatgtggacgagacccccagccctacagaaccaggcacagaggccccagggccccccgaggagcctctcctgggggagctgacagtgacaggatcctcccctgactcgctgagcctttcctggaccgtcccccagggccgctttgactccttcaccgtgcagtacaaggacagggacgggcggccccaggcggtgcgtgttgggggccaggagagcaaggtcactgtgaggggcctggagcctgggcgcaagtacaagatgcacctgtacggcctccacgaggggcggcgcctgggcccggtgtctgccgtgggcgtcacagaggatgaagccgagaccacccaagcagtgcctaccatgacccctgagccccccatcaagcctcgcctgggggagctgaccatgacagatgccacccctgactccctcagcctgtcctggacggttcccgagggccagtttgaccacttcctggtccagtacaggaatggggatgggcagcccaaggcggtgcgggtgccggggcacgaggacggggtcaccatctcaggcctggagccagaccataaatacaagatgaacctgtacggcttccacggtggccagcgcgtgggccccatctctgtcattggggtgacggctgcagaggaagagacccccagccccacggaactcagcactgaggccccggagccccctgaggagccgctcctgggggagctgacagtgacaggatcctcccctgactcgctgagcctctcctggaccatcccccagggccacttcgactccttcaccgtgcagtacaaggacagggacgggcggccccaggtgatgcgtgtcaggggcgaggagagcgaggtcaccgtggggggcctggagcccgggcgcaaatacaagatgcacctgtacggcctccacgaggggcggcgtgtgggcccggtgtccaccgtgggtgtgacagctccagaggatgaagcagagaccacccaagcagtgcccaccacaacccctgagccccccaacaagcctcgcctcggggagctgaccgtgacagatgccacccctgactccctcagcctgtcctggatggtccccgagggccagtttgaccacttcctggtccagtacaggaatggggatgggcagcccaaggtggtgcgggtgccggggcacgaggacggggtcaccatctcaggcctggagccagaccacaagtacaagatgaacctgtacggcttccacggtggccagcgcgtgggccccatctctgtcattggggtgacagctgcagaggaagaaactcccgcccccacagaacccagcacggaggccccggagccccctgaggagccgctcctgggggagctgacagtgacaggatcctcccctgactcgctgagcctctcctggaccatcccccagggccgcttcgactccttcactgtgcagtacaaggacagggacgggcggccccaggtggtgcgtgtcaggggcgaggagagcgaggtcaccgtggggggcctggagcccgggtgcaaatacaagatgcacctgtacggcctccacgaggggcagcgcgtgggcccagtgtccgctgtgggtgtgacagctccaaaggatgaagccgagaccacccaagcagtgcctaccatgacccctgagccccccatcaagcctcgcctgggggagctgaccgtgacagatgccacccccgactccctcagcctgtcctggatggttcccgagggccagtttgaccacttcctggtccagtacaggaatggggatgggcagcccaaggcggtgcgggtgccggggcacgaggacggggtcaccatctcaggcctggagccagaccataaatacaagatgaacctgtacggcttccacggtggccagcgcgtaggccctgtgtctgccattggggtgacggaggaagagacccccagccccacagaacccagcactgaggccccggaggcccctgaggagccgctcctgggggagttgacagtgacaggatcctcccctgactcgctgagcctctcctggaccgtcccccagggccgcttcgactccttcaccgtgcagtacaaggacagggacgggcagccccaggtggtgcgtgtcaggggcgaggagagcgaggtcaccgtggggggcctggagcccgggcgcaaatacaagatgcatctgtacggcctccacgaggggcagcgcgtgggcccagtgtccaccgtgggcatcacggcgcccctgcccacaccactgccggtggagccccgcctgggggagctggcggtggcggccgtgacctcggactcagtgggcctctcatggacggtggcccagggcccctttgactccttcctggtacagtacagggacgcgcaggggcagccccaggcagtgcctgtgagcggagacctccgagcggtcgccgtctcggggctggacccggcccgcaagtacaagttcctgctctttggactccagaatgggaaacgccacggcccagtccctgtggaggccaggaccgccccagacaccaaaccgtctccccgcctgggggagctgactgtgacagatgcgacccctgactccgtgggcctctcgtggacggtccctgagggcgaattcgactccttcgtggtccagtacaaggataaggatggtcggctccaggtggtgccggtggcagccaaccagcgggaggtcacagtccagggcctggagcccagtaggaaatacaggttcctgctctatggtctgtcaggcaggaaacgactgggccccatctctgctgacagcaccacagctcccctggagaaggagctacctccccacctgggggaactgaccgtggctgaggagacctccagctctctgcgcctgtcctggacggtagcccagggcccctttgactccttcgtggtccagtacagggacacggacgggcagcccagggcagtgcctgtggccgcagaccagcgcacagtcaccgtagaggacctggagcctggcaagaaatacaagtttctgctctacgggctccttgggggaaagcgcctgggcccggtctctgccctgggaatgacagccccagaagaggacacaccagccccagagttagccccagaggcccctgagcctcctgaagagccccgcctaggagtgctgaccgtgaccgacacaaccccagactccatgcgcctctcgtggagcgtggcccagggcccctttgattccttcgtggtccagtatgaggacacgaacgggcagccccaggccttgctcgtggacggcgaccagagcaagatcctcatctcaggcctggagcccagcaccccctacaggttcctcctctatggcctccatgaagggaagcgcctggggcccctctcagctgagggcaccacagggctggctcctgctggtcagacctcagaggagtcaaggccccgcctgtcccagctgtctgtgactgacgtgaccaccagttcactgaggctcaactgggaggccccaccgggggccttcgactccttcctgctccgctttggggttccatcaccaagcactctggagccgcatccgcgtccactgctgcagcgcgagctgatggtgccggggacgcggcactcggccgtgctccgggacctgcgttccgggactctgtacagcctgacactgtatgggctgcgaggaccccacaaggccgacagcatccagggaaccgcccgcaccctcagcccagttctggagagcccccgtgacctccaattcagtgaaatcagggagacctcagccaaggtcaactggatgcccccaccatcccgggcggacagcttcaaagtctcctaccagctggcggacggaggggagcctcagagtgtgcaggtggatggccaggcccggacccagaaactccaggggctgatcccaggcgctcgctatgaggtgaccgtggtctcggtccgaggctttgaggagagtgagcctctcacaggcttcctcaccacggttcctgacggtcccacacagttgcgtgcactgaacttgaccgagggattcgccgtgctgcactggaagcccccccagaatcctgtggacacctatgacgtccaggtcacagcccctggggccccgcctctgcaggcggagaccccaggcagcgcggtggactaccccctgcatgaccttgtcctccacaccaactacaccgccacagtgcgtggcctgcggggccccaacctcacttccccagccagcatcaccttcaccacagggctagaggcccctcgggacttggaggccaaggaagtgaccccccgcaccgccctgctcacttggactgagcccccagtccggcccgcaggctacctgctcagcttccacacccctggtggacagaaccaggagatcctgctcccaggagggatcacatctcaccagctccttggcctctttccctccacctcctacaatgcacggctccaggccatgtggggccagagcctcctgccgcccgtgtccacctctttcaccacgggtgggctgcggatccccttccccagggactgcggggaggagatgcagaacggagccggtgcctccaggaccagcaccatcttcctcaacggcaaccgcgagcggcccctgaacgtgttttgcgacatggagactgatgggggcggctggctggtgttccagcgccgcatggatggacagacagacttctggagggactgggaggactatgcccatggttttgggaacatctctggagagttctggctgggcaatgaggccctgcacagcctgacacaggcaggtgactactccatgcgcgtggacctgcgggctggggacgaggctgtgttcgcccagtacgactccttccacgtagactcggctgcggagtactaccgcctccacttggagggctaccacggcaccgcaggggactccatgagctaccacagcggcagtgtcttctctgcccgtgatcgggaccccaacagcttgctcatctcctgcgctgtctcctaccgaggggcctggtggtacaggaactgccactacgccaacctcaacgggctctacgggagcacagtggaccatcagggagtgagctggtaccactggaagggcttcgagttctcggtgcccttcacggaaatgaagctgagaccaagaaactttcgctccccagcggggggaggctgagctgctgcccacctctctcgcaccccagtatgactgccgagcactgaggggtcgccccgagagaagagccagggtccttcaccacccagccgctggaggaagccttctctgccagcgatctcgcagcactgtgtttacaggggggaggggaggggttcgtacgggagcaataaaggagaaactgaggtacccggc

SEQ ID NO: 4097 - DNA, 13125 bp, Homo sapiens
  source 1..13125: mol_type = genomic DNA
tcctccccttctcctcccctgctcgctgcagactccctcctcactgtcgctgccgagatccacagtcggttgtggctcagcccctgttgcaggggacaagtgagggagacttccctgtcctgccctgagacgccgccctcccggggttggggacagagcaggtgcagaggcactgcagctgctcggttgcccagcctcctgaatgatgccagcccagtatgctctaacctccagcctggttctcctggtgctgctgagcacagccagagcaggccccttctcttcacggtccaatgtgacactgccagccccccggccccctccccagccagggggccacacagtgggggctggagtgggaagcccctcttctcagctttacgagcacacagtggaaggaggggagaagcaggtggtattcacccaccgcattaacctgcccccttccactggctgtggctgtcccccaggcaccgagcccccagtccttgcttcagaggtacaggccctgagggtccgtctagagatcctggaggagttggtgaaggggctcaaggaacagtgcactgggggatgttgtcctgcctctgcccaagctggcacaggtcagacagatgtgcggaccctctgcagtctccatggtgtgtttgatctgagccgctgcacctgttcctgtgagccaggctggggtgggcccacctgctcagaccccacagatgctgagatccctccctcttccccaccctcagcctcggggtcctgcccagatgactgcaatgatcagggtcgctgtgtccgtggtcgttgcgtgtgctttcccggctacactggccccagctgtggctggccatcctgtcccggggactgccaaggccgtgggcgctgcgtgcagggcgtgtgtgtgtgccgggcaggcttctcaggccccgactgcagccagcgctcctgccctcgaggttgcagccagaggggacgctgtgagggtgggcgctgcgtgtgtgacccaggctacactggtgacgactgtggcatgaggagctgccctcgcggttgcagtcagagggggcgctgtgagaatgggcgctgcgtgtgtaaccccggctacactggcgaggactgtggggtgaggagctgccctcggggctgcagccagcggggacgctgcaaggacgggcgctgcgtgtgtgaccccggctacactggcgaggactgtggtacgcggagctgcccctgggactgtggcgagggcgggcgctgcgtggacggccgctgcgtgtgctggcccgggtacacaggcgaggactgcagcacgcggacatgtccgagggactgccggggccgcgggcgctgcgaggacggcgaatgcatttgcgacacgggctacagcggggacgactgcggcgtgcgcagctgccctggcgactgcaaccaaaggggccgctgcgaggacggccgctgcgtgtgctggccggggtacactggaaccgattgcggctcgcgcgcctgcccacgcgactgtagaggtcgcgggcgctgcgagaacggcgtgtgtgtttgcaatgcgggctacagcggcgaggactgcggtgtgcgcagctgtcctggggactgtcgtggccggggccgctgtgagagtggccgctgcatgtgttggccggggtacacaggccgggactgcggcacgcgcgcctgtcctggcgactgtcgcgggcgcgggcgctgcgtggatggccgctgcgtgtgcaacccgggcttcaccggtgaggactgtgggagccgtcgctgtcccggggactgccgtgggcacggcctttgcgaggatggcgtgtgcgtgtgtgacgcaggctactcaggggaagactgcagcacgcgcagctgccccgggggctgccgaggccgcggccagtgcctagatgggcggtgtgtgtgcgaggacggctactctggcgaggattgcggtgtgaggcagtgcccgaatgactgcagccagcacggcgtgtgccaggacggtgtgtgcatctgttgggaaggctacgtgagtgaggactgcagcatccgcacctgcccctccaactgccacgggaggggccgctgtgaggaagggcgctgcctgtgcgacccaggctacaccggccctacctgtgccacccgcatgtgcccggctgactgccggggacgtgggcggtgtgtgcaaggagtgtgcctgtgccacgtgggctatggcggtgaggactgcgggcaggaagagcctccagccagcgcctgccctggaggctgcgggccccgggaactgtgccgggcaggccagtgtgtgtgtgtagagggcttccgaggccctgactgtgccatccagacatgcccaggggactgccgtggccgaggagagtgtcacgatggcagctgtgtctgcaaagatgggtatgctggcgaagactgcggagaagaggtgccaaccattgagggcatgaggatgcatctcttggaggagacaacagttcggacagagtggaccccggctcctggccccgtggatgcctatgaaattcagttcatccccacgacagagggggcgagccccccattcacagcacgggttccaagctctgcctcagcctatgaccagagaggactggcccctggacaggagtaccaggtcactgtccgagcccttcgagggaccagctggggccttcctgcctccaagaccatcaccaccatgatcgatgggccccaggacctccgagtggtggctgtgacaccgacaacactggagcttggctggctgcgtccccaggctgaggtggaccgatttgtggtgtcctacgtcagtgccggcaaccagagggtgaggctggaagtgccccctgaagcagacgggacgctgctgactgacctgatgccaggcgtagaatatgtggtgactgtcacagcggagcggggccgggcagtcagctacccagcttctgtcagggccaacacagggtcctcacccttgggcctcttggggactaccgatgagcctcctccctcaggcccctcgacgacgcaaggggcccaggctcctctcctgcagcagcgcccccaggagctgggagagttgagggtgctgggcagagatgagacagggcgcctccgtgtggtctggaccgcccagcctgacacctttgcctacttccaactgcgcatgcgggtgcccgaggggccgggggcacatgaggaagtgctgccaggggacgtccgccaggctctggtgcctccaccccctcctggaaccccgtatgagctgtcacttcatggggtccctcctgggggcaagccctctgaccccatcatctaccaaggcattatggacaaggatgaggagaagcctgggaagtcctcaggcccaccacgcctgggtgagctgacggtgacagacaggacctccgactccttgctcctgcgctggacggtccccgagggcgagtttgactccttcgtgatccagtacaaagacagggacgggcagccccaggtggtgcccgtggaaggaccccagcgctcggccgtcatcacctccctggatcctggccgcaagtacaaatttgtcctgtatgggtttgttggcaagaagaggcatggtccgctggtggctgaagccaagatcttgcctcagagtgacccaagtccagggactccaccccacctgggaaacctgtgggtgacagaccctaccccagattcactgcacctctcctggactgtccctgagggccagtttgacaccttcatggtccagtacagggacagggatggacggccccaggtggtacctgtggaagggcccgagcgttcatttgttgtctcctcactggaccctgaccacaagtacagattcactctgtttggaattgcgaacaagaagcggtatggccccctcacggccgatggcaccactgctccagagaggaaagaggagcccccccgccctgagttcctggagcagcccctcctgggggaactgacagtgaccggcgtgaccccagactccttgcgtctctcatggacagtggcccagggccccttcgactcattcatggtccagtacaaggatgcacaggggcagccccaggcagtgcctgttgcgggggatgagaatgaggttactgtccccggcctggatcccgaccggaagtataagatgaacctctacgggcttcgtggcaggcagcgtgtggggcccgagtctgtggtggccaagactgctcctcaggaggatgtggacgagacccccagccccacagaactgggcacggaggccccggagtcccccgaggagccgctcctgggggagctgacagtgacaggatcctcccctgattcgctgagcctcttctggaccgtcccccagggcagcttcgactctttcaccgtgcagtacaaggacagggatgggcggccccgggcggtgcgtgttgggggcaaggagagtgaggtcaccgtgggaggcctagagcccgggcacaagtacaagatgcacctgtacggcctccacgaggggcagcgcgtgggcccggtgtccgccgtgggcgtgacagccccacaacaagaagagacccctccagccactgagtccccgctggagccacgcctaggagagctgacagtgacagatgtgacccccaactctgtgggcctctcctggacagtccccgagggccagtttgactccttcatagtccagtacaaggacaaggacgggcagccccaggtggtgccggtggcggcagaccagcgagaggtcacagtctacaacctggagcctgagagaaaatataagatgaacatgtatggactacatgatgggcaacgcatgggccccctgtctgtggtcatcgtgacggctcccctcccaccagccccagccacagaggcctccaagcctcccctggagccacgcctaggggagctgacagtgacggatataacccctgactctgtgggcctctcatggacagtccctgagggtgaattcgactcctttgtggttcagtacaaggacagggacgggcagccccaggtggtgcccgtggctgcagatcagcgggaggtcactatccctgacctggaaccctcccgcaagtacaagttcctgctctttgggatccaggatgggaaacgacgcagcccagtctctgtggaggcaaagacggttgcccgaggtgacgccagcccaggggccccaccccgccttggggagctgtgggtgacagaccccaccccagactcactgcgcctctcctggacggttcctgagggccagttcgactcttttgtggtccagttcaaggacaaagacgggccccaggtggtgcccgtggagggccatgagcgctctgtcactgtcacccctctggatgccggccgcaagtacagattcctcctctatggcctcctgggcaagaagcgccatggccctctcactgccgacggcaccacggaagcccggagtgctatggatgatactggaacaaagcgtcccccaaaaccccgtctgggggaggagctgcaggtgaccaccgtgacccagaactccgtgggcctctcctggacagtccctgagggccagtttgactcctttgtggtccagtacaaagacagggacgggcagccccaggtggtgcccgtggagggcagcctcagggaggtcagcgtgccgggcctggaccctgcccacaggtacaagctgctgctctacgggctgcaccacggcaagcgtgtgggccccatctcggccgtcgccattactgccggcagggaagaaacggaaactgagaccacggccccgacccctccagcgcctgagccccacctcggggagttgacagtggaggaggccacgtcacacaccctgcatctctcctggatggtgactgagggagaatttgactccttcgaaatccagtacacagatagagacgggcaactccaaatggtccgcataggaggtgaccggaatgacatcaccctctctggcctggaatccgaccacagatacctggtgaccctgtatggtttcagtgatgggaagcatgtaggtcctgtccatgtcgaggccctgacagtcccggaggaggagaagccttcagaacctcccaccgcaacccccgagccccccatcaagcctcgcctgggggagctgaccgtgacagatgccacccctgactccctcagcctgtcctggacagttcccgagggacagtttgaccacttcctggtccagtacaggaatggagatgggcagcccaaggcagtgagggtgccagggcacgaggaaggggtcaccatctcgggcctggagccagaccataaatacaagatgaacctgtacggcttccacggtggccagcgcatgggccctgtgtctgtcgtcggggtgacagctgcagaggaagagacccccagccccacagaacccagcatggaggccccggagcccgctgaggagccgctcctgggggagctaacagtgacaggatcctcccctgactcgctgagcctctcctggaccgtcccccagggccgcttcgactccttcaccgtgcagtacaaggacagggacgggcggccccaggtggtgcgtgttgggggcgaggagagtgaagtcaccgtggggggcctggagcctgggcgcaagtacaagatgcacctgtacggcctccacgaggggcggcgcgtgggcccagtgtctgctgtgggcgtcacggcccccgaagaggagtcccctgatgctcctcttgcaaagctgcgcctagggcagatgacagtgagagacatcacctccgactccctcagcctctcctggacagtccccgagggccagtttgaccatttcttggtccagtttaagaatggggacgggcagcccaaggcggtgcgggtgccgggacacgaggatggggtcaccatctcgggcctggagccagaccacaagtacaagatgaacctgtacggcttccacggtggccagcgcgtgggccccgtgtctgctgttggtttaactgccccaggaaaggatgaagaaatggccccagcctcgacagaacctcccacccctgaaccccccatcaagcctcgcctggaggagctgaccgtgacagatgcgacccctgactccctcagcctgtcctggacggttcccgagggacagtttgaccacttcctggtccagtacaagaatggggatgggcagcccaaggcaacacgggtgccaggacatgaggacagggtcaccatctccggcctggagccagacaacaagtacaagatgaacctgtacggcttccacggtggccagcgtgtgggccccgtgtctgccatcggggtgacagctgcagaggaagagacccccagccccacagaacccagcatggaggccccggagccccctgaggagccgctcctgggggagctaacagtgacaggatcctcccctgactcgctgagcctctcctggaccgtcccccagggccgcttcgactccttcaccgtgcagtacaaggacagggacgggcggccccaggtggtgcgtgttgggggcgaggagagcgaggtcaccgtggggggcctggagcctgggcgcaaatacaagatgcacctgtatggcctccacgaggggcggcgcgtgggcccggtgtccaccgtgggcgtgactgccccacaagaggatgtggacgagacccccagccctacagaaccaggcacagaggccccagggccccccgaggagcctctcctgggggagctgacagtgacaggatcctcccctgactcgctgagcctttcctggaccgtcccccagggccgctttgactccttcaccgtgcagtacaaggacagggacgggcggccccaggcggtgcgtgttgggggccaggagagcaaggtcactgtgaggggcctggagcctgggcgcaagtacaagatgcacctgtacggcctccacgaggggcggcgcctgggcccggtgtctgccgtgggcgtcacagaggatgaagccgagaccacccaagcagtgcctaccatgacccctgagccccccatcaagcctcgcctgggggagctgaccatgacagatgccacccctgactccctcagcctgtcctggacggttcccgagggccagtttgaccacttcctggtccagtacaggaatggggatgggcagcccaaggcggtgcgggtgccggggcacgaggacggggtcaccatctcaggcctggagccagaccataaatacaagatgaacctgtacggcttccacggtggccagcgcgtgggccccatctctgtcattggggtgacggctgcagaggaagagacccccagccccacggaactcagcactgaggccccggagccccctgaggagccgctcctgggggagctgacagtgacaggatcctcccctgactcgctgagcctctcctggaccatcccccagggccacttcgactccttcaccgtgcagtacaaggacagggacgggcggccccaggtgatgcgtgtcaggggcgaggagagcgaggtcaccgtggggggcctggagcccgggcgcaaatacaagatgcacctgtacggcctccacgaggggcggcgtgtgggcccggtgtccaccgtgggtgtgacagaggatgaagcagagaccacccaagcagtgcccaccacaacccctgagccccccaacaagcctcgcctcggggagctgaccgtgacagatgccacccctgactccctcagcctgtcctggatggtccccgagggccagtttgaccacttcctggtccagtacaggaatggggatgggcagcccaaggtggtgcgggtgccggggcacgaggacggggtcaccatctcaggcctggagccagaccacaagtacaagatgaacctgtacggcttccacggtggccagcgcgtgggccccatctctgtcattggggtgacagctgcagaggaagaaactcccgcccccacagaacccagcacggaggccccggagccccctgaggagccgctcctgggggagctgacagtgacaggatcctcccctgactcgctgagcctctcctggaccatcccccagggccgcttcgactccttcactgtgcagtacaaggacagggacgggcggccccaggtggtgcgtgtcaggggcgaggagagcgaggtcaccgtggggggcctggagcccgggtgcaaatacaagatgcacctgtacggcctccacgaggggcagcgcgtgggcccagtgtccgctgtgggtgtgacagctccaaaggatgaagccgagaccacccaagcagtgcctaccatgacccctgagccccccatcaagcctcgcctgggggagctgaccgtgacagatgccacccccgactccctcagcctgtcctggatggttcccgagggccagtttgaccacttcctggtccagtacaggaatggggatgggcagcccaaggcggtgcgggtgccggggcacgaggacggggtcaccatctcaggcctggagccagaccataaatacaagatgaacctgtacggcttccacggtggccagcgcgtaggccctgtgtctgccattggggtgacggaggaagagacccccagccccacagaacccagcactgaggccccggaggcccctgaggagccgctcctgggggagttgacagtgacaggatcctcccctgactcgctgagcctctcctggaccgtcccccagggccgcttcgactccttcaccgtgcagtacaaggacagggacgggcagccccaggtggtgcgtgtcaggggcgaggagagcgaggtcaccgtggggggcctggagcccgggcgcaaatacaagatgcatctgtacggcctccacgaggggcagcgcgtgggcccagtgtccaccgtgggcatcacggcgcccctgcccacaccactgccggtggagccccgcctgggggagctggcggtggcggccgtgacctcggactcagtgggcctctcatggacggtggcccagggcccctttgactccttcctggtacagtacagggacgcgcaggggcagccccaggcagtgcctgtgagcggagacctccgagcggtcgccgtctcggggctggacccggcccgcaagtacaagttcctgctctttggactccagaatgggaaacgccacggcccagtccctgtggaggccaggaccgccccagacaccaaaccgtctccccgcctgggggagctgactgtgacagatgcgacccctgactccgtgggcctctcgtggacggtccctgagggcgaattcgactccttcgtggtccagtacaaggataaggatggtcggctccaggtggtgccggtggcagccaaccagcgggaggtcacagtccagggcctggagcccagtaggaaatacaggttcctgctctatggtctgtcaggcaggaaacgactgggccccatctctgctgacagcaccacagctcccctggagaaggagctacctccccacctgggggaactgaccgtggctgaggagacctccagctctctgcgcctgtcctggacggtagcccagggcccctttgactccttcgtggtccagtacagggacacggacgggcagcccagggcagtgcctgtggccgcagaccagcgcacagtcaccgtagaggacctggagcctggcaagaaatacaagtttctgctctacgggctccttgggggaaagcgcctgggcccggtctctgccctgggaatgacagccccagaagaggacacaccagccccagagttagccccagaggcccctgagcctcctgaagagccccgcctaggagtgctgaccgtgaccgacacaaccccagactccatgcgcctctcgtggagcgtggcccagggcccctttgattccttcgtggtccagtatgaggacacgaacgggcagccccaggccttgctcgtggacggcgaccagagcaagatcctcatctcaggcctggagcccagcaccccctacaggttcctcctctatggcctccatgaagggaagcgcctggggcccctctcagctgagggcaccacagggctggctcctgctggtcagacctcagaggagtcaaggccccgcctgtcccagctgtctgtgactgacgtgaccaccagttcactgaggctcaactgggaggccccaccgggggccttcgactccttcctgctccgctttggggttccatcaccaagcactctggagccgcatccgcgtccactgctgcagcgcgagctgatggtgccggggacgcggcactcggccgtgctccgggacctgcgttccgggactctgtacagcctgacactgtatgggctgcgaggaccccacaaggccgacagcatccagggaaccgcccgcaccctcagcccagttctggagagcccccgtgacctccaattcagtgaaatcagggagacctcagccaaggtcaactggatgcccccaccatcccgggcggacagcttcaaagtctcctaccagctggcggacggaggggagcctcagagtgtgcaggtggatggccaggcccggacccagaaactccaggggctgatcccaggcgctcgctatgaggtgaccgtggtctcggtccgaggctttgaggagagtgagcctctcacaggcttcctcaccacggttcctgacggtcccacacagttgcgtgcactgaacttgaccgagggattcgccgtgctgcactggaagcccccccagaatcctgtggacacctatgacgtccaggtcacagcccctggggccccgcctctgcaggcggagaccccaggcagcgcggtggactaccccctgcatgaccttgtcctccacaccaactacaccgccacagtgcgtggcctgcggggccccaacctcacttccccagccagcatcaccttcaccacagggctagaggcccctcgggacttggaggccaaggaagtgaccccccgcaccgccctgctcacttggactgagcccccagtccggcccgcaggctacctgctcagcttccacacccctggtggacagaaccaggagatcctgctcccaggagggatcacatctcaccagctccttggcctctttccctccacctcctacaatgcacggctccaggccatgtggggccagagcctcctgccgcccgtgtccacctctttcaccacgggtgggctgcggatccccttccccagggactgcggggaggagatgcagaacggagccggtgcctccaggaccagcaccatcttcctcaacggcaaccgcgagcggcccctgaacgtgttttgcgacatggagactgatgggggcggctggctggtgttccagcgccgcatggatggacagacagacttctggagggactgggaggactatgcccatggttttgggaacatctctggagagttctggctgggcaatgaggccctgcacagcctgacacaggcaggtgactactccatgcgcgtggacctgcgggctggggacgaggctgtgttcgcccagtacgactccttccacgtagactcggctgcggagtactaccgcctccacttggagggctaccacggcaccgcaggggactccatgagctaccacagcggcagtgtcttctctgcccgtgatcgggaccccaacagcttgctcatctcctgcgctgtctcctaccgaggggcctggtggtacaggaactgccactacgccaacctcaacgggctctacgggagcacagtggaccatcagggagtgagctggtaccactggaagggcttcgagttctcggtgcccttcacggaaatgaagctgagaccaagaaactttcgctccccagcggggggaggctgagctgctgcccacctctctcgcaccccagtatgactgccgagcactgaggggtcgccccgagagaagagccagggtccttcaccacccagccgctggaggaagccttctctgccagcgatctcgcagcactgtgtttacaggggggaggggaggggttcgtacgggagcaataaaggagaaactgaggtacccgg

SEQ ID NO: 4098 - DNA, 3125 bp, Homo sapiens
  source 1..3125: mol_type = genomic DNA
ccttgtgcatttgggctgaagacaaagatgactgcaggagtgggcaggccggagtggggcgccctggcctgtccccaggaaggaggaggagtctgcagccctgtgggcttcaacatccatcaaggagtccagagcaggagccaggccaggcgggagggaaaggccctgggaggggctctctaatctcccagccccgactctgccccgtcactgccactgctcctcattactcgctggggctgctgtcgcctccccgaagggtggccttgtccagatagcggcaaacctccctgccgtggatgagtcaggagcattttcttaagaggaacatcactggaaaacaaaatgagcggggacacagaaaccaacagcagtggctgcatttgtggtacaggctcctcttccagagctcgctgatgcccacctcagacaggcctgaccacggcacggctggtgggatttgccagtcacctcaaccagccagttccaccctcagcttctctcagaagggagcaccacactcctcaagctcagtgaatgtatcccggcatgggtggggccagagcctgtgatatctcgaggtgggctcggcaggacaccggggtgtggaagggggaagcgagcacctgactcagacagcgcgggagctcgcaggagtcacgaggccacagcgacttcattgtctgactgggcctggacctataaacttcccacctcagccttgggccaagcctggaagataaaaatggagcaccccatggcgcccctcactcagattctcccctgggcttctcccacgcagccccagaagaggacacaccagccccagagttagccccagaggcccctgagcctcctgaagagccccgcctaggagtgctgaccgtgaccgacacaaccccagactccatgcgcctctcgtggagcgtggcccagggcccctttgattccttcgtggtccagtatgaggacacgaacgggcagccccaggccttgctcgtggacggcgaccagagcaagatcctcatctcaggcctggagcccagcaccccctacaggttcctcctctatggcctccatgaagggaagcgcctggggcccctctcagctgagggcaccacagggctggctcctgctggtcagacctcagaggagtcaaggccccgcctgtcccagctgtctgtgactgacgtgaccaccagttcactgaggctcaactgggaggccccaccgggggccttcgactccttcctgctccgctttggggttccatcaccaagcactctggagccgcatccgcgtccactgctgcagcgcgagctgatggtgccggggacgcggcactcggccgtgctccgggacctgcgttccgggactctgtacagcctgacactgtatgggctgcgaggaccccacaaggccgacagcatccagggaaccgcccgcaccctcagcccagttctggagagcccccgtgacctccaattcagtgaaatcagggagacctcagccaaggtcaactggatgcccccaccatcccgggcggacagcttcaaagtctcctaccagctggcggacggaggggagcctcagagtgtgcaggtggatggccaggcccggacccagaaactccaggggctgatcccaggcgctcgctatgaggtgaccgtggtctcggtccgaggctttgaggagagtgagcctctcacaggcttcctcaccacggttcctgacggtcccacacagttgcgtgcactgaacttgaccgagggattcgccgtgctgcactggaagcccccccagaatcctgtggacacctatgacgtccaggtcacagcccctggggccccgcctctgcaggcggagaccccaggcagcgcggtggactaccccctgcatgaccttgtcctccacaccaactacaccgccacagtgcgtggcctgcggggccccaacctcacttccccagccagcatcaccttcaccacagggctagaggcccctcgggacttggaggccaaggaagtgaccccccgcaccgccctgctcacttggactgagcccccagtccggcccgcaggctacctgctcagcttccacacccctggtggacagaaccaggagatcctgctcccaggagggatcacatctcaccagctccttggcctctttccctccacctcctacaatgcacggctccaggccatgtggggccagagcctcctgccgcccgtgtccacctctttcaccacgggtgggctgcggatccccttccccagggactgcggggaggagatgcagaacggagccggtgcctccaggaccagcaccatcttcctcaacggcaaccgcgagcggcccctgaacgtgttttgcgacatggagactgatgggggcggctggctggtgttccagcgccgcatggatggacagacagacttctggagggactgggaggactatgcccatggttttgggaacatctctggagagttctggctgggcaatgaggccctgcacagcctgacacaggcaggtgactactccatgcgcgtggacctgcgggctggggacgaggctgtgttcgcccagtacgactccttccacgtagactcggctgcggagtactaccgcctccacttggagggctaccacggcaccgcaggggactccatgagctaccacagcggcagtgtcttctctgcccgtgatcgggaccccaacagcttgctcatctcctgcgctgtctcctaccgaggggcctggtggtacaggaactgccactacgccaacctcaacgggctctacgggagcacagtggaccatcagggagtgagctggtaccactggaagggcttcgagttctcggtgcccttcacggaaatgaagctgagaccaagaaactttcgctccccagcggggggaggctgagctgctgcccacctctctcgcaccccagtatgactgccgagcactgaggggtcgccccgagagaagagccagggtccttcaccacccagccgctggaggaagccttctctgccagcgatctcgcagcactgtgtttacaggggggaggggaggggttcgtacgggagcaataaaggagaaactgaggtacccgg

SEQ ID NO: 4099 - DNA, 1339 bp, Homo sapiens
  source 1..1339: mol_type = genomic DNA
tgtgcacagaagttatatacatatatgggtatatctatgtaacaaatcgcagcacaggagtcccctgggctccctcaggctctggtatgacatatttgagccatataaattcagcttctcctctggcatctgttagccgactcacttgcaactccacctcagcagtggtctctcagtcctctcaaagcaaggaaagagtactgtgtgctgagagaccatggcaaagaatcctccagagaattgtgaagactgtcacattctaaatgcagaagcttttaaatccaagaaaatatgtaaatcacttaagatttgtggactggtgtttggtatcctggccctaactctaattgtcctgttttgggggagcaagcacttctggccggaggtacccaaaaaagcctatgacatggagcacactttctacagcaatggagagaagaagaagatttacatggaaattgatcctgtgaccagaactgaaatattcagaagcggaaatggcactgatgaaacattggaagtgcacgactttaaaaacggatacactggcatctacttcgtgggtcttcaaaaatgttttatcaaaactcagattaaagtgattcctgaattttctgaaccagaagaggaaatagatgagaatgaagaaattaccacaactttctttgaacagtcagtgatttgggtcccagcagaaaagcctattgaaaaccgagattttcttaaaaattccaaaattctggagatttgtgataacgtgaccatgtattggatcaatcccactctaatatcagtttctgagttacaagactttgaggaggagggagaagatcttcactttcctgccaacgaaaaaaaagggattgaacaaaatgaacagtgggtggtccctcaagtgaaagtagagaagacccgtcacgccagacaagcaagtgaggaagaacttccaataaatgactatactgaaaatggaatagaatttgatcccatgctggatgagagaggttattgttgtatttactgccgtcgaggcaaccgctattgccgccgcgtctgtgaacctttactaggctactacccatatccatactgctaccaaggaggacgagtcatctgtcgtgtcatcatgccttgtaactggtgggtggcccgcatgctggggagggtctaataggaggtttgagctcaaatgcttaaactgctggcaacatataataaatgcatgctattcaatgaatttctgcctatgaggcatctggcccctggtagccagctctccagaattacttgtaggtaattcctctcttcatgttctaataaacttctacattatcaccaa

SEQ ID NO: 4100 - DNA, 1852 bp, Homo sapiens
  source 1..1852: mol_type = genomic DNA
ctcttaccgcccttttccggggcaagggaagctagtagcggagccggaagtgaggcaccctcgggctcgagacagcggcgacgtttaaagctgagcgacccagtgccactggagacggtcagcttctccactcaggctcctccagcccgagccagaagaccccctcccccagaattctgggggccgatggaagggagccgagtcagatcgcgaggtacccagagccgacagaccggagcgacagggagttgccagaagccccgcccctaggagtgatcggaaagcctcacccatccgggtgaggaacccggagggaccgcctccgggcggagcccgccgaccatggctacgcccctggtggcgggtcccgcagctctacgcttcgccgccgcggctagctggcaggttgtgcgcggacgctgcgtggaacattttccgcgagtactggagtttctgcgatctctgcgcgctgttgcccctggcttggttcgctaccggcaccacgaacgcctttgtatgggcctaaaggccaaggtggtggtggagctgatcctgcagggccggccttgggcccaagtcctgaaagccctgaatcaccactttccagaatctggacctatagtgcgggatcccaaggctacaaagcaggatctgaggaagattttggaggcacaggaaactttttaccagcaggtgaagcagctgtcagaggctcctgtggatttggcctcgaagctgcaggaacttgaacaagagtatggggaaccctttctggctgccatggaaaagctgctttttgagtacttgtgtcagctggagaaagcactgcctacaccgcaggcacagcagcttcaggatgtgctgagttggatgcagcctggagtctctatcacctcttctcttgcctggagacaatatggtgtggacatggggtggctgcttccagagtgctctgttactgactcagtgaacctggctgagcccatggaacagaatcctcctcagcaacaaagactagcactccacaatcccctgccaaaagccaagcctggcacacatcttcctcagggaccatcttcaaggacgcacccagaacctctagctggccgacacttcaatctggcccctctaggccgacgaagagttcagtcccaatgggcctccactaggggaggccataaggagcgccccacagtcatgctgtttccctttaggaatctcggctcaccaacccaggtcatatctaagcctgagagcaaggaagaacatgcgatatacacagcagacctagccatgggcacaagagcagcctccactgggaagtctaagagtccatgccagaccctggggggaagggctctgaaggagaacccagttgacttgcctgccacagagcaaaaggagaattgcttggattgctacatggaccccctgagactatcattattacctcctagggccaggaagccagtgtgtcctccgtctctgtgcagctccgtcattaccataggggacttggttttagactctgatgaggaagaaaatggccagggggaaggaaaggaatctctggaaaactatcagaagacaaagtttgacaccttgatacccactctctgtgaatacctacccccttctggccacggtgccatacctgtttcttcctgtgactgtagagacagttctagacctttgtgatagaactaaaatgctctctgtactctagtctcctgcctcctcagctctgcaagtagtttagtaggaatgaagtggaagtccaggcttggattgcctaactacactgctaaaaatatttgtaatccttaataattaaactttggatttgttaaaa

SEQ ID NO: 4101 - DNA, 2168 bp, Homo sapiens
  source 1..2168: mol_type = genomic DNA
cttttccggggcaagggaagctagtagcggagccggaagtgaggcaccctcgggctcgagacagcggcgacgtttaaagctgagcgacccagtgccactggagacggtcagcttctccactcaggctcctccagcccgagccagaagaccccctcccccagaattctgggggccgatggaagggagccgagtcagatcgcgaggtacccagagccgacagaccggagcgacagggagttgccagaagccccgcccctaggagtgatcggaaagcctcacccatccgggtgaggaacccggagggaccgcctccgggcggagcccgccgaccatggctacgcccctggtggcgggtcccgcagctctacgcttcgccgccgcggctagctggcaggttgtgcgcggacgctgcgtggaacattttccgcgagtactggagtttctgcgatctctgcgcgctgttgcccctggcttggttcgctaccggcaccacgaacgcctttgtatgggcctaaaggccaaggtggtggtggagctgatcctgcagggccggccttgggcccaagtcctgaaagccctgaatcaccactttccagaatctggacctatagtgcgggatcccaaggctacaaagcaggatctgaggaagattttggaggcacaggaaactttttaccagcaggtgaagcagctgtcagaggctcctgtggatttggcctcgaagctgcaggaacttgaacaagagtatggggaaccctttctggctgccatggaaaagctgctttttgagtacttgtgtcagctggagaaagcactgcctacaccgcaggcacagcagcttcaggatgtgctgagttggatgcagcctggagtctctatcacctcttctcttgcctggagacaatatggtgtggacatggggtggctgcttccagagtgctctgttactgactcagtgaacctggctgagcccatggaacagaatcctcctcagcaacaaagactagcactccacaatcccctgccaaaagccaagcctggcacacatcttcctcagggaccatcttcaaggacgcacccagaacctctagctggccgacacttcaatctggcccctctaggccgacgaagagttcagtcccaatgggcctccactaggggaggccataaggagcgccccacagtcatgctgtttccctttaggaatctcggctcaccaacccaggtcatatctaagcctgagagcaaggaagaacatgcgatatacacagcagacctagccatgggcacaagagcagcctccactgggaagtctaagagtccatgccagaccctggggggaagggctctgaaggagaacccagttgacttgcctgccacagagcaaaaggagtgagtggaacagagttgcttcttactaggagcacattctttgcctgccttcccttcatcctatcctctttgcttgctctcacctcaggaattgcttggattgctacatggaccccctgagactatcattattacctcctagggccaggaagccaggtaggtagtctgagtcaggattggatcaacagcctcctctcttggggactctcaagagcctgtgttcatctagaagtagtagtttgattctggtttccctcctacagtgtgtcctccgtctctgtgcagctccgtcattaccataggggacttggttttagactctgatgaggaagaaaatggccagggggaaggaaaggtgagtgggaaggagcagaaagctgggaaaggggatgggtagaacaagactgagaaatccacatgcttcagaattcagagggttcagggaatggtttcggatagtaggctctccctgctcccttctctacaggaatctctggaaaactatcagaagacaaagtttgacaccttgatacccactctctgtgaatacctacccccttctggccacggtgccatacctgtttcttcctgtgactgtagagacagttctagacctttgtgatagaactaaaatgctctctgtactctagtctcctgcctcctcagctctgcaagtagtttagtaggaatgaagtggaagtccaggcttggattgcctaactacactgctaaaaatatttgtaatccttaataattaaactttggatttgttaaaa

SEQ ID NO: 4102 - DNA, 1861 bp, Homo sapiens
  source 1..1861: mol_type = genomic DNA
cgagacagcggcgacgtttaaagctgagcgacccagtgccactggagacggtcagcttctccactcaggctcctccagcccgagccagaagaccccctcccccagaattctgggggccgatggaagggagccgagtcagatcgcgaggtacccagagccgacagaccggagcgacagggagttgccagaagccccgcccctaggagtgatcggaaagcctcacccatccgggtgaggaacccggagggaccgcctccgggcggagcccgccgaccatggctacgcccctggtggcgggtcccgcagctctacgcttcgccgccgcggctagctggcaggttgtgcgcggacgctgcgtggaacattttccgcgagtactggagtttctgcgatctctgcgcgctgttgcccctggcttggttcgctaccggcaccacgaacgcctttgtatgggcctaaaggccaaggtggtggtggagctgatcctgcagggccggccttgggcccaagtcctgaaagccctgaatcaccactttccagaatctggacctatagtgcgggatcccaaggctacaaagcaggatctgaggaagattttggaggcacaggaaactttttaccagcaggtgaagcagctgtcagaggctcctgtggatttggcctcgaagctgcagagtgctctgttactgactcagtgaacctggctgagcccatggaacagaatcctcctcagcaacaaagactagcactccacaatcccctgccaaaagccaagcctggcacacatcttcctcagggaccatcttcaaggacgcacccagaacctctagctggccgacacttcaatctggcccctctaggccgacgaagagttcagtcccaatgggcctccactaggggaggccataaggagcgccccacagtcatgctgtttccctttaggaatctcggctcaccaacccaggtcatatctaagcctgagagcaaggaagaacatgcgatatacacagcagacctagccatgggcacaagagcagcctccactgggaagtctaagagtccatgccagaccctggggggaagggctctgaaggagaacccagttgacttgcctgccacagagcaaaaggagtgagtggaacagagttgcttcttactaggagcacattctttgcctgccttcccttcatcctatcctctttgcttgctctcacctcaggaattgcttggattgctacatggaccccctgagactatcattattacctcctagggccaggaagccaggtaggtagtctgagtcaggattggatcaacagcctcctctcttggggactctcaagagcctgtgttcatctagaagtagtagtttgattctggtttccctcctacagtgtgtcctccgtctctgtgcagctccgtcattaccataggggacttggttttagactctgatgaggaagaaaatggccagggggaaggaaaggtgagtgggaaggagcagaaagctgggaaaggggatgggtagaacaagactgagaaatccacatgcttcagaattcagagggttcagggaatggtttcggatagtaggctctccctgctcccttctctacaggaatctctggaaaactatcagaagacaaagtttgacaccttgatacccactctctgtgaatacctacccccttctggccacggtgccatacctgtttcttcctgtgactgtagagacagttctagacctttgtgatagaactaaaatgctctctgtactctagtctcctgcctcctcagctctgcaagtagtttagtaggaatgaagtggaagtccaggcttggattgcctaactacactgct

SEQ ID NO: 4103 - DNA, 1674 bp, Homo sapiens
  source 1..1674: mol_type = genomic DNA
agacagcggcgacgtttaaagctgagcgacccagtgccactggagacggtcagcttctccactcaggctcctccagcccgagccagaagaccccctcccccagaattctgggggccgatggaagggagccgagtcagatcgcgaggtacccagagccgacagaccggagcgacagggagttgccagaagccccgcccctaggagtgatcggaaagcctcacccatccgggtgaggaacccggagggaccgcctccgggcggagcccgccgaccatggctacgcccctggtggcgggtcccgcagctctacgcttcgccgccgcggctagctggcaggttgtgcgcggacgctgcgtggaacattttccgcgagtactggagtttctgcgatctctgcgcgctgttgcccctggcttggttcgctaccggcaccacgaacgcctttgtatgggcctaaaggccaagacaaagcaggatctgaggaagattttggaggcacaggaaactttttaccagcaggtgaagcagctgtcagaggctcctgtggatttggcctcgaagctgcaggaacttgaacaagagtatggggaaccctttctggctgccatggaaaagctgctttttgagtacttgtgtcagctggagaaagcactgcctacaccgcaggcacagcagcttcaggatgtgctgagttggatgcagcctggagtctctatcacctcttctcttgcctggagacaatatggtgtggacatggggtggctgcttccagagtgctctgttactgactcagtgaacctggctgagcccatggaacagaatcctcctcagcaacaaagactagcactccacaatcccctgccaaaagccaagcctggcacacatcttcctcagggaccatcttcaaggacgcacccagaacctctagctggccgacacttcaatctggcccctctaggccgacgaagagttcagtcccaatgggcctccactaggggaggccataaggagcgccccacagtcatgctgtttccctttaggaatctcggctcaccaacccaggtcatatctaagcctgagagcaaggaagaacatgcgatatacacagcagacctagccatgggcacaagagcagcctccactgggaagtctaagagtccatgccagaccctggggggaagggctctgaaggagaacccagttgacttgcctgccacagagcaaaaggagaattgcttggattgctacatggaccccctgagactatcattattacctcctagggccaggaagccagtgtgtcctccgtctctgtgcagctccgtcattaccataggggacttggttttagactctgatgaggaagaaaatggccagggggaaggaaaggaatctctggaaaactatcagaagacaaagtttgacaccttgatacccactctctgtgaatacctacccccttctggccacggtgccatacctgtttcttcctgtgactgtagagacagttctagacctttgtgatagaactaaaatgctctctgtactctagtctcctgcctcctcagctctgcaagtagtttagtaggaatgaagtggaagtccaggcttggattgcctaactacactgctaaaaatatttgtaatccttaataattaaactttggatttgtt

SEQ ID NO: 4104 - DNA, 9233 bp, Homo sapiens
  source 1..9233: mol_type = genomic DNA
aaacagaaggtgggccggggcggggagaaacagaactcggtcaatttcccagtttgtcgggtctttaaaaatacaggcccctaaagcactaagggcatgccctcggtgaaacaggggagcgcttctgctgaatgagattaaagcgacagaaaagggaaaggagagcgcgggcaacgggatctaaagggagatagagacgcgggcctctgagggctggcaaacattcagcagcacaccctctcaagattgtttacttgcctttgctcctgttgagttacaacgcttggaagcaggagatgggctcagcagcagccaataggacatgatccaggaagagcagtaagggactgagctgctgaattcaactagagggcagccttgtggatggccccgaagcaagcctgatggaacaggatagaaccaaccatgttgagggcaacagactaagtccattcctgataccatcacctcccatttgccagacagaacctctggctacaaagctccagaatggaagcccactgcctgagagagctcatccagaagtaaatggagacaccaagtggcactctttcaaaagttattatggaataccctgtatgaagggaagccagaatagtcgtgtgagtcctgactttacacaagaaagtagagggtattccaagtgtttgcaaaatggaggaataaaacgcacagttagtgaaccttctctctctgggctccttcagatcaagaaattgaaacaagaccaaaaggctaatggagaaagacgtaacttcggggtaagccaagaaagaaatccaggtgaaagcagtcaaccaaatgtctccgatttgagtgataagaaagaatctgtgagttctgtagcccaagaaaatgcagttaaagatttcaccagtttttcaacacataactgcagtgggcctgaaaatccagagcttcagattctgaatgagcaggaggggaaaagtgctaattaccatgacaagaacattgtattacttaaaaacaaggcagtgctaatgcctaatggtgctacagtttctgcctcttccgtggaacacacacatggtgaactcctggaaaaaacactgtctcaatattatccagattgtgtttccattgcggtgcagaaaaccacatctcacataaatgccattaacagtcaggctactaatgagttgtcctgtgagatcactcacccatcgcatacctcagggcagatcaattccgcacagacctctaactctgagctgcctccaaagccagctgcagtggtgagtgaggcctgtgatgctgatgatgctgataatgccagtaaactagctgcaatgctaaatacctgttcctttcagaaaccagaacaactacaacaacaaaaatcagtttttgagatatgcccatctcctgcagaaaataacatccagggaaccacaaagctagcgtctggtgaagaattctgttcaggttccagcagcaatttgcaagctcctggtggcagctctgaacggtatttaaaacaaaatgaaatgaatggtgcttacttcaagcaaagctcagtgttcactaaggattccttttctgccactaccacaccaccaccaccatcacaattgcttctttctccccctcctcctcttccacaggttcctcagcttccttcagaaggaaaaagcactctgaatggtggagttttagaagaacaccaccactaccccaaccaaagtaacacaacacttttaagggaagtgaaaatagagggtaaacctgaggcaccaccttcccagagtcctaatccatctacacatgtatgcagcccttctccgatgctttctgaaaggcctcagaataattgtgtgaacaggaatgacatacagactgcagggacaatgactgttccattgtgttctgagaaaacaagaccaatgtcagaacacctcaagcataacccaccaatttttggtagcagtggagagctacaggacaactgccagcagttgatgagaaacaaagagcaagagattctgaagggtcgagacaaggagcaaacacgagatcttgtgcccccaacacagcactatctgaaaccaggatggattgaattgaaggcccctcgttttcaccaagcggaatcccatctaaaacgtaatgaggcatcactgccatcaattcttcagtatcaacccaatctctccaatcaaatgacctccaaacaatacactggaaattccaacatgcctggggggctcccaaggcaagcttacacccagaaaacaacacagctggagcacaagtcacaaatgtaccaagttgaaatgaatcaagggcagtcccaaggtacagtggaccaacatctccagttccaaaaaccctcacaccaggtgcacttctccaaaacagaccatttaccaaaagctcatgtgcagtcactgtgtggcactagatttcattttcaacaaagagcagattcccaaactgaaaaacttatgtccccagtgttgaaacagcacttgaatcaacaggcttcagagactgagccattttcaaactcacaccttttgcaacataagcctcataaacaggcagcacaaacacaaccatcccagagttcacatctccctcaaaaccagcaacagcagcaaaaattacaaataaagaataaagaggaaatactccagacttttcctcacccccaaagcaacaatgatcagcaaagagaaggatcattctttggccagactaaagtggaagaatgttttcatggtgaaaatcagtattcaaaatcaagcgagttcgagactcataatgtccaaatgggactggaggaagtacagaatataaatcgtagaaattccccttatagtcagaccatgaaatcaagtgcatgcaaaatacaggtttcttgttcaaacaatacacacctagtttcagagaataaagaacagactacacatcctgaactttttgcaggaaacaagacccaaaacttgcatcacatgcaatattttccaaataatgtgatcccaaagcaagatcttcttcacaggtgctttcaagaacaggagcagaagtcacaacaagcttcagttctacagggatataaaaatagaaaccaagatatgtctggtcaacaagctgcgcaacttgctcagcaaaggtacttgatacataaccatgcaaatgtttttcctgtgcctgaccagggaggaagtcacactcagacccctccccagaaggacactcaaaagcatgctgctctaaggtggcatctcttacagaagcaagaacagcagcaaacacagcaaccccaaactgagtcttgccatagtcagatgcacaggccaattaaggtggaacctggatgcaagccacatgcctgtatgcacacagcaccaccagaaaacaaaacatggaaaaaggtaactaagcaagagaatccacctgcaagctgtgataatgtgcagcaaaagagcatcattgagaccatggagcagcatctgaagcagtttcacgccaagtcgttatttgaccataaggctcttactctcaaatcacagaagcaagtaaaagttgaaatgtcagggccagtcacagttttgactagacaaaccactgctgcagaacttgatagccacaccccagctttagagcagcaaacaacttcttcagaaaagacaccaaccaaaagaacagctgcttctgttctcaataattttatagagtcaccttccaaattactagatactcctataaaaaatttattggatacacctgtcaagactcaatatgatttcccatcttgcagatgtgtaggtaagtgccagaaatgtactgagacacatggcgtttatccagaattagcaaatttatcttcagatatgggattttccttctttttttaaatcttgagtctggcagcaatttgtaaaggctcataaaaatctgaagcttacattttttgtcaagttaccgatgcttgtgtcttgtgaaagagaacttcacttacatgcagtttttccaaaagaattaaataatcgtgcatgtttatttttccctctcttcagatcctgtaaaatttgaatgtatctgttttagatcaattcgcctatttagctctttgtatattatctcctggagagacagctaggcagcaaaaaaacaatctattaaaatgagaaaataacgaccataggcagtctaatgtacgaactttaaatattttttaattcaaggtaaaatatattagtttcacaagatttctggctaatagggaaattattatcttcagtcttcatgagttgggggaaatgataatgctgacactcttagtgctcctaaagtttccttttctccatttatacatttggaatgttgtgatttatattcattttgattcccttttctctaaaatttcatctttttgattaaaaaatatgatacaggcatacctcagagatattgtgggtttggctccataccacaataaaatgaatattacaataaagcaagttgtaaggactttttggtttctcactgtatgtaaaagttatttatatactatactgtaacatactaagtgtgcaatagcattgtgtctaaaaaatatatactttaaaaataatttattgttaaaaaaatgccaacaattatctgggcctttagtgagtgctaatctttttgctggtggagggtcgtgcttcagtattgatcgctgtggactgatcatggtggtagttgctgaaggttgctgggatggctgtgtgtgtggcaatttcttaaaataagacaacagtgaagtgctgtatcaattgatttttccattcacaaaagatttctctgtagcatgcaatgctgtttgatagcatttaacccacagcagaatttctttgaaaattggactcagtcctctcaaactgtgctgctgctttatcaactaagtttttgtaattttctgaatcctttgttgtcatttcagcagtttacagcatcttcattggaagtatattccatctcaaacattctttgttcatccataagaagcaacttcttatcaagttttttcatgacattgcagtaactcagccccatcttcaggctctacttctaattctggttctcttgctacatctccctcatctgcagtgacctctccacggaagtcttgaactcctcaaagtaatccatgagggttggaatcaacttctaaactcctgttaatgttgatatattgaccccctcccatgaattatgaatgttcttaataacttctaaatggtgatacctttccagaaggctttcaatgtactttgcccggatccatcagaagactatcttggcagctgtagactaacaatatatttcttaaatgataagacttgaaagtcaaaagtactccttaatccataggctgcagaatcaatgttgtattaacaggcacgaaaacagcattaatcttgtgcatctccatcggagctcttgggtgactaggtgccttgagcagtaatattttgaaaggaggttttggttttgttttttgttttttttttttgttttttagcagtaagtctcaacactgggcttaaaatattcagtaaactatgttgtaaaaagatgtgttatcatccagactttgttgttccattactctacacaagcagggtacacttagcataattcttaagggccttggaattttcagaatggtaaatgagtatgggcttcaacttaaaatcatcaactgcattagcctgtaacaagagagtcagcctgtcctttgaagcaaggcattgacttctatctatgaaagtcttagatggcaccttgtttcaatagtaggctgtttagtacagccaccttcatcagtgatcttagctagatcttctgcataacttgctgcagcttctacatcagcacttgctgcctcaccttgtccttttatgttatagagacagctgcgcttcttaaactttataaaccaacttctgctagcttccaacttctcttctgcagcttcctcattctcttcatagaactgaagggagtcaaggccttgctctggattaagctttggcttaaggaatgttgtggctgacgtgatcttctatccagaccactaaagcgctctccatatcagcaataaggccgttttgctttcttacctttcatgtgttcactggagtaatttccttcaagaatttttcctttacattcacaacttggctaactggcatgcaaggcctagctttcagcctgtcttggcttttgacatgccttcctcacttagctcgtcatatctagcttttgatttaaagtggcaggcatacaactcttcctttcacttgaacacttagaggccactgtagggttattaattggcctaatttcaatattgttgtgttttagggaatagagaggcccagggagagggagagagcccaaacggctggttgatagagcaggcagaatgcacacaacatttatcagattatgtttgcaccatttaccagattatgggtacggtttgtggcaccccccaaaaattagaatagtaacatcaaagatcactgatcacagatcgccataacataaataataataaactttaaaatactgtgagaattaccaaaatgtgatacagagacatgaagtgagcacatgctgttgaaaaaaatgacactgatagacatacttaacacgtgggattgccacaaaccttcagtttgtaaaagtcacagtaactgtgactcacaaaagaacaaagcacaataaaacgaggtatgcctgtatttttaaaaaaagctttttgttaaaattcaggatatgtaataggtctgtaggaatagtgaaatatttttgctgatggatgtagatatatacgtggatagagatgaagatcttaattatagctatgcagcatagatttagtcaaagacatttgaaaagacaaatgttaaattagtgtggctaatgacctacccgtgccatgttttccctcttgcaatgagataccccacactgtgtagaaggatggagggaggactcctactgtccctctttgcgtgtggttattaagttgcctcactgggctaaaacaccacacatctcatagataatatttggtaagttgtaatcgtcttcactcttctcttatcacccacccctatcttcccacttttccatctttgttggtttgcaacagccccttctttttgcctgactctccaggattttctctcatcataaattgttctaaagtacatactaatatgggtctggattgactattcttatttgcaaaacagcaattaaatgttatagggaagtaggaagaaaaaggggtatccttgacaataaaccaagcaatattctgggggtgggatagagcaggaaattttatttttaatcttttaaaatccaagtaataggtaggcttccagttagctttaaatgttttttttttccagctcaaaaaattggattgtagttgatactacatataatacattctaattccctcactgtattctttgtttagtttcatttatttggtttaaaataattttttatcccatatctgaaatgtaatatatttttatccaacaaccagcatgtacatatacttaattatgtggcacattttctaatagatcagtccatcaatctactcattttaaagaaaaaaaaattttaaagtcacttttagagcccttaatgtgtagttgggggttaagctttgtggatgtagcctttatatttagtataattgaggtctaaaataataatcttctattatctcaacagagcaaattattgaaaaagatgaaggtcctttttatacccatctaggagcaggtcctaatgtggcagctattagagaaatcatggaagaaaggtaattaacgcaaaggcacagggcagattaacgtttatccttttgtatatgtcagaatttttccagccttcacacacaaagcagtaaacaattgtaaattgagtaattattagtaggcttagctattctagggttgccaacactacacactgtgctattcaccagagagtcacaatatttgacaggactaatagtctgctagctggcacaggctgcccactttgcgatggatgccagaaaacccaggcatgaacaggaatcggccagccaggctgccagccacaaggtactggcacaggctccaacgagaggtcccactctggctttcccacctgataataaagtgtcaaagcagaaagactggtaaagtgtggtataagaaaagaaccactgaattaaattcacctagtgttgcaaatgagtacttatctctaagttttcttttaccataaaaagagagcaagtgtgatatgttgaatagaaagagaaacatactatttacagctgcctttttttttttttttcgctatcaatcacaggtatacaagtacttgcctttactcctgcatgtagaagactcttatgagcgagataatgcagagaaggcctttcatataaatttatacagctctgagctgttcttcttctagggtgccttttcattaagaggtaggcagtattattattaaagtacttaggatacattggggcagctaggacatattcagtatcattcttgctccatttccaaattattcatttctaaattagcatgtagaagttcactaaataatcatctagtggcctggcagaaatagtgaatttccctaagtgccttttttttgttgtttttttgttttgttttttaaacaagcagtaggtggtgctttggtcataagggaagatatagtctatttctaggactattccatattttccatgtggctggatactaactatttgccagcctccttttctaaattgtgagacattcttggaggaacagttctaactaaaatctattatgactccccaagttttaaaatagctaaatttagtaagggaaaaaatagtttatgttttagaagactgaacttagcaaactaacctgaattttgtgctttgtgaaattttatatcgaaatgagctttcccattttcacccacatgtaatttacaaaatagttcattacaattatctgtacattttgatattgaggaaaaacaaggcttaaaaaccattatccagtttgcttggcgtagacctgtttaaaaaataataaaccgttcatttctcaggatgtggtcatagaataaagttatgctcaaatgttcaaatattt

SEQ ID NO: 4105 - DNA, 9679 bp, Homo sapiens
  source 1..9679: mol_type = genomic DNA
gcggccgccccgagacgccggccccgctgagtgatgagaacagacgtcaaactgccttatgaatattgatgcggaggctaggctgctttcgtagagaagcagaaggaagcaagatggctgccctttaggatttgttagaaaggagacccgactgcaactgctggattgctgcaaggctgagggacgagaacgaggctggcaaacattcagcagcacaccctctcaagattgtttacttgcctttgctcctgttgagttacaacgcttggaagcaggagatgggctcagcagcagccaataggacatgatccaggaagagcagtaagggactgagctgctgaattcaactagagggcagccttgtggatggccccgaagcaagcctgatggaacaggatagaaccaaccatgttgagggcaacagactaagtccattcctgataccatcacctcccatttgccagacagaacctctggctacaaagctccagaatggaagcccactgcctgagagagctcatccagaagtaaatggagacaccaagtggcactctttcaaaagttattatggaataccctgtatgaagggaagccagaatagtcgtgtgagtcctgactttacacaagaaagtagagggtattccaagtgtttgcaaaatggaggaataaaacgcacagttagtgaaccttctctctctgggctccttcagatcaagaaattgaaacaagaccaaaaggctaatggagaaagacgtaacttcggggtaagccaagaaagaaatccaggtgaaagcagtcaaccaaatgtctccgatttgagtgataagaaagaatctgtgagttctgtagcccaagaaaatgcagttaaagatttcaccagtttttcaacacataactgcagtgggcctgaaaatccagagcttcagattctgaatgagcaggaggggaaaagtgctaattaccatgacaagaacattgtattacttaaaaacaaggcagtgctaatgcctaatggtgctacagtttctgcctcttccgtggaacacacacatggtgaactcctggaaaaaacactgtctcaatattatccagattgtgtttccattgcggtgcagaaaaccacatctcacataaatgccattaacagtcaggctactaatgagttgtcctgtgagatcactcacccatcgcatacctcagggcagatcaattccgcacagacctctaactctgagctgcctccaaagccagctgcagtggtgagtgaggcctgtgatgctgatgatgctgataatgccagtaaactagctgcaatgctaaatacctgttcctttcagaaaccagaacaactacaacaacaaaaatcagtttttgagatatgcccatctcctgcagaaaataacatccagggaaccacaaagctagcgtctggtgaagaattctgttcaggttccagcagcaatttgcaagctcctggtggcagctctgaacggtatttaaaacaaaatgaaatgaatggtgcttacttcaagcaaagctcagtgttcactaaggattccttttctgccactaccacaccaccaccaccatcacaattgcttctttctccccctcctcctcttccacaggttcctcagcttccttcagaaggaaaaagcactctgaatggtggagttttagaagaacaccaccactaccccaaccaaagtaacacaacacttttaagggaagtgaaaatagagggtaaacctgaggcaccaccttcccagagtcctaatccatctacacatgtatgcagcccttctccgatgctttctgaaaggcctcagaataattgtgtgaacaggaatgacatacagactgcagggacaatgactgttccattgtgttctgagaaaacaagaccaatgtcagaacacctcaagcataacccaccaatttttggtagcagtggagagctacaggacaactgccagcagttgatgagaaacaaagagcaagagattctgaagggtcgagacaaggagcaaacacgagatcttgtgcccccaacacagcactatctgaaaccaggatggattgaattgaaggcccctcgttttcaccaagcggaatcccatctaaaacgtaatgaggcatcactgccatcaattcttcagtatcaacccaatctctccaatcaaatgacctccaaacaatacactggaaattccaacatgcctggggggctcccaaggcaagcttacacccagaaaacaacacagctggagcacaagtcacaaatgtaccaagttgaaatgaatcaagggcagtcccaaggtacagtggaccaacatctccagttccaaaaaccctcacaccaggtgcacttctccaaaacagaccatttaccaaaagctcatgtgcagtcactgtgtggcactagatttcattttcaacaaagagcagattcccaaactgaaaaacttatgtccccagtgttgaaacagcacttgaatcaacaggcttcagagactgagccattttcaaactcacaccttttgcaacataagcctcataaacaggcagcacaaacacaaccatcccagagttcacatctccctcaaaaccagcaacagcagcaaaaattacaaataaagaataaagaggaaatactccagacttttcctcacccccaaagcaacaatgatcagcaaagagaaggatcattctttggccagactaaagtggaagaatgttttcatggtgaaaatcagtattcaaaatcaagcgagttcgagactcataatgtccaaatgggactggaggaagtacagaatataaatcgtagaaattccccttatagtcagaccatgaaatcaagtgcatgcaaaatacaggtttcttgttcaaacaatacacacctagtttcagagaataaagaacagactacacatcctgaactttttgcaggaaacaagacccaaaacttgcatcacatgcaatattttccaaataatgtgatcccaaagcaagatcttcttcacaggtgctttcaagaacaggagcagaagtcacaacaagcttcagttctacagggatataaaaatagaaaccaagatatgtctggtcaacaagctgcgcaacttgctcagcaaaggtacttgatacataaccatgcaaatgtttttcctgtgcctgaccagggaggaagtcacactcagacccctccccagaaggacactcaaaagcatgctgctctaaggtggcatctcttacagaagcaagaacagcagcaaacacagcaaccccaaactgagtcttgccatagtcagatgcacaggccaattaaggtggaacctggatgcaagccacatgcctgtatgcacacagcaccaccagaaaacaaaacatggaaaaaggtaactaagcaagagaatccacctgcaagctgtgataatgtgcagcaaaagagcatcattgagaccatggagcagcatctgaagcagtttcacgccaagtcgttatttgaccataaggctcttactctcaaatcacagaagcaagtaaaagttgaaatgtcagggccagtcacagttttgactagacaaaccactgctgcagaacttgatagccacaccccagctttagagcagcaaacaacttcttcagaaaagacaccaaccaaaagaacagctgcttctgttctcaataattttatagagtcaccttccaaattactagatactcctataaaaaatttattggatacacctgtcaagactcaatatgatttcccatcttgcagatgtgtagagcaaattattgaaaaagatgaaggtcctttttatacccatctaggagcaggtcctaatgtggcagctattagagaaatcatggaagaaaggtttggacagaagggtaaagctattaggattgaaagagtcatctatactggtaaagaaggcaaaagttctcagggatgtcctattgctaagtgggtggttcgcagaagcagcagtgaagagaagctactgtgtttggtgcgggagcgagctggccacacctgtgaggctgcagtgattgtgattctcatcctggtgtgggaaggaatcccgctgtctctggctgacaaactctactcggagcttaccgagacgctgaggaaatacggcacgctcaccaatcgccggtgtgccttgaatgaagagagaacttgcgcctgtcaggggctggatccagaaacctgtggtgcctccttctcttttggttgttcatggagcatgtactacaatggatgtaagtttgccagaagcaagatcccaaggaagtttaagctgcttggggatgacccaaaagaggaagagaaactggagtctcatttgcaaaacctgtccactcttatggcaccaacatataagaaacttgcacctgatgcatataataatcagattgaatatgaacacagagcaccagagtgccgtctgggtctgaaggaaggccgtccattctcaggggtcactgcatgtttggacttctgtgctcatgcccacagagacttgcacaacatgcagaatggcagcacattggtatgcactctcactagagaagacaatcgagaatttggaggaaaacctgaggatgagcagcttcacgttctgcctttatacaaagtctctgacgtggatgagtttgggagtgtggaagctcaggaggagaaaaaacggagtggtgccattcaggtactgagttcttttcggcgaaaagtcaggatgttagcagagccagtcaagacttgccgacaaaggaaactagaagccaagaaagctgcagctgaaaagctttcctccctggagaacagctcaaataaaaatgaaaaggaaaagtcagccccatcacgtacaaaacaaactgaaaacgcaagccaggctaaacagttggcagaacttttgcgactttcaggaccagtcatgcagcagtcccagcagccccagcctctacagaagcagccaccacagccccagcagcagcagagaccccagcagcagcagccacatcaccctcagacagagtctgtcaactcttattctgcttctggatccaccaatccatacatgagacggcccaatccagttagtccttatccaaactcttcacacacttcagatatctatggaagcaccagccctatgaacttctattccacctcatctcaagctgcaggttcatatttgaattcttctaatcccatgaacccttaccctgggcttttgaatcagaatacccaatatccatcatatcaatgcaatggaaacctatcagtggacaactgctccccatatctgggttcctattctccccagtctcagccgatggatctgtataggtatccaagccaagaccctctgtctaagctcagtctaccacccatccatacactttaccagccaaggtttggaaatagccagagttttacatctaaatacttaggttatggaaaccaaaatatgcagggagatggtttcagcagttgtaccattagaccaaatgtacatcatgtagggaaattgcctccttatcccactcatgagatggatggccacttcatgggagccacctctagattaccacccaatctgagcaatccaaacatggactataaaaatggtgaacatcattcaccttctcacataatccataactacagtgcagctccgggcatgttcaacagctctcttcatgccctgcatctccaaaacaaggagaatgacatgctttcccacacagctaatgggttatcaaagatgcttccagctcttaaccatgatagaactgcttgtgtccaaggaggcttacacaaattaagtgatgctaatggtcaggaaaagcagccattggcactagtccagggtgtggcttctggtgcagaggacaacgatgaggtctggtcagacagcgagcagagctttctggatcctgacattgggggagtggccgtggctccaactcatgggtcaattctcattgagtgtgcaaagcgtgagctgcatgccacaacccctttaaagaatcccaataggaatcaccccaccaggatctccctcgtcttttaccagcataagagcatgaatgagccaaaacatggcttggctctttgggaagccaaaatggctgaaaaagcccgtgagaaagaggaagagtgtgaaaagtatggcccagactatgtgcctcagaaatcccatggcaaaaaagtgaaacgggagcctgctgagccacatgaaacttcagagcccacttacctgcgtttcatcaagtctcttgccgaaaggaccatgtccgtgaccacagactccacagtaactacatctccatatgccttcactcgggtcacagggccttacaacagatatatatgatatcacccccttttgttggttacctcacttgaaaagaccacaaccaacctgtcagtagtatagttctcatgacgtgggcagtggggaaaggtcacagtattcatgacaaatgtggtgggaaaaacctcagctcaccagcaacaaaagaggttatcttaccatagcacttaattttcactggctcccaagtggtcacagatggcatctaggaaaagaccaaagcattctatgcaaaaagaaggtggggaagaaagtgttccgcaatttacatttttaaacactggttctattattggacgagatgatatgtaaatgtgatcccccccccccgcttacaactctacacatctgtgaccacttttaataatatcaagtttgcatagtcatggaacacaaatcaaacaagtactgtagtattacagtgacaggaatcttaaaataccatctggtgctgaatatatgatgtactgaaatactggaattatggctttttgaaatgcagtttttactgtaatcttaacttttatttatcaaaatagctacaggaaacatgaatagcaggaaaacactgaatttgtttggatgttctaagaaatggtgctaagaaaatggtgtctttaatagctaaaaatttaatgcctttatatcatcaagatgctatcagtgtactccagtgcccttgaataataggggtaccttttcattcaagtttttatcataattacctattcttacacaagcttagtttttaaaatgtggacattttaaaggcctctggattttgctcatccagtgaagtccttgtaggacaataaacgtatatatgtacatatatacacaaacatgtatatgtgcacacacatgtatatgtataaatattttaaatggtgttttagaagcactttgtctacctaagctttgacaacttgaacaatgctaaggtactgagatgtttaaaaaacaagtttactttcattttagaatgcaaagttgatttttttaaggaaacaaagaaagcttttaaaatatttttgcttttagccatgcatctgctgatgagcaattgtgtccatttttaacacagccagttaaatccaccatggggcttactggattcaagggaatacgttagtccacaaaacatgttttctggtgctcatctcacatgctatactgtaaaacagttttatacaaaattgtatgacaagttcattgctcaaaaatgtacagttttaagaattttctattaactgcaggtaataattagctgcatgctgcagactcaacaaagctagttcactgaagcctatgctattttatggatcataggctcttcagagaactgaatggcagtctgcctttgtgttgataattatgtacattgtgacgttgtcatttcttagcttaagtgtcctctttaacaagaggattgagcagactgatgcctgcataagatgaataaacagggttagttccatgtgaatctgtcagttaaaaagaaacaaaaacaggcagctggtttgctgtggtggttttaaatcattaatttgtataaagaagtgaaagagttgtatagtaaattaaattgtaaacaaaacttttttaatgcaatgctttagtattttagtactgtaaaaaaattaaatatatacatatatatatatatatatatatatatatatatgagtttgaagcagaattcacatcatgatggtgctactcagcctgctacaaatatatcataatgtgagctaagaattcattaaatgtttgagtgatgttcctacttgtcatatacctcaacactagtttggcaataggatattgaactgagagtgaaagcattgtgtaccatcatttttttccaagtccttttttttattgttaaaaaaaaaagcataccttttttcaatacttgatttcttagcaagtataacttgaacttcaacctttttgttctaaaaattcagggatatttcagctcatgctctccctatgccaacatgtcacctgtgtttatgtaaaattgttgtaggttaataaatatattctttgtcagggatttaacccttttattttgaatcccttctattttacttgtacatgtgctgatgtaactaaaactaattttgtaaatctgttggctctttttattgtaaagaaaagcattttaaaagtttgaggaatcttttgactgtttcaagcaggaaaaaaaaattacatgaaaatagaatgcactgagttgataaagggaaaaattgtaaggcaggagtttggcaagtggctgttggccagagacttacttgtaactctctaaatgaagtttttttgatcctgtaatcactgaaggtacatactccatgtggacttcccttaaacaggcaaacacctacaggtatggtgtgcaacagattgtacaattacattttggcctaaatacatttttgcttactagtatttaaaataaattcttaatcagaggaggcctttgggttttattggtcaaatctttgtaagctggcttttgtctttttaaaaaatttcttgaatttgtggttgtgtccaatttgcaaacatttccaaaaatgtttgctttgcttacaaaccacatgattttaatgttttttgtataccataatatctagccccaaacatttgattactacatgtgcattggtgattttgatcatccattcttaatatttgatttctgtgtcacctactgtcatttgttaaactgctggccaacaagaacaggaagtatagtttggggggttggggagagtttacataaggaagagaagaaattgagtggcatattgtaaatatcagatctataattgtaaatataaaacctgcctcagttagaatgaatggaaagcagatctacaatttgctaatataggaatatcaggttgactatatagccatacttgaaaatgcttctgagtggtgtcaactttacttgaatgaatttttcatcttgattgacgcacagtgatgtacagttcacttctgaagctagtggttaacttgtgtaggaaacttttgcagtttgacactaagataacttctgtgtgcatttttctatgcttttttaaaaactagtttcatttcattttcatgagatgtttggtttataagatctgaggatggttataaatactgtaagtattgtaatgttatgaatgcaggttatttgaaagctgtttattattatatcattcctgataatgctatgtgagtgtttttaataaaatttatatttatttaatgcactctaa

SEQ ID NO: 4106 - DNA, 9215 bp, Homo sapiens
  source 1..9215: mol_type = genomic DNA
gcggccgccccgagacgccggccccgctgagtgatgagaacagacgtcaaactgccttatgaatattgatgcggaggctaggctgctttcgtagagaagcagaaggaagcaagatggctgccctttaggatttgttagaaaggagacccgactgcaactgctggattgctgcaaggctgagggacgagaacgaggctggcaaacattcagcagcacaccctctcaagattgtttacttgcctttgctcctgttgagttacaacgcttggaagcaggagatgggctcagcagcagccaataggacatgatccaggaagagcagtaagggactgagctgctgaattcaactagagggcagccttgtggatggccccgaagcaagcctgatggaacaggatagaaccaaccatgttgagggcaacagactaagtccattcctgataccatcacctcccatttgccagacagaacctctggctacaaagctccagaatggaagcccactgcctgagagagctcatccagaagtaaatggagacaccaagtggcactctttcaaaagttattatggaataccctgtatgaagggaagccagaatagtcgtgtgagtcctgactttacacaagaaagtagagggtattccaagtgtttgcaaaatggaggaataaaacgcacagttagtgaaccttctctctctgggctccttcagatcaagaaattgaaacaagaccaaaaggctaatggagaaagacgtaacttcggggtaagccaagaaagaaatccaggtgaaagcagtcaaccaaatgtctccgatttgagtgataagaaagaatctgtgagttctgtagcccaagaaaatgcagttaaagatttcaccagtttttcaacacataactgcagtgggcctgaaaatccagagcttcagattctgaatgagcaggaggggaaaagtgctaattaccatgacaagaacattgtattacttaaaaacaaggcagtgctaatgcctaatggtgctacagtttctgcctcttccgtggaacacacacatggtgaactcctggaaaaaacactgtctcaatattatccagattgtgtttccattgcggtgcagaaaaccacatctcacataaatgccattaacagtcaggctactaatgagttgtcctgtgagatcactcacccatcgcatacctcagggcagatcaattccgcacagacctctaactctgagctgcctccaaagccagctgcagtggtgagtgaggcctgtgatgctgatgatgctgataatgccagtaaactagctgcaatgctaaatacctgttcctttcagaaaccagaacaactacaacaacaaaaatcagtttttgagatatgcccatctcctgcagaaaataacatccagggaaccacaaagctagcgtctggtgaagaattctgttcaggttccagcagcaatttgcaagctcctggtggcagctctgaacggtatttaaaacaaaatgaaatgaatggtgcttacttcaagcaaagctcagtgttcactaaggattccttttctgccactaccacaccaccaccaccatcacaattgcttctttctccccctcctcctcttccacaggttcctcagcttccttcagaaggaaaaagcactctgaatggtggagttttagaagaacaccaccactaccccaaccaaagtaacacaacacttttaagggaagtgaaaatagagggtaaacctgaggcaccaccttcccagagtcctaatccatctacacatgtatgcagcccttctccgatgctttctgaaaggcctcagaataattgtgtgaacaggaatgacatacagactgcagggacaatgactgttccattgtgttctgagaaaacaagaccaatgtcagaacacctcaagcataacccaccaatttttggtagcagtggagagctacaggacaactgccagcagttgatgagaaacaaagagcaagagattctgaagggtcgagacaaggagcaaacacgagatcttgtgcccccaacacagcactatctgaaaccaggatggattgaattgaaggcccctcgttttcaccaagcggaatcccatctaaaacgtaatgaggcatcactgccatcaattcttcagtatcaacccaatctctccaatcaaatgacctccaaacaatacactggaaattccaacatgcctggggggctcccaaggcaagcttacacccagaaaacaacacagctggagcacaagtcacaaatgtaccaagttgaaatgaatcaagggcagtcccaaggtacagtggaccaacatctccagttccaaaaaccctcacaccaggtgcacttctccaaaacagaccatttaccaaaagctcatgtgcagtcactgtgtggcactagatttcattttcaacaaagagcagattcccaaactgaaaaacttatgtccccagtgttgaaacagcacttgaatcaacaggcttcagagactgagccattttcaaactcacaccttttgcaacataagcctcataaacaggcagcacaaacacaaccatcccagagttcacatctccctcaaaaccagcaacagcagcaaaaattacaaataaagaataaagaggaaatactccagacttttcctcacccccaaagcaacaatgatcagcaaagagaaggatcattctttggccagactaaagtggaagaatgttttcatggtgaaaatcagtattcaaaatcaagcgagttcgagactcataatgtccaaatgggactggaggaagtacagaatataaatcgtagaaattccccttatagtcagaccatgaaatcaagtgcatgcaaaatacaggtttcttgttcaaacaatacacacctagtttcagagaataaagaacagactacacatcctgaactttttgcaggaaacaagacccaaaacttgcatcacatgcaatattttccaaataatgtgatcccaaagcaagatcttcttcacaggtgctttcaagaacaggagcagaagtcacaacaagcttcagttctacagggatataaaaatagaaaccaagatatgtctggtcaacaagctgcgcaacttgctcagcaaaggtacttgatacataaccatgcaaatgtttttcctgtgcctgaccagggaggaagtcacactcagacccctccccagaaggacactcaaaagcatgctgctctaaggtggcatctcttacagaagcaagaacagcagcaaacacagcaaccccaaactgagtcttgccatagtcagatgcacaggccaattaaggtggaacctggatgcaagccacatgcctgtatgcacacagcaccaccagaaaacaaaacatggaaaaaggtaactaagcaagagaatccacctgcaagctgtgataatgtgcagcaaaagagcatcattgagaccatggagcagcatctgaagcagtttcacgccaagtcgttatttgaccataaggctcttactctcaaatcacagaagcaagtaaaagttgaaatgtcagggccagtcacagttttgactagacaaaccactgctgcagaacttgatagccacaccccagctttagagcagcaaacaacttcttcagaaaagacaccaaccaaaagaacagctgcttctgttctcaataattttatagagtcaccttccaaattactagatactcctataaaaaatttattggatacacctgtcaagactcaatatgatttcccatcttgcagatgtgtaggtaagtgccagaaatgtactgagacacatggcgtttatccagaattagcaaatttatcttcagatatgggattttccttctttttttaaatcttgagtctggcagcaatttgtaaaggctcataaaaatctgaagcttacattttttgtcaagttaccgatgcttgtgtcttgtgaaagagaacttcacttacatgcagtttttccaaaagaattaaataatcgtgcatgtttatttttccctctcttcagatcctgtaaaatttgaatgtatctgttttagatcaattcgcctatttagctctttgtatattatctcctggagagacagctaggcagcaaaaaaacaatctattaaaatgagaaaataacgaccataggcagtctaatgtacgaactttaaatattttttaattcaaggtaaaatatattagtttcacaagatttctggctaatagggaaattattatcttcagtcttcatgagttgggggaaatgataatgctgacactcttagtgctcctaaagtttccttttctccatttatacatttggaatgttgtgatttatattcattttgattcccttttctctaaaatttcatctttttgattaaaaaatatgatacaggcatacctcagagatattgtgggtttggctccataccacaataaaatgaatattacaataaagcaagttgtaaggactttttggtttctcactgtatgtaaaagttatttatatactatactgtaacatactaagtgtgcaatagcattgtgtctaaaaaatatatactttaaaaataatttattgttaaaaaaatgccaacaattatctgggcctttagtgagtgctaatctttttgctggtggagggtcgtgcttcagtattgatcgctgtggactgatcatggtggtagttgctgaaggttgctgggatggctgtgtgtgtggcaatttcttaaaataagacaacagtgaagtgctgtatcaattgatttttccattcacaaaagatttctctgtagcatgcaatgctgtttgatagcatttaacccacagcagaatttctttgaaaattggactcagtcctctcaaactgtgctgctgctttatcaactaagtttttgtaattttctgaatcctttgttgtcatttcagcagtttacagcatcttcattggaagtatattccatctcaaacattctttgttcatccataagaagcaacttcttatcaagttttttcatgacattgcagtaactcagccccatcttcaggctctacttctaattctggttctcttgctacatctccctcatctgcagtgacctctccacggaagtcttgaactcctcaaagtaatccatgagggttggaatcaacttctaaactcctgttaatgttgatatattgaccccctcccatgaattatgaatgttcttaataacttctaaatggtgatacctttccagaaggctttcaatgtactttgcccggatccatcagaagactatcttggcagctgtagactaacaatatatttcttaaatgataagacttgaaagtcaaaagtactccttaatccataggctgcagaatcaatgttgtattaacaggcacgaaaacagcattaatcttgtgcatctccatcggagctcttgggtgactaggtgccttgagcagtaatattttgaaaggaggttttggttttgttttttgttttttttttttgttttttagcagtaagtctcaacactgggcttaaaatattcagtaaactatgttgtaaaaagatgtgttatcatccagactttgttgttccattactctacacaagcagggtacacttagcataattcttaagggccttggaattttcagaatggtaaatgagtatgggcttcaacttaaaatcatcaactgcattagcctgtaacaagagagtcagcctgtcctttgaagcaaggcattgacttctatctatgaaagtcttagatggcaccttgtttcaatagtaggctgtttagtacagccaccttcatcagtgatcttagctagatcttctgcataacttgctgcagcttctacatcagcacttgctgcctcaccttgtccttttatgttatagagacagctgcgcttcttaaactttataaaccaacttctgctagcttccaacttctcttctgcagcttcctcattctcttcatagaactgaagggagtcaaggccttgctctggattaagctttggcttaaggaatgttgtggctgacgtgatcttctatccagaccactaaagcgctctccatatcagcaataaggccgttttgctttcttacctttcatgtgttcactggagtaatttccttcaagaatttttcctttacattcacaacttggctaactggcatgcaaggcctagctttcagcctgtcttggcttttgacatgccttcctcacttagctcgtcatatctagcttttgatttaaagtggcaggcatacaactcttcctttcacttgaacacttagaggccactgtagggttattaattggcctaatttcaatattgttgtgttttagggaatagagaggcccagggagagggagagagcccaaacggctggttgatagagcaggcagaatgcacacaacatttatcagattatgtttgcaccatttaccagattatgggtacggtttgtggcaccccccaaaaattagaatagtaacatcaaagatcactgatcacagatcgccataacataaataataataaactttaaaatactgtgagaattaccaaaatgtgatacagagacatgaagtgagcacatgctgttgaaaaaaatgacactgatagacatacttaacacgtgggattgccacaaaccttcagtttgtaaaagtcacagtaactgtgactcacaaaagaacaaagcacaataaaacgaggtatgcctgtatttttaaaaaaagctttttgttaaaattcaggatatgtaataggtctgtaggaatagtgaaatatttttgctgatggatgtagatatatacgtggatagagatgaagatcttaattatagctatgcagcatagatttagtcaaagacatttgaaaagacaaatgttaaattagtgtggctaatgacctacccgtgccatgttttccctcttgcaatgagataccccacactgtgtagaaggatggagggaggactcctactgtccctctttgcgtgtggttattaagttgcctcactgggctaaaacaccacacatctcatagataatatttggtaagttgtaatcgtcttcactcttctcttatcacccacccctatcttcccacttttccatctttgttggtttgcaacagccccttctttttgcctgactctccaggattttctctcatcataaattgttctaaagtacatactaatatgggtctggattgactattcttatttgcaaaacagcaattaaatgttatagggaagtaggaagaaaaaggggtatccttgacaataaaccaagcaatattctgggggtgggatagagcaggaaattttatttttaatcttttaaaatccaagtaataggtaggcttccagttagctttaaatgttttttttttccagctcaaaaaattggattgtagttgatactacatataatacattctaattccctcactgtattctttgtttagtttcatttatttggtttaaaataattttttatcccatatctgaaatgtaatatatttttatccaacaaccagcatgtacatatacttaattatgtggcacattttctaatagatcagtccatcaatctactcattttaaagaaaaaaaaattttaaagtcacttttagagcccttaatgtgtagttgggggttaagctttgtggatgtagcctttatatttagtataattgaggtctaaaataataatcttctattatctcaacagagcaaattattgaaaaagatgaaggtcctttttatacccatctaggagcaggtcctaatgtggcagctattagagaaatcatggaagaaaggtaattaacgcaaaggcacagggcagattaacgtttatccttttgtatatgtcagaatttttccagccttcacacacaaagcagtaaacaattgtaaattgagtaattattagtaggcttagctattctagggttgccaacactacacactgtgctattcaccagagagtcacaatatttgacaggactaatagtctgctagctggcacaggctgcccactttgcgatggatgccagaaaacccaggcatgaacaggaatcggccagccaggctgccagccacaaggtactggcacaggctccaacgagaggtcccactctggctttcccacctgataataaagtgtcaaagcagaaagactggtaaagtgtggtataagaaaagaaccactgaattaaattcacctagtgttgcaaatgagtacttatctctaagttttcttttaccataaaaagagagcaagtgtgatatgttgaatagaaagagaaacatactatttacagctgcctttttttttttttttcgctatcaatcacaggtatacaagtacttgcctttactcctgcatgtagaagactcttatgagcgagataatgcagagaaggcctttcatataaatttatacagctctgagctgttcttcttctagggtgccttttcattaagaggtaggcagtattattattaaagtacttaggatacattggggcagctaggacatattcagtatcattcttgctccatttccaaattattcatttctaaattagcatgtagaagttcactaaataatcatctagtggcctggcagaaatagtgaatttccctaagtgccttttttttgttgtttttttgttttgttttttaaacaagcagtaggtggtgctttggtcataagggaagatatagtctatttctaggactattccatattttccatgtggctggatactaactatttgccagcctccttttctaaattgtgagacattcttggaggaacagttctaactaaaatctattatgactccccaagttttaaaatagctaaatttagtaagggaaaaaatagtttatgttttagaagactgaacttagcaaactaacctgaattttgtgctttgtgaaattttatatcgaaatgagctttcccattttcacccacatgtaatttacaaaatagttcattacaattatctgtacattttgatattgaggaaaaacaaggcttaaaaaccattatccagtttgcttggcgtagacctgtttaaaaaataataaaccgttcatttctcaggatgtggtcatagaataaagttatgctcaaatgttcaaatattt

SEQ ID NO: 4107 - DNA, 865 bp, Homo sapiens
  source 1..865: mol_type = genomic DNA
atcagctgtagggtctgggtctgggtttgtgtctgcctcctcctaccttcttatccccctttagggggctgtacgaagtgaatgtcacagggagtggaattggagtacactgagtgggttttttttttccttaagtccgcgcgttttgttagcggcgctgagtgaaagaggaaagaatagtttctctggttccccaaacaagaccagaactcacttttctcaaggtacataagtcagcgctgggctgagccttccagcctggggaatgtatgtaagagaatttatggacaaatctgtgtcccggctttgtgcttctcccgaatcagcttcgtttggttccttggctggcaaacattcagcagcacaccctctcaagattgtttacttgcctttgctcctgttgagttacaacgcttggaagcaggagatgggctcagcagcagccaataggacatgatccaggaagagcagtaagggactgagctgctgaattcaactagagggcagccttgtggatggccccgaagcaagcctgatggaacaggatagaaccaaccatgttgagggcaacagactaagtccattcctgataccatcacctcccatttgccagacagaacctctggctacaaagctccagaatggaagcccactgcctgagagagctcatccagaagtaaatggagacaccaagtggcactctttcaaaagttattatggaataccctgtatgaagggaagccagaatagtcgtgtgagtcctgactttacacaagaaagtagagggtattccaagtgtttgcaaaatggaggaataaaacgcacagttagtgaaccttctctctctgggctccttcagatcaag

SEQ ID NO: 4108 - DNA, 4935 bp, Homo sapiens
  source 1..4935: mol_type = genomic DNA
gaaaggagacccgactgcaactgctggattgctgcaaggctgagggacgagaacgagaattcaactagagggcagccttgtggatggccccgaagcaagcctgatggaacaggatagaaccaaccatgttgagggcaacagactaagtccattcctgataccatcacctcccatttgccagacagaacctctggctacaaagctccagaatggaagcccactgcctgagagagctcatccagaagtaaatggagacaccaagtggcactctttcaaaagttattatggaataccctgtatgaagggaagccagaatagtcgtgtgagtcctgactttacacaagaaagtagagggtattccaagtgtttgcaaaatggaggaataaaacgcacagttagtgaaccttctctctctgggctccttcagatcaagaaattgaaacaagaccaaaaggctaatggagaaagacgtaacttcggggtaagccaagaaagaaatccaggtgaaagcagtcaaccaaatgtctccgatttgagtgataagaaagaatctgtgagttctgtagcccaagaaaatgcagttaaagatttcaccagtttttcaacacataactgcagtgggcctgaaaatccagagcttcagattctgaatgagcaggaggggaaaagtgctaattaccatgacaagaacattgtattacttaaaaacaaggcagtgctaatgcctaatggtgctacagtttctgcctcttccgtggaacacacacatggtgaactcctggaaaaaacactgtctcaatattatccagattgtgtttccattgcggtgcagaaaaccacatctcacataaatgccattaacagtcaggctactaatgagttgtcctgtgagatcactcacccatcgcatacctcagggcagatcaattccgcacagacctctaactctgagctgcctccaaagccagctgcagtggtgagtgaggcctgtgatgctgatgatgctgataatgccagtaaactagctgcaatgctaaatacctgttcctttcagaaaccagaacaactacaacaacaaaaatcagtttttgagatatgcccatctcctgcagaaaataacatccagggaaccacaaagctagcgtctggtgaagaattctgttcaggttccagcagcaatttgcaagctcctggtggcagctctgaacggtatttaaaacaaaatgaaatgaatggtgcttacttcaagcaaagctcagtgttcactaaggattccttttctgccactaccacaccaccaccaccatcacaattgcttctttctccccctcctcctcttccacaggttcctcagcttccttcagaaggaaaaagcactctgaatggtggagttttagaagaacaccaccactaccccaaccaaagtaacacaacacttttaagggaagtgaaaatagagggtaaacctgaggcaccaccttcccagagtcctaatccatctacacatgtatgcagcccttctccgatgctttctgaaaggcctcagaataattgtgtgaacaggaatgacatacagactgcagggacaatgactgttccattgtgttctgagaaaacaagaccaatgtcagaacacctcaagcataacccaccaatttttggtagcagtggagagctacaggacaactgccagcagttgatgagaaacaaagagcaagagattctgaagggtcgagacaaggagcaaacacgagatcttgtgcccccaacacagcactatctgaaaccaggatggattgaattgaaggcccctcgttttcaccaagcggaatcccatctaaaacgtaatgaggcatcactgccatcaattcttcagtatcaacccaatctctccaatcaaatgacctccaaacaatacactggaaattccaacatgcctggggggctcccaaggcaagcttacacccagaaaacaacacagctgagcacaagtcacaaatgtaccaagttgaaatgaatcaagggcagtcccaaggtacagtggaccaacatctccagttccaaaaaccctcacaccaggtgcacttctccaaaacagaccatttaccaaaagctcatgtgcagtcactgtgtggcactagatttcattttcaacaaagagcagattcccaaactgaaaaacttatgtccccagtgttgaaacagcacttgaatcaacaggcttcagagactgagccattttcaaactcacaccttttgcaacataagcctcataaacaggcagcacaaacacaaccatcccagagttcacatctccctcaaaaccagcaacagcagcaaaaattacaaataaagaataaagaggaaatactccagacttttcctcacccccaaagcaacaatgatcagcaaagagaaggatcattctttggccagactaaagtggaagaatgttttcatggtgaaaatcagtattcaaaatcaagcgagttcgagactcataatgtccaaatgggactggaggaagtacagaatataaatcgtagaaattccccttatagtcagaccatgaaatcaagtgcatgcaaaatacaggtttcttgttcaaacaatacacacctagtttcagagaataaagaacagactacacatcctgaactttttgcaggaaacaagacccaaaacttgcatcacatgcaatattttccaaataatgtgatcccaaagcaagatcttcttcacaggtgctttcaagaacaggagcagaagtcacaacaagcttcagttctacagggatataaaaatagaaaccaagatatgtctggtcaacaagctgcgcaacttgctcagcaaaggtacttgatacataaccatgcaaatgtttttcctgtgcctgaccagggaggaagtcacactcagacccctccccagaaggacactcaaaagcatgctgctctaaggtggcatctcttacagaagcaagaacagcagcaaacacagcaaccccaaactgagtcttgccatagtcagatgcacaggccaattaaggtggaacctggatgcaagccacatgcctgtatgcacacagcaccaccagaaaacaaaacatggaaaaaggtaactaagcaagagaatccacctgcaagctgtgataatgtgcagcaaaagagcatcattgagaccatggagcagcatctgaagcagtttcacgccaagtcgttatttgaccataaggctcttactctcaaatcacagaagcaagtaaaagttgaaatgtcagggccagtcacagttttgactagacaaaccactgctgcagaacttgatagccacaccccagctttagagcagcaaacaacttcttcagaaaagacaccaaccaaaagaacagctgcttctgttctcaataattttatagagtcaccttccaaattactagatactcctataaaaaatttattggatacacctgtcaagactcaatatgatttcccatcttgcagatgtgtagagcaaattattgaaaaagatgaaggtcctttttatacccatctaggagcaggtcctaatgtggcagctattagagaaatcatggaagaaaggtaattaacgcaaaggcacagggcagattaacgtttatccttttgtatatgtcagaatttttccagccttcacacacaaagcagtaaacaattgtaaattgagtaattattagtaggcttagctattctagggttgccaacactacacactgtgctattcaccagagagtcacaatatttgacaggactaatagtctgctagctggcacaggctgcccactttgcgatggatgccagaaaacccaggcatgaacaggaatcggccagccaggctgccagccacaaggtactggcacaggctccaacgagaggtcccactctggctttcccacctgataataaagtgtcaaagcagaaagactggtaaagtgtggtataagaaaagaaccactgaattaaattcacctagtgttgcaaatgagtacttatctctaagttttcttttaccataaaaagagagcaagtgtgatatgttgaatagaaagagaaacatactatttacagctgcctttttttttttttttcgctatcaatcacaggtatacaagtacttgcctttactcctgcatgtagaagactcttatgagcgagataatgcagagaaggcctttcatataaatttatacagctctgagctgttcttcttctagggtgccttttcattaagaggtaggcagtattattattaaagtacttaggatacattggggcagctaggacatattcagtatcattcttgctccatttccaaattattcatttctaaattagcatgtagaagttcactaaataatcatctagtggcctggcagaaatagtgaatttccctaagtgccttttttttgttgtttttttgttttgttttttaaacaagcagtaggtggtgctttggtcataagggaagatatagtctatttctaggactattccatattttccatgtggctggatactaactatttgccagcctccttttctaaattgtgagacattcttggaggaacagttctaactaaaatctattatgactccccaagttttaaaatagctaaatttagtaagggaaaaaatagtttatgttttagaagactgaacttagcaaactaacctgaattttgtgctttgtgaaattttatatcgaaatgagctttcccattttcacccacatgtaatttacaaaatagttcattacaattatctgtacattttgatattgaggaaaaacaaggcttaaaaaccattatccagtttgcttggcgtagacctgtttaaaaaataataaaccgttcatttctcaggatgtggtcatagaataaagttatgctcaaatgtt

SEQ ID NO: 4109 - DNA, 10166 bp, Homo sapiens
  source 1..10166: mol_type = genomic DNA
ccgtgccatcccaacctcccacctcgcccccaaccttcgcgcttgctctgcttcttctcccaggggtggagacccgccgaggtccccggggttcccgagggctgcacccttccccgcgctcgccagccctggcccctactccgcgctggtccgggcgcaccactccccccgcgccactgcacggcgtgagggcagcccaggtctccactgcgcgccccgctgtacggccccaggtgccgccggcctttgtgctggacgcccggtgcggggggctaattccctgggagccggggctgagggccccagggcggcggcgcaggccggggcggagcgggaggaggccggggcggagcaggaggaggcccgggcggaggaggagagccggcggtagcggcagtggcagcggcgagagcttgggcggccgccgccgcctcctcgcgagcgccgcgcgcccgggtcccgctcgcatgcaagtcacgtccgccccctcggcgcggccgccccgagacgccggccccgctgagtgatgagaacagacgtcaaactgccttatgaatattgatgcggaggctaggctgctttcgtagagaagcagaaggaagcaagatggctgccctttaggatttgttagaaaggagacccgactgcaactgctggattgctgcaaggctgagggacgagaacgaggctggcaaacattcagcagcacaccctctcaagattgtttacttgcctttgctcctgttgagttacaacgcttggaagcaggagatgggctcagcagcagccaataggacatgatccaggaagagcaaattcaactagagggcagccttgtggatggccccgaagcaagcctgatggaacaggatagaaccaaccatgttgagggcaacagactaagtccattcctgataccatcacctcccatttgccagacagaacctctggctacaaagctccagaatggaagcccactgcctgagagagctcatccagaagtaaatggagacaccaagtggcactctttcaaaagttattatggaataccctgtatgaagggaagccagaatagtcgtgtgagtcctgactttacacaagaaagtagagggtattccaagtgtttgcaaaatggaggaataaaacgcacagttagtgaaccttctctctctgggctccttcagatcaagaaattgaaacaagaccaaaaggctaatggagaaagacgtaacttcggggtaagccaagaaagaaatccaggtgaaagcagtcaaccaaatgtctccgatttgagtgataagaaagaatctgtgagttctgtagcccaagaaaatgcagttaaagatttcaccagtttttcaacacataactgcagtgggcctgaaaatccagagcttcagattctgaatgagcaggaggggaaaagtgctaattaccatgacaagaacattgtattacttaaaaacaaggcagtgctaatgcctaatggtgctacagtttctgcctcttccgtggaacacacacatggtgaactcctggaaaaaacactgtctcaatattatccagattgtgtttccattgcggtgcagaaaaccacatctcacataaatgccattaacagtcaggctactaatgagttgtcctgtgagatcactcacccatcgcatacctcagggcagatcaattccgcacagacctctaactctgagctgcctccaaagccagctgcagtggtgagtgaggcctgtgatgctgatgatgctgataatgccagtaaactagctgcaatgctaaatacctgttcctttcagaaaccagaacaactacaacaacaaaaatcagtttttgagatatgcccatctcctgcagaaaataacatccagggaaccacaaagctagcgtctggtgaagaattctgttcaggttccagcagcaatttgcaagctcctggtggcagctctgaacggtatttaaaacaaaatgaaatgaatggtgcttacttcaagcaaagctcagtgttcactaaggattccttttctgccactaccacaccaccaccaccatcacaattgcttctttctccccctcctcctcttccacaggttcctcagcttccttcagaaggaaaaagcactctgaatggtggagttttagaagaacaccaccactaccccaaccaaagtaacacaacacttttaagggaagtgaaaatagagggtaaacctgaggcaccaccttcccagagtcctaatccatctacacatgtatgcagcccttctccgatgctttctgaaaggcctcagaataattgtgtgaacaggaatgacatacagactgcagggacaatgactgttccattgtgttctgagaaaacaagaccaatgtcagaacacctcaagcataacccaccaatttttggtagcagtggagagctacaggacaactgccagcagttgatgagaaacaaagagcaagagattctgaagggtcgagacaaggagcaaacacgagatcttgtgcccccaacacagcactatctgaaaccaggatggattgaattgaaggcccctcgttttcaccaagcggaatcccatctaaaacgtaatgaggcatcactgccatcaattcttcagtatcaacccaatctctccaatcaaatgacctccaaacaatacactggaaattccaacatgcctggggggctcccaaggcaagcttacacccagaaaacaacacagctggagcacaagtcacaaatgtaccaagttgaaatgaatcaagggcagtcccaaggtacagtggaccaacatctccagttccaaaaaccctcacaccaggtgcacttctccaaaacagaccatttaccaaaagctcatgtgcagtcactgtgtggcactagatttcattttcaacaaagagcagattcccaaactgaaaaacttatgtccccagtgttgaaacagcacttgaatcaacaggcttcagagactgagccattttcaaactcacaccttttgcaacataagcctcataaacaggcagcacaaacacaaccatcccagagttcacatctccctcaaaaccagcaacagcagcaaaaattacaaataaagaataaagaggaaatactccagacttttcctcacccccaaagcaacaatgatcagcaaagagaaggatcattctttggccagactaaagtggaagaatgttttcatggtgaaaatcagtattcaaaatcaagcgagttcgagactcataatgtccaaatgggactggaggaagtacagaatataaatcgtagaaattccccttatagtcagaccatgaaatcaagtgcatgcaaaatacaggtttcttgttcaaacaatacacacctagtttcagagaataaagaacagactacacatcctgaactttttgcaggaaacaagacccaaaacttgcatcacatgcaatattttccaaataatgtgatcccaaagcaagatcttcttcacaggtgctttcaagaacaggagcagaagtcacaacaagcttcagttctacagggatataaaaatagaaaccaagatatgtctggtcaacaagctgcgcaacttgctcagcaaaggtacttgatacataaccatgcaaatgtttttcctgtgcctgaccagggaggaagtcacactcagacccctccccagaaggacactcaaaagcatgctgctctaaggtggcatctcttacagaagcaagaacagcagcaaacacagcaaccccaaactgagtcttgccatagtcagatgcacaggccaattaaggtggaacctggatgcaagccacatgcctgtatgcacacagcaccaccagaaaacaaaacatggaaaaaggtaactaagcaagagaatccacctgcaagctgtgataatgtgcagcaaaagagcatcattgagaccatggagcagcatctgaagcagtttcacgccaagtcgttatttgaccataaggctcttactctcaaatcacagaagcaagtaaaagttgaaatgtcagggccagtcacagttttgactagacaaaccactgctgcagaacttgatagccacaccccagctttagagcagcaaacaacttcttcagaaaagacaccaaccaaaagaacagctgcttctgttctcaataattttatagagtcaccttccaaattactagatactcctataaaaaatttattggatacacctgtcaagactcaatatgatttcccatcttgcagatgtgtagagcaaattattgaaaaagatgaaggtcctttttatacccatctaggagcaggtcctaatgtggcagctattagagaaatcatggaagaaaggtttggacagaagggtaaagctattaggattgaaagagtcatctatactggtaaagaaggcaaaagttctcagggatgtcctattgctaagtgggtggttcgcagaagcagcagtgaagagaagctactgtgtttggtgcgggagcgagctggccacacctgtgaggctgcagtgattgtgattctcatcctggtgtgggaaggaatcccgctgtctctggctgacaaactctactcggagcttaccgagacgctgaggaaatacggcacgctcaccaatcgccggtgtgccttgaatgaagagagaacttgcgcctgtcaggggctggatccagaaacctgtggtgcctccttctcttttggttgttcatggagcatgtactacaatggatgtaagtttgccagaagcaagatcccaaggaagtttaagctgcttggggatgacccaaaagaggaagagaaactggagtctcatttgcaaaacctgtccactcttatggcaccaacatataagaaacttgcacctgatgcatataataatcagattgaatatgaacacagagcaccagagtgccgtctgggtctgaaggaaggccgtccattctcaggggtcactgcatgtttggacttctgtgctcatgcccacagagacttgcacaacatgcagaatggcagcacattggtatgcactctcactagagaagacaatcgagaatttggaggaaaacctgaggatgagcagcttcacgttctgcctttatacaaagtctctgacgtggatgagtttgggagtgtggaagctcaggaggagaaaaaacggagtggtgccattcaggtactgagttcttttcggcgaaaagtcaggatgttagcagagccagtcaagacttgccgacaaaggaaactagaagccaagaaagctgcagctgaaaagctttcctccctggagaacagctcaaataaaaatgaaaaggaaaagtcagccccatcacgtacaaaacaaactgaaaacgcaagccaggctaaacagttggcagaacttttgcgactttcaggaccagtcatgcagcagtcccagcagccccagcctctacagaagcagccaccacagccccagcagcagcagagaccccagcagcagcagccacatcaccctcagacagagtctgtcaactcttattctgcttctggatccaccaatccatacatgagacggcccaatccagttagtccttatccaaactcttcacacacttcagatatctatggaagcaccagccctatgaacttctattccacctcatctcaagctgcaggttcatatttgaattcttctaatcccatgaacccttaccctgggcttttgaatcagaatacccaatatccatcatatcaatgcaatggaaacctatcagtggacaactgctccccatatctgggttcctattctccccagtctcagccgatggatctgtataggtatccaagccaagaccctctgtctaagctcagtctaccacccatccatacactttaccagccaaggtttggaaatagccagagttttacatctaaatacttaggttatggaaaccaaaatatgcagggagatggtttcagcagttgtaccattagaccaaatgtacatcatgtagggaaattgcctccttatcccactcatgagatggatggccacttcatgggagccacctctagattaccacccaatctgagcaatccaaacatggactataaaaatggtgaacatcattcaccttctcacataatccataactacagtgcagctccgggcatgttcaacagctctcttcatgccctgcatctccaaaacaaggagaatgacatgctttcccacacagctaatgggttatcaaagatgcttccagctcttaaccatgatagaactgcttgtgtccaaggaggcttacacaaattaagtgatgctaatggtcaggaaaagcagccattggcactagtccagggtgtggcttctggtgcagaggacaacgatgaggtctggtcagacagcgagcagagctttctggatcctgacattgggggagtggccgtggctccaactcatgggtcaattctcattgagtgtgcaaagcgtgagctgcatgccacaacccctttaaagaatcccaataggaatcaccccaccaggatctccctcgtcttttaccagcataagagcatgaatgagccaaaacatggcttggctctttgggaagccaaaatggctgaaaaagcccgtgagaaagaggaagagtgtgaaaagtatggcccagactatgtgcctcagaaatcccatggcaaaaaagtgaaacgggagcctgctgagccacatgaaacttcagagcccacttacctgcgtttcatcaagtctcttgccgaaaggaccatgtccgtgaccacagactccacagtaactacatctccatatgccttcactcgggtcacagggccttacaacagatatatatgatatcacccccttttgttggttacctcacttgaaaagaccacaaccaacctgtcagtagtatagttctcatgacgtgggcagtggggaaaggtcacagtattcatgacaaatgtggtgggaaaaacctcagctcaccagcaacaaaagaggttatcttaccatagcacttaattttcactggctcccaagtggtcacagatggcatctaggaaaagaccaaagcattctatgcaaaaagaaggtggggaagaaagtgttccgcaatttacatttttaaacactggttctattattggacgagatgatatgtaaatgtgatcccccccccccgcttacaactctacacatctgtgaccacttttaataatatcaagtttgcatagtcatggaacacaaatcaaacaagtactgtagtattacagtgacaggaatcttaaaataccatctggtgctgaatatatgatgtactgaaatactggaattatggctttttgaaatgcagtttttactgtaatcttaacttttatttatcaaaatagctacaggaaacatgaatagcaggaaaacactgaatttgtttggatgttctaagaaatggtgctaagaaaatggtgtctttaatagctaaaaatttaatgcctttatatcatcaagatgctatcagtgtactccagtgcccttgaataataggggtaccttttcattcaagtttttatcataattacctattcttacacaagcttagtttttaaaatgtggacattttaaaggcctctggattttgctcatccagtgaagtccttgtaggacaataaacgtatatatgtacatatatacacaaacatgtatatgtgcacacacatgtatatgtataaatattttaaatggtgttttagaagcactttgtctacctaagctttgacaacttgaacaatgctaaggtactgagatgtttaaaaaacaagtttactttcattttagaatgcaaagttgatttttttaaggaaacaaagaaagcttttaaaatatttttgcttttagccatgcatctgctgatgagcaattgtgtccatttttaacacagccagttaaatccaccatggggcttactggattcaagggaatacgttagtccacaaaacatgttttctggtgctcatctcacatgctatactgtaaaacagttttatacaaaattgtatgacaagttcattgctcaaaaatgtacagttttaagaattttctattaactgcaggtaataattagctgcatgctgcagactcaacaaagctagttcactgaagcctatgctattttatggatcataggctcttcagagaactgaatggcagtctgcctttgtgttgataattatgtacattgtgacgttgtcatttcttagcttaagtgtcctctttaacaagaggattgagcagactgatgcctgcataagatgaataaacagggttagttccatgtgaatctgtcagttaaaaagaaacaaaaacaggcagctggtttgctgtggtggttttaaatcattaatttgtataaagaagtgaaagagttgtatagtaaattaaattgtaaacaaaacttttttaatgcaatgctttagtattttagtactgtaaaaaaattaaatatatacatatatatatatatatatatatatatatatatgagtttgaagcagaattcacatcatgatggtgctactcagcctgctacaaatatatcataatgtgagctaagaattcattaaatgtttgagtgatgttcctacttgtcatatacctcaacactagtttggcaataggatattgaactgagagtgaaagcattgtgtaccatcatttttttccaagtccttttttttattgttaaaaaaaaaagcataccttttttcaatacttgatttcttagcaagtataacttgaacttcaacctttttgttctaaaaattcagggatatttcagctcatgctctccctatgccaacatgtcacctgtgtttatgtaaaattgttgtaggttaataaatatattctttgtcagggatttaacccttttattttgaatcccttctattttacttgtacatgtgctgatgtaactaaaactaattttgtaaatctgttggctctttttattgtaaagaaaagcattttaaaagtttgaggaatcttttgactgtttcaagcaggaaaaaaaaattacatgaaaatagaatgcactgagttgataaagggaaaaattgtaaggcaggagtttggcaagtggctgttggccagagacttacttgtaactctctaaatgaagtttttttgatcctgtaatcactgaaggtacatactccatgtggacttcccttaaacaggcaaacacctacaggtatggtgtgcaacagattgtacaattacattttggcctaaatacatttttgcttactagtatttaaaataaattcttaatcagaggaggcctttgggttttattggtcaaatctttgtaagctggcttttgtctttttaaaaaatttcttgaatttgtggttgtgtccaatttgcaaacatttccaaaaatgtttgctttgcttacaaaccacatgattttaatgttttttgtataccataatatctagccccaaacatttgattactacatgtgcattggtgattttgatcatccattcttaatatttgatttctgtgtcacctactgtcatttgttaaactgctggccaacaagaacaggaagtatagtttggggggttggggagagtttacataaggaagagaagaaattgagtggcatattgtaaatatcagatctataattgtaaatataaaacctgcctcagttagaatgaatggaaagcagatctacaatttgctaatataggaatatcaggttgactatatagccatacttgaaaatgcttctgagtggtgtcaactttacttgaatgaatttttcatcttgattgacgcacagtgatgtacagttcacttctgaagctagtggttaacttgtgtaggaaacttttgcagtttgacactaagataacttctgtgtgcatttttctatgcttttttaaaaactagtttcatttcattttcatgagatgtttggtttataagatctgaggatggttataaatactgtaagtattgtaatgttatgaatgcaggttatttgaaagctgtttattattatatcattcctgataatgctatgtgagtgtttttaataaaatttatatttatttaatgcactctaagtgttgtcttcct

SEQ ID NO: 4110 - DNA, 10075 bp, Homo sapiens
  source 1..10075: mol_type = genomic DNA
ccgtgccatcccaacctcccacctcgcccccaaccttcgcgcttgctctgcttcttctcccaggggtggagacccgccgaggtccccggggttcccgagggctgcacccttccccgcgctcgccagccctggcccctactccgcgctggtccgggcgcaccactccccccgcgccactgcacggcgtgagggcagcccaggtctccactgcgcgccccgctgtacggccccaggtgccgccggcctttgtgctggacgcccggtgcggggggctaattccctgggagccggggctgagggccccagggcggcggcgcaggccggggcggagcgggaggaggccggggcggagcaggaggaggcccgggcggaggaggagagccggcggtagcggcagtggcagcggcgagagcttgggcggccgccgccgcctcctcgcgagcgccgcgcgcccgggtcccgctcgcatgcaagtcacgtccgccccctcggcgcggccgccccgagacgccggccccgctgagtgatgagaacagacgtcaaactgccttatgaatattgatgcggaggctaggctgctttcgtagagaagcagaaggaagcaagatggctgccctttaggatttgttagaaaggagacccgactgcaactgctggattgctgcaaggctgagggacgagaacgaggctggcaaacattcagcagcacaccctctcaagattgtttacttgcctttgctcctgttgagttacaacgcttggaagcaggagatgggctcagcagcagccaataggacatgatccaggaagagcaaattcaactagagggcagccttgtggatggccccgaagcaagcctgatggaacaggatagaaccaaccatgttgagggcaacagactaagtccattcctgataccatcacctcccatttgccagacagaacctctggctacaaagctccagaatggaagcccactgcctgagagagctcatccagaagtaaatggagacaccaagtggcactctttcaaaagttattatggaataccctgtatgaagggaagccagaatagtcgtgtgagtcctgactttacacaagaaagtagagggtattccaagtgtttgcaaaatggaggaataaaacgcacagttagtgaaccttctctctctgggctccttcagatcaagaaattgaaacaagaccaaaaggctaatggagaaagacgtaacttcggggtaagccaagaaagaaatccaggtgaaagcagtcaaccaaatgtctccgatttgagtgataagaaagaatctgtgagttctgtagcccaagaaaatgcagttaaagatttcaccagtttttcaacacataactgcagtgggcctgaaaatccagagcttcagattctgaatgagcaggaggggaaaagtgctaattaccatgacaagaacattgtattacttaaaaacaaggcagtgctaatgcctaatggtgctacagtttctgcctcttccgtggaacacacacatggtgaactcctggaaaaaacactgtctcaatattatccagattgtgtttccattgcggtgcagaaaaccacatctcacataaatgccattaacagtcaggctactaatgagttgtcctgtgagatcactcacccatcgcatacctcagggcagatcaattccgcacagacctctaactctgagctgcctccaaagccagctgcagtggtgagtgaggcctgtgatgctgatgatgctgataatgccagtaaactagctgcaatgctaaatacctgttcctttcagaaaccagaacaactacaacaacaaaaatcagtttttgagatatgcccatctcctgcagaaaataacatccagggaaccacaaagctagcgtctggtgaagaattctgttcaggttccagcagcaatttgcaagctcctggtggcagctctgaacggtatttaaaacaaaatgaaatgaatggtgcttacttcaagcaaagctcagtgttcactaaggattccttttctgccactaccacaccaccaccaccatcacaattgcttctttctccccctcctcctcttccacaggttcctcagcttccttcagaaggaaaaagcactctgaatggtggagttttagaagaacaccaccactaccccaaccaaagtaacacaacacttttaagggaagtgaaaatagagggtaaacctgaggcaccaccttcccagagtcctaatccatctacacatgtatgcagcccttctccgatgctttctgaaaggcctcagaataattgtgtgaacaggaatgacatacagactgcagggacaatgactgttccattgtgttctgagaaaacaagaccaatgtcagaacacctcaagcataacccaccaatttttggtagcagtggagagctacaggacaactgccagcagttgatgagaaacaaagagcaagagattctgaagggtcgagacaaggagcaaacacgagatcttgtgcccccaacacagcactatctgaaaccaggatggattgaattgaaggcccctcgttttcaccaagcggaatcccatctaaaacgtaatgaggcatcactgccatcaattcttcagtatcaacccaatctctccaatcaaatgacctccaaacaatacactggaaattccaacatgcctggggggctcccaaggcaagcttacacccagaaaacaacacagctggagcacaagtcacaaatgtaccaagttgaaatgaatcaagggcagtcccaaggtacagtggaccaacatctccagttccaaaaaccctcacaccaggtgcacttctccaaaacagaccatttaccaaaagctcatgtgcagtcactgtgtggcactagatttcattttcaacaaagagcagattcccaaactgaaaaacttatgtccccagtgttgaaacagcacttgaatcaacaggcttcagagactgagccattttcaaactcacaccttttgcaacataagcctcataaacaggcagcacaaacacaaccatcccagagttcacatctccctcaaaaccagcaacagcagcaaaaattacaaataaagaataaagaggaaatactccagacttttcctcacccccaaagcaacaatgatcagcaaagagaaggatcattctttggccagactaaagtggaagaatgttttcatggtgaaaatcagtattcaaaatcaagcgagttcgagactcataatgtccaaatgggactggaggaagtacagaatataaatcgtagaaattccccttatagtcagaccatgaaatcaagtgcatgcaaaatacaggtttcttgttcaaacaatacacacctagtttcagagaataaagaacagactacacatcctgaactttttgcaggaaacaagacccaaaacttgcatcacatgcaatattttccaaataatgtgatcccaaagcaagatcttcttcacaggtgctttcaagaacaggagcagaagtcacaacaagcttcagttctacagggatataaaaatagaaaccaagatatgtctggtcaacaagctgcgcaacttgctcagcaaaggtacttgatacataaccatgcaaatgtttttcctgtgcctgaccagggaggaagtcacactcagacccctccccagaaggacactcaaaagcatgctgctctaaggtggcatctcttacagaagcaagaacagcagcaaacacagcaaccccaaactgagtcttgccatagtcagatgcacaggccaattaaggtggaacctggatgcaagccacatgcctgtatgcacacagcaccaccagaaaacaaaacatggaaaaaggtaactaagcaagagaatccacctgcaagctgtgataatgtgcagcaaaagagcatcattgagaccatggagcagcatctgaagcagtttcacgccaagtcgttatttgaccataaggctcttactctcaaatcacagaagcaagtaaaagttgaaatgtcagggccagtcacagttttgactagacaaaccactgctgcagaacttgatagccacaccccagctttagagcagcaaacaacttcttcagaaaagacaccaaccaaaagaacagctgcttctgttctcaataattttatagagtcaccttccaaattactagatactcctataaaaaatttattggatacacctgtcaagactcaatatgatttcccatcttgcagatgtgtaggtttggacagaagggtaaagctattaggattgaaagagtcatctatactggtaaagaaggcaaaagttctcagggatgtcctattgctaagtgggtggttcgcagaagcagcagtgaagagaagctactgtgtttggtgcgggagcgagctggccacacctgtgaggctgcagtgattgtgattctcatcctggtgtgggaaggaatcccgctgtctctggctgacaaactctactcggagcttaccgagacgctgaggaaatacggcacgctcaccaatcgccggtgtgccttgaatgaagagagaacttgcgcctgtcaggggctggatccagaaacctgtggtgcctccttctcttttggttgttcatggagcatgtactacaatggatgtaagtttgccagaagcaagatcccaaggaagtttaagctgcttggggatgacccaaaagaggaagagaaactggagtctcatttgcaaaacctgtccactcttatggcaccaacatataagaaacttgcacctgatgcatataataatcagattgaatatgaacacagagcaccagagtgccgtctgggtctgaaggaaggccgtccattctcaggggtcactgcatgtttggacttctgtgctcatgcccacagagacttgcacaacatgcagaatggcagcacattggtatgcactctcactagagaagacaatcgagaatttggaggaaaacctgaggatgagcagcttcacgttctgcctttatacaaagtctctgacgtggatgagtttgggagtgtggaagctcaggaggagaaaaaacggagtggtgccattcaggtactgagttcttttcggcgaaaagtcaggatgttagcagagccagtcaagacttgccgacaaaggaaactagaagccaagaaagctgcagctgaaaagctttcctccctggagaacagctcaaataaaaatgaaaaggaaaagtcagccccatcacgtacaaaacaaactgaaaacgcaagccaggctaaacagttggcagaacttttgcgactttcaggaccagtcatgcagcagtcccagcagccccagcctctacagaagcagccaccacagccccagcagcagcagagaccccagcagcagcagccacatcaccctcagacagagtctgtcaactcttattctgcttctggatccaccaatccatacatgagacggcccaatccagttagtccttatccaaactcttcacacacttcagatatctatggaagcaccagccctatgaacttctattccacctcatctcaagctgcaggttcatatttgaattcttctaatcccatgaacccttaccctgggcttttgaatcagaatacccaatatccatcatatcaatgcaatggaaacctatcagtggacaactgctccccatatctgggttcctattctccccagtctcagccgatggatctgtataggtatccaagccaagaccctctgtctaagctcagtctaccacccatccatacactttaccagccaaggtttggaaatagccagagttttacatctaaatacttaggttatggaaaccaaaatatgcagggagatggtttcagcagttgtaccattagaccaaatgtacatcatgtagggaaattgcctccttatcccactcatgagatggatggccacttcatgggagccacctctagattaccacccaatctgagcaatccaaacatggactataaaaatggtgaacatcattcaccttctcacataatccataactacagtgcagctccgggcatgttcaacagctctcttcatgccctgcatctccaaaacaaggagaatgacatgctttcccacacagctaatgggttatcaaagatgcttccagctcttaaccatgatagaactgcttgtgtccaaggaggcttacacaaattaagtgatgctaatggtcaggaaaagcagccattggcactagtccagggtgtggcttctggtgcagaggacaacgatgaggtctggtcagacagcgagcagagctttctggatcctgacattgggggagtggccgtggctccaactcatgggtcaattctcattgagtgtgcaaagcgtgagctgcatgccacaacccctttaaagaatcccaataggaatcaccccaccaggatctccctcgtcttttaccagcataagagcatgaatgagccaaaacatggcttggctctttgggaagccaaaatggctgaaaaagcccgtgagaaagaggaagagtgtgaaaagtatggcccagactatgtgcctcagaaatcccatggcaaaaaagtgaaacgggagcctgctgagccacatgaaacttcagagcccacttacctgcgtttcatcaagtctcttgccgaaaggaccatgtccgtgaccacagactccacagtaactacatctccatatgccttcactcgggtcacagggccttacaacagatatatatgatatcacccccttttgttggttacctcacttgaaaagaccacaaccaacctgtcagtagtatagttctcatgacgtgggcagtggggaaaggtcacagtattcatgacaaatgtggtgggaaaaacctcagctcaccagcaacaaaagaggttatcttaccatagcacttaattttcactggctcccaagtggtcacagatggcatctaggaaaagaccaaagcattctatgcaaaaagaaggtggggaagaaagtgttccgcaatttacatttttaaacactggttctattattggacgagatgatatgtaaatgtgatcccccccccccgcttacaactctacacatctgtgaccacttttaataatatcaagtttgcatagtcatggaacacaaatcaaacaagtactgtagtattacagtgacaggaatcttaaaataccatctggtgctgaatatatgatgtactgaaatactggaattatggctttttgaaatgcagtttttactgtaatcttaacttttatttatcaaaatagctacaggaaacatgaatagcaggaaaacactgaatttgtttggatgttctaagaaatggtgctaagaaaatggtgtctttaatagctaaaaatttaatgcctttatatcatcaagatgctatcagtgtactccagtgcccttgaataataggggtaccttttcattcaagtttttatcataattacctattcttacacaagcttagtttttaaaatgtggacattttaaaggcctctggattttgctcatccagtgaagtccttgtaggacaataaacgtatatatgtacatatatacacaaacatgtatatgtgcacacacatgtatatgtataaatattttaaatggtgttttagaagcactttgtctacctaagctttgacaacttgaacaatgctaaggtactgagatgtttaaaaaacaagtttactttcattttagaatgcaaagttgatttttttaaggaaacaaagaaagcttttaaaatatttttgcttttagccatgcatctgctgatgagcaattgtgtccatttttaacacagccagttaaatccaccatggggcttactggattcaagggaatacgttagtccacaaaacatgttttctggtgctcatctcacatgctatactgtaaaacagttttatacaaaattgtatgacaagttcattgctcaaaaatgtacagttttaagaattttctattaactgcaggtaataattagctgcatgctgcagactcaacaaagctagttcactgaagcctatgctattttatggatcataggctcttcagagaactgaatggcagtctgcctttgtgttgataattatgtacattgtgacgttgtcatttcttagcttaagtgtcctctttaacaagaggattgagcagactgatgcctgcataagatgaataaacagggttagttccatgtgaatctgtcagttaaaaagaaacaaaaacaggcagctggtttgctgtggtggttttaaatcattaatttgtataaagaagtgaaagagttgtatagtaaattaaattgtaaacaaaacttttttaatgcaatgctttagtattttagtactgtaaaaaaattaaatatatacatatatatatatatatatatatatatatatatgagtttgaagcagaattcacatcatgatggtgctactcagcctgctacaaatatatcataatgtgagctaagaattcattaaatgtttgagtgatgttcctacttgtcatatacctcaacactagtttggcaataggatattgaactgagagtgaaagcattgtgtaccatcatttttttccaagtccttttttttattgttaaaaaaaaaagcataccttttttcaatacttgatttcttagcaagtataacttgaacttcaacctttttgttctaaaaattcagggatatttcagctcatgctctccctatgccaacatgtcacctgtgtttatgtaaaattgttgtaggttaataaatatattctttgtcagggatttaacccttttattttgaatcccttctattttacttgtacatgtgctgatgtaactaaaactaattttgtaaatctgttggctctttttattgtaaagaaaagcattttaaaagtttgaggaatcttttgactgtttcaagcaggaaaaaaaaattacatgaaaatagaatgcactgagttgataaagggaaaaattgtaaggcaggagtttggcaagtggctgttggccagagacttacttgtaactctctaaatgaagtttttttgatcctgtaatcactgaaggtacatactccatgtggacttcccttaaacaggcaaacacctacaggtatggtgtgcaacagattgtacaattacattttggcctaaatacatttttgcttactagtatttaaaataaattcttaatcagaggaggcctttgggttttattggtcaaatctttgtaagctggcttttgtctttttaaaaaatttcttgaatttgtggttgtgtccaatttgcaaacatttccaaaaatgtttgctttgcttacaaaccacatgattttaatgttttttgtataccataatatctagccccaaacatttgattactacatgtgcattggtgattttgatcatccattcttaatatttgatttctgtgtcacctactgtcatttgttaaactgctggccaacaagaacaggaagtatagtttggggggttggggagagtttacataaggaagagaagaaattgagtggcatattgtaaatatcagatctataattgtaaatataaaacctgcctcagttagaatgaatggaaagcagatctacaatttgctaatataggaatatcaggttgactatatagccatacttgaaaatgcttctgagtggtgtcaactttacttgaatgaatttttcatcttgattgacgcacagtgatgtacagttcacttctgaagctagtggttaacttgtgtaggaaacttttgcagtttgacactaagataacttctgtgtgcatttttctatgcttttttaaaaactagtttcatttcattttcatgagatgtttggtttataagatctgaggatggttataaatactgtaagtattgtaatgttatgaatgcaggttatttgaaagctgtttattattatatcattcctgataatgctatgtgagtgtttttaataaaatttatatttatttaatgcactctaagtgttgtcttcct

SEQ ID NO: 4111 - DNA, 10166 bp, Homo sapiens; identical to SEQ ID NO: 4109
  source 1..10166: mol_type = genomic DNA

SEQ ID NO: 4112 - DNA, 2093 bp, Homo sapiens
  source 1..2093: mol_type = genomic DNA
acctgctcctggggaaactacaccaaggccgccgctctggcctggggctccctcccacacggccttggccctctccccctcgccccgggaccgctccgcccctcccggatcccggtcggcggagcgcatttatttgcatatttctacctttgttccctgccagcggccaatcagcgcgcggggcgagacgaaggggctgggcggggctcgggctcctgctccggctcagctgcggcggccgcaggttccaaagcgggtccgagccgccgccgcgcgcgcgccgcgcactgcagccccaggccccggccccccacccacgtctgcgttgctgccccgcctgggccaggccccaaaggcaaggacaaagcagctgtcagggaacctccgccggagtcgaatttacgtgcagctgccggcaaccacaggttccaagatggtttgcgggggcttcgcgtgttccaagaactgcctgtgcgccctcaacctgctttacaccttggttagtctgctgctaattggaattgctgcgtggggcattggcttcgggctgatttccagtctccgagtggtcggcgtggtcattgcagtgggcatcttcttgttcctgattgctttagtgggtctgattggagctgtaaaacatcatcaggtgttgctatttttttatatgattattctgttacttgtatttattgttcagttttctgtatcttgcgcttgtttagccctgaaccaggagcaacagggtcagcttctggaggttggttggaacaatacggcaagtgctcgaaatgacatccagagaaatctaaactgctgtgggttccgaagtgttaacccaaatgacacctgtctggctagctgtgttaaaagtgaccactcgtgctcgccatgtgctccaatcataggagaatatgctggagaggttttgagatttgttggtggcattggcctgttcttcagttttacagagatcctgggtgtttggctgacctacagatacaggaaccagaaagacccccgcgcgaatcctagtgcattcctttgatgagaaaacaaggaagatttcctttcgtattatgatcttgttcactttctgtaattttctgttaagctccatttgccagtttaaggaaggaaacactatctggaaaagtaccttattgatagtggaattatatatttttactctatgtttctctacatgtttttttctttccgttgctgaaaaatatttgaaacttgtggtctctgaagctcggtggcacctggaatttactgtattcattgtcgggcactgtccactgtggcctttcttagcatttttacctgcagaaaaactttgtatggtaccactgtgttggttatatggtgaatctgaacgtacatctcactggtataattatatgtagcactgtgctgtgtagatagttcctactggaaaaagagtggaaatttattaaaatcagaaagtatgagatcctgttatgttaagggaaatccaaattcccaattttttttggtctttttaggaaagattgttgtggtaaaaagtgttagtataaaaatgataatttacttgtagtcttttatgattacaccaatgtattctagaaatagttatgtcttaggaaattgtggtttaatttttgacttttacaggtaagtgcaaaggagaagtggtttcatgaaatgttctaatgtataataacatttaccttcagcctccatcagaatggaacgagttttgagtaatcaggaagtatatctatatgatcttgatattgttttataataatttgaagtctaaaagactgcatttttaaacaagttagtattaatgcgttggcccacgtagcaaaaagatatttgattatcttaaaaattgttaaataccgttttcatgaaatttctcagtattgtaacagcaacttgtcaaacctaagcatatttgaatatgatctcccataatttgaaattgaaatcgtattgtgtggctctgtatattctgttaaaaaattaaaggacagaaacctttctttgtgtatgcatgtttgaattaaaagaaagtaatggaagaattgatcgatgaa

SEQ ID NO: 4113 - DNA, 2206 bp, Homo sapiens
  source 1..2206: mol_type = genomic DNA
agttgtggacgctcgtaagttttcggcagtttccggggagactcggggactccgcgtctcgctctctgtgttccaatcgcccggtgcggtggtgcagggtctcgggctagtcatggcgtccccgtctcggagactgcagactaaaccagtcattacttgtttcaagagcgttctgctaatctacacttttattttctggatcactggcgttatccttcttgcagttggcatttggggcaaggtgagcctggagaattacttttctcttttaaatgagaaggccaccaatgtccccttcgtgctcattgctactggtaccgtcattattcttttgggcacctttggttgttttgctacctgccgagcttctgcatggatgctaaaactgtatgcaatgtttctgactctcgtttttttggtcgaactggtcgctgccatcgtaggatttgttttcagacatgagattaagaacagctttaagaataattatgagaaggctttgaagcagtataactctacaggagattatagaagccatgcagtagacaagatccaaaatacgttgcattgttgtggtgtcaccgattatagagattggacagatactaattattactcagaaaaaggatttcctaagagttgctgtaaacttgaagattgtactccacagagagatgcagacaaagtaaacaatgaaggttgttttataaaggtgatgaccattatagagtcagaaatgggagtcgttgcaggaatttcctttggagttgcttgcttccaactgattggaatctttctcgcctactgcctctctcgtgccataacaaataaccagtatgagatagtgtaacccaatgtatctgtgggcctattcctctctacctttaaggacatttagggtcccccctgtgaattagaaagttgcttggctggagaactgacaacactacttactgatagaccaaaaaactacaccagtaggttgattcaatcaagatgtatgtagacctaaaactacaccaataggctgattcaatcaagatccgtgctcgcagtgggctgattcaatcaagatgtatgtttgctatgttctaagtccaccttctatcccattcatgttagatcgttgaaaccctgtatccctctgaaacactggaagagctagtaaattgtaaatgaagtaatactgtgttcctcttgactgttatttttcttagtagggggcctttggaaggcactgtgaatttgctattttgatgtagtgttacaagatggaaaattgattcctctgactttgctattgatgtagtgtgatagaaaattcacccctctgaactggctccttcccagtcaaggttatctggtttgattgtataatttgcaccaagaagttaaaatgttttatgactctctgttctgctgacaggcagagagtcacattgtgtaatttaatttcagtcagtcaatagatggcatccctcatcagggttgccagatggtgataacagtgtaaggccttgggtctaaggcatccacgactggaagggactactgatgttctgtgatacatcaggtttcagcacacaacttacatttctttgcctccaaattgaggcatttattatgatgttcatactttccctcttgtttgaaagtttctaattattaaatggtgtcggaattgttgtattttccttaggaattcagtggaacttatcttcattaaatttagctggtaccaggttgatatgacttgtcaatattatggtcaactttaagtcttagttttcgtttgtgcctttgattaataagtataactcttatacaataaatactgctttcctctaaaaagatcgtgtttaaattaacttgtagaaaatctgctggaatggttgttgttttccactgagaaagctaagccctacatttctattcagagtactgtttttagatgtgaaatataagcctgcggccttaactctgtattaaaaaaaatgtttttgtttaaaaaaaactgttcccataggtgcagcaaaccaccatggcacatgtatacctatgtaacaaacctgcacattctgcacatgtatcccagaacttaatgtaaacaaaaaaatcttaaagtgcaaatattaaaaaaaactgttctctgtgaaaaaaattatattccatgttataaagtagcatatgactagtgttctcctag

SEQ ID NO: 4114 - DNA, 1099 bp, Homo sapiens
  source 1..1099: mol_type = genomic DNA
atactttaccctctacaaaattgtacagtgtttccggcccttctcagttgtggacgctcgtaagttttcggcagtttccggggagactcggggactccgcgtctcgctctctgtgttccaatcgcccggtgcggtggtgcagggtctcgggctagtcatggcgtccccgtctcggagactgcagactaaaccagtcattacttgtttcaagagcgttctgctaatctacacttttattttctggatcactggcgttatccttcttgcagttggcatttggggcaaggtgagcctggagaattacttttctcttttaaatgagaaggccacctttggttgttttgctacctgccgagcttctgcatggatgctaaaactgtatgcaatgtttctgactctcgtttttttggtcgaactggtcgctgccatcgtaggatttgttttcagacatgagattaagaacagctttaagaataattatgagaaggctttgaagcagtataactctacaggagattatagaagccatgcagtagacaagatccaaaatacgttgcattgttgtggtgtcaccgattatagagattggacagatactaattattactcagaaaaaggatttcctaagagttgctgtaaacttgaagattgtactccacagagagatgcagacaaagtaaacaatgaaggttgttttataaaggtgatgaccattatagagtcagaaatgggagtcgttgcaggaatttcctttggagttgcttgcttccaactgattggaatctttctcgcctactgcctctctcgtgccataacaaataaccagtatgagatagtgtaacccaatgtatctgtgggcctattcctctctacctttaaggacatttagggtcccccctgtgaattagaaagttgcttggctggagaactgacaacactacttactgatagaccaaaaaactacaccagtaggttgattcaatcaagatgtatgtagacctaaaactacaccaataggctgattcaatcaagatccgtgctcgcagtgggctgattcaatcaagatgtatgtttgctatgttctaagtccaccttctat

SEQ ID NO: 4115 - DNA, 5217 bp, Homo sapiens
  source 1..5217: mol_type = genomic DNA
ctcggggccacggtccccccgcagcgctagtcccgggcccgcgagcaccggcccccgccacccgcaggttgcggagggaggagggcgggagcgggcggcgcggagccgggaggcgggggaggggccggcgtccgaggcggcggcggcggcggctggagcagcctctggcagcagcggggagaatgggagtgcggggcgccagaccgccgcggggtgtcacggccgccacgaagcctgcgaggcgcggggccggcgcccgcggcttttaaacccgggaaggcgcggcggcggcggcggcggcgggcagatcgcggcgcgcaccaggcgccggggcggcggccgaatggagagaaagggctcggcggccggggccaaggggaacccgagcccgcccgcggccggagaggggcagcggccaccgccgccgctgtgcgtcccgggcggcggcggaggagccccagcgaggggccaggtcggggcggcggccgagccggccgagctcatccgacgagcgcacgagttcaaaagccaaggggcgcagtgctacaaggacaagaaattccgtgaagccataggcaaataccaccgggcgttgctggagctgaaggggctgctgccgccccccggggaacgggagcgggactcgcgcccggcctccccggctggggccctgaagcccggccgcctctcggaggagcagagcaagacggtggaagccatcgagatcgactgttacaacagcctggcagcctgcctgctccaggctgagctggtaaactatgaacgagtcaaggaatattgcctcaaagtcttgaagaaggaaggggagaacttcaaggccctttaccggtctggtgtggccttctaccaccttggggactatgacaaagcactctactacctgaaagaagcaaggacccaacaaccaacagacaccaacgtgattcggtatatccagctgacggagatgaaactcagccgatgctcccagagagaaaaagaagccatgtaaccaggaagcagctccagagctgcgcccacgcctgaccggggacttccaggcatcccctggcagagagccccgtcctggattctgtccctttctccccacttcttctggctcctcatttttcctcctgttgcaccccagctctttgtctcctcccagtacgaaaaggagagatgcaaatttggaatctggtaggtcgcccagacaatggagacatcctctcctctagcaggtcagcgactgagaggggcctgacttctgctgggacagctggagaggagtctcatgggctgggatgctgttgtggctttgactttggccagtgcttctgacagaggcggagcctggcaagtgtaccatcccacaggcagcaggcacacagcccatgggctggatccttccacactttcctgacagaccagaaccagagcatctcgaggcaactgttagaaatccagggacgagacaaacagagaagcgctggtgaagccaacatagagactgtcaatgtgtacactggagttcccacccccaccccccacccgtcacttagcccctgcctccttcccccactcgttgtcttggcttgtgctttctcctctccccatcggggatccgagactctgccaggattcacatgccactgaagcccactcagtgccctctggtgaccacacataccattcccccggactcccacccagcaggcagctgtgaccgcagaagggcaggatgaagtgggccaaggtttgggacaggttgactgtgtaggtgacagggagggaaagatgatggccaggggaaagagcatcgtataggctaggggattgaactgtggactgattcagtgtaaataaaaacaaattaacaggtagtagttcctgtcagttctgttggaagcagcccactccctcacttttactccttcctccaaccctcaatcagagctacttacagccaggcaggatggggctttccccaaagcaattggccgtttgtccagtggcagacaatggtggctacagcctttgtgcttttaagagtgggctgggattgtggagactgcccaggggcttggctttgtcagaacttgtacaatcttcttttgatgaaattatctgaactcaacatctagcacatagaatgtgttcaacaaatgcttgttgaatgaataaattatgactgcagactggctctcctgccttaaactaatttcatcccagcctagtctcctgatgtctgtgctcgttatgctatgccatgttgcttcagtcaaacaagaaacacttactgagggcatattgtttgcccatcattgtgcaatatgctgtgggacatgggatgtcgtctcagtcttcaaggaaatggaagggttaagaaatgcatatgagattattaccaatgacaccgttaatttatatgatgctttaaaattatcagagcactttcatgtatttttcgtgtgactagtgaaaaagacaatgttgtacaaaattaaaatatatacagatgcaataatgtgaatagttaggatttattaaatgcattatcttcagatctttacatgtataatctcatttctttcatgcagttactctgggatactgttcccatttgatgggtaagaatattgaaaaccagaaaaattaattatcccaaggttgcatggcctttagtggcatagctaggatttgaaccaggcctgcctgactccagagctctggctagtatctatgctatacttagttgcctctctgtaagtataatattgggcaattataaccatttgagaacaggacaatatgtattaacctgaaaagtgttcatgatgtcagtgatagtacatggcctccttatgtatttactcaagggccccaaaagaccagaggccagaatccctagtagtcagagcagtgacaggtcagaaaaaggcagctgaggtccaatagttatgtctgtgtattgctcattctacttactgatggagccagcatgtatctcaacaactcacctagcattcatcacccatccccagcattgggaaagggtcacaattaagaccgaaaggaaacacaaagttaaatatgggttaattatgtaagcagatgccccaccacggcaggatccaatcacagccgaggggcccagaagagagcagcgtaagttatattcacatagttccccaaaggctttcaacgggggctacaggaaggtgctagaaatattgaggggcctgccattactcacctagagctcactctctggagaagaggaaaaggaagaagctatttcagctgccacattctccccaatccctactatattatgctgtctttcctcttcctcctagctggctttacatgaccctaacccaaaactaccctatggccccacacgggaatgtgttcaaacgccccgacccccacccccacccccattcccaagcctccaacttagaacgtttgtgatttggcagatggtttgttaggatctgaaggatgaagagaagggtagaggtcacctggagaatgagttcaaactgccagggtcttcccttggtctttgtgcgtcaggaaggactccgagtaattattccctatgcagagacaggagagaggtcttgtttacatgagtgtgctggggcagggctggacaatccaggatatgattgtagccatcccatgtagaaagatcaaaaaccagaacgaaatgaagacagcctctcagaacctcatagaacaagcgtccaggtcatctgcttgtttggtgacttagatatacaggcttactggaactccattcactgtgacctgaagttaaataatcccaaagagaaaaagctacctggggtattggttgatgtttggggtgatagggctgaattttctgtgcatttgtccaacaaaggctttagagcacaaaaccaggttcattctccctaccaaatcttcagcttccttctcctcatccctccccaaaacaagaactgtgatttaattccgtacgttgcggatgtcactgctgacctatgtagctggagtactaatcaggcatctgacctgcactgtcatcccctgcctggacttttgcgatggactctttgggggaaaaactaacgctttttaattattgtgaaagcatcatgtgtgtattgtagaagttttaggaaaaaaaggacaaaatccaatccataagcttaccacccaagacaaacgtgtattcttttgaatataccttttagttctttttggtgtaaatgtacacacgcacacacagttgtggatttttttaaacaaaaactggatacactgaatatactctttaataacttttcaagtgtgtatttatattttagaatatgtaatcctacacagatacaaaattcaaaaagtacaaactgctctgtagtcagaagtaaatcttctccctaccccgtctgccagcatctagtttccctctaatttattttgcatcctagtggagatgcttacacattgtcaaacatatgtatatattcttttatcacacacaaatggcagcatattggacactttttgttttttgctccttctgttccttcacttaataatatcacgaacattttcggcatatcaaactttctcaacagcatcttcattgtatggatggaccctttttttatcatcaatcctcaaatagtgattatttcatttgttcccaatcttcattgtaaatagtgttgcaactgacattcttgtagctaaattttgcacatgtctataacgatttccttaggataaactccaagaagagacttgcttggctatttttaagaattttgatacatgttgccaaccaccctccagaaagtttgtaccaaaacgctctcctatttggatcctagagagtaccctgtttcctgcaccctaacactaggtatcatcacttatcaaatctttcccaatttggtagctgggataatagtatgtcaatgttattttaactttctttgattcttcgcgaataacattttcatatgcttattgaccatttgtacttctttctttgtgaattttctatttatttgatattggtatgtttattatcaatttgtaattttattaagaatattatttttgtcaagaaatgctgcaaatatgctttccaagtgctttgctttcaaattttgtttatggtgctttttgacatacataaattcttaattctgc

SEQ ID NO: 4116 - DNA, 635 bp, Homo sapiens
  source 1..635: mol_type = genomic DNA
tacagccgctcgtcagactccagcagccaagatggtgaagcagatcgagagcaagactgcttttcaggaagccttggacgctgcaggtgataaacttgtagtagttgacttctcagccacgtggtgtgggccttgcaaaatgatcaagcctttctttcatgatgttgcttcagagtgtgaagtcaaatgcatgccaacattccagttttttaagaagggacaaaaggtgggtgaattttctggagccaataaggaaaagcttgaagccaccattaatgaattagtctaatcatgttttctgaaaatataaccagccattggctatttaaaacttgtaatttttttaatttacaaaaatataaaatatgaagacataaacccagttgccatctgcgtgacaataaaacattaatgctaacactttttaaaaccgtctcatgtctgaatagctttcaaaataaatgtgaaatggtcatttaatgtattttcctatattctcaatcactttttagtaaccttgtaggccactgattattttaagattttaaaaattattattgctaccttaatgtattgctacaaaaatctcttgttgggggcaatgcaggtaataaagtagtatgttgttatttgtt

SEQ ID NO: 4117 - DNA, 869 bp, Homo sapiens
  source 1..869: mol_type = genomic DNA
ctcgcaggctccaggggcggggcgtggccggggcgcagcgacgggcgcggaggtccggccgggcgcgcgcgcccccgccacacgcacgccgggcgtgccagtttataaagggagagagcaagcagcgagtcttgaagctctgtttggtgctttggatccatttccatcggtccttacagccgctcgtcagactccagcagccaagatggtgaagcagatcgagagcaagactgcttttcaggaagccttggacgctgcaggtgataaacttgtagtagttgacttctcagccacgtggtgtgggccttgcaaaatgatcaagcctttctttcattccctctctgaaaagtattccaacgtgatattccttgaagtagatgtggatgactgtcaggatgttgcttcagagtgtgaagtcaaatgcatgccaacattccagttttttaagaagggacaaaaggtgggtgaattttctggagccaataaggaaaagcttgaagccaccattaatgaattagtctaatcatgttttctgaaaatataaccagccattggctatttaaaacttgtaatttttttaatttacaaaaatataaaatatgaagacataaacccagttgccatctgcgtgacaataaaacattaatgctaacactttttaaaaccgtctcatgtctgaatagctttcaaaataaatgtgaaatggtcatttaatgtattttcctatattctcaatcactttttagtaaccttgtaggccactgattattttaagattttaaaaattattattgctaccttaatgtattgctacaaaaatctcttgttgggggcaatgcaggtaataaagtagtatgttgttatttgtt

SEQ ID NO: 4118 - DNA, 2927 bp, Homo sapiens
  source 1..2927: mol_type = genomic DNA
gacgtttccgcctcctgcttgaaactaacccctctttttctccaaaggagtgcttgtggagatcggatcttttctccagcaattgggggaaagaaggctttttctctgacttcgcttagtgtaaccagcggcgtatattttttaggcgccttttcgaaaacctagtagttaatattcatttgtttaaatcttattttatttttaagctcaaactgcttaagaataccttaattccttaaagtgaaataattttttgcaaaggggtttcctcgatttggagctttttttttcttccaccgtcatttctaactcttaaaaccaactcagttccatcatggtgatgttcaagaagatcaagtcttttgaggtggtctttaacgaccctgaaaaggtgtacggcagtggcgagaaggtggctggccgggtgatagtggaggtgtgtgaagttactcgtgtcaaagccgttaggatcctggcttgcggagtggctaaagtgctttggatgcagggatcccagcagtgcaaacagacttcggagtacctgcgctatgaagacacgcttcttctggaagaccagccaacaggtgagaatgagatggtgatcatgagacctggaaacaaatatgagtacaagttcggctttgagcttcctcaggggcctctgggaacatccttcaaaggaaaatatgggtgtgtagactactgggtgaaggcttttcttgaccgcccgagccagccaactcaagagacaaagaaaaactttgaagtagtggatctggtggatgtcaatacccctgatttaatggcacctgtgtctgctaaaaaagaaaagaaagtttcctgcatgttcattcctgatgggcgggtgtctgtctctgctcgaattgacagaaaaggattctgtgaaggtgatgagatttccatccatgctgactttgagaatacatgttcccgaattgtggtccccaaagctgccattgtggcccgccacacttaccttgccaatggccagaccaaggtgctgactcagaagttgtcatcagtcagaggcaatcatattatctcagggacatgcgcatcatggcgtggcaagagccttcgggttcagaagatcaggccttctatcctgggctgcaacatccttcgagttgaatattccttactgatctatgttagcgttcctggatccaagaaggtcatccttgacctgcccctggtaattggcagcagatcaggtctaagcagcagaacatccagcatggccagccgaaccagctctgagatgagttgggtagatctgaacatccctgataccccagaagctcctccctgctatatggatgtcattcctgaagatcaccgattggagagcccaaccactcctctgctagatgacatggatggctctcaagacagccctatctttatgtatgcccctgagttcaagttcatgccaccaccgacttatactgaggtggatccctgcatcctcaacaacaatgtgcagtgagcatgtggaagaaaagaagcagctttacctacttgtttctttttgtctctcttcctggacactcactttttcagagactcaacagtctctgcaatggagtgtgggtccaccttagcctctgacttcctaatgtaggaggtggtcagcaggcaatctcctgggccttaaaggatgcggactcatcctcagccagcgcccatgttgtgatacaggggtgtttgttggatgggtttaaaaataactagaaaaactcaggcccatccattttctcagatctccttgaaaattgaggccttttcgatagtttcgggtcaggtaaaaatggcctcctggcgtaagcttttcaaggttttttggaggctttttgtaaattgtgataggaactttggaccttgaacttatgtatcatgtggagaagagccaatttaacaaactaggaagatgaaaagggaaattgtggccaaaactttgggaaaaggaggttcttaaaatcagtgtttcccctttgtgcacttgtagaaaaaaaagaaaaaccttctagagctgatttgatggacaatggagagagctttccctgtgattataaaaaaggaagctagctgctctacggtcatctttgcttaagagtatactttaacctggcttttaaagcagtagtaactgccccaccaaaggtcttaaaagccatttttggagcctattgcactgtgttctcctactgcaaatattttcatatgggaggatggttttctcttcatgtaagtccttggaattgattctaaggtgatgttcttagcactttaattcctgtcaaattttttgttctccccttctgccatcttaaatgtaagctgaaactggtctactgtgtctctagggttaagccaaaagacaaaaaaaattttactacttttgagattgccccaatgtacagaattatataattctaacgcttaaatcatgtgaaagggttgctgctgtcagccttgcccactgtgacttcaaacccaaggaggaactcttgatcaagatgccgaaccctgtgttcagaacctccaaatactgccatgagaaactagagggcaggtcttcataaaagccctttgaacccccttcctgccctgtgttaggagatagggatattggcccctcactgcagctgccagcacttggtcagtcactctcagccatagcactttgttcactgtcctgtgtcagagcactgagctccacccttttctgagagttattacagccagaaagtgtgggctgaagatggttggtttcatgtttttgtattatgtatctttttgtatggtaaagactatattttgtacttaaccagatatatttttaccccagatggggatattctttgtaaaaaatgaaaataaagtttttttaatggaaaaaaaaa

SEQ ID NO: 4119 - DNA, 3790 bp, Homo sapiens
  source 1..3790: mol_type = genomic DNA
ggcagttagcccgcccgctcggcgcagggcgtggcttctcgtagccattaggaaacagcaaccctttcacctcagttttcttcactccggcatttgcagcagagcgaaaggtggtcgagtcctgaaggagggcctgatgtcttcatcattctcaaattcttgtaagctctgcgtcgggtgaaaccagacaaagccgcgagcccagggatgggagcacgcgggggacggcctgccggcggggacgacagcattgcgcctgggtgcagcagtgtgcgtctcggggaagggaagatattttaaggcgtgtctgagcagacggggaggcttttccaaacccaggcagcttcgtggcgtgtgcggtttcgacccggtcacacaaagcttcagcatgtcatgtggcttatcaggagggcagacttcaaaagctactaaaaatgaacggccctgaagatcttcccaagtcctatgactatgaccttatcatcattggaggtggctcaggaggtctggcagctgctaaggaggcagcccaatatggcaagaaggtgatggtcctggactttgtcactcccacccctcttggaactagatggggtctcggaggaacatgtgtgaatgtgggttgcatacctaaaaaactgatgcatcaagcagctttgttaggacaagccctgcaagactctcgaaattatggatggaaagtcgaggagacagttaagcatgattgggacagaatgatagaagctgtacagaatcacattggctctttgaattggggctaccgagtagctctgcgggagaaaaaagtcgtctatgagaatgcttatgggcaatttattggtcctcacaggattaaggcaacaaataataaaggcaaagaaaaaatttattcagcagagagatttctcattgccactggtgaaagaccacgttacttgggcatccctggtgacaaagaatactgcatcagcagtgatgatcttttctccttgccttactgcccgggtaagaccctggttgttggagcatcctatgtcgctttggagtgcgctggatttcttgctggtattggtttagacgtcactgttatggttaggtccattcttcttagaggatttgaccaggacatggccaacaaaattggtgaacacatggaagaacatggcatcaagtttataagacagttcgtaccaattaaagttgaacaaattgaagcagggacaccaggccgactcagagtagtagctcagtccaccaatagtgaggaaatcattgaaggagaatataatacggtgatgctggcaataggaagagatgcttgcacaagaaaaattggcttagaaaccgtaggggtgaagataaatgaaaagactggaaaaatacctgtcacagatgaagaacagaccaatgtgccttacatctatgccattggcgatatattggaggataaggtggagctcaccccagttgcaatccaggcaggaagattgctggctcagaggctctatgcaggttccactgtcaagtgtgactatgaaaatgttccaaccactgtatttactcctttggaatatggtgcttgtggcctttctgaggagaaagctgtggagaagtttggggaagaaaatattgaggtttaccatagttacttttggccattggaatggacgattccgtcaagagataacaacaaatgttatgcaaaaataatctgtaatactaaagacaatgaacgtgttgtgggctttcacgtactgggtccaaatgctggagaagttacacaaggctttgcagctgcgctcaaatgtggactgaccaaaaagcagctggacagcacaattggaatccaccctgtctgtgcagaggtattcacaacattgtctgtgaccaagcgctctggggcaagcatcctccaggctggctgctgaggttaagccccagtgtggatgctgttgccaagactgcaaaccactggctcgtttccgtgcccaaatccaaggcgaagttttctagagggttcttgggctcttggcacctgcgtgtcctgtgcttaccaccgcccaaggcccccttggatctcttggataggagttggtgaatagaaggcaggcagcatcacactggggtcactgacagacttgaagctgacatttggcagggcatcgaagggatgcatccatgaagtcaccagtctcaagcccatgtggtaggcggtgatggaacaactgtcaaatcagttttagcatgacctttccttgtggattttcttattctcgttgtcaagttttctagggttgaatttttttcttttttctccatggtgttaatgatattagagatgaaaaacgttagcagttgatttttgtccaaaagcaagtcatggctagagtatccatgcaaggtgtcttgttgcatggaagggatagtttggctcccttggaggctatgtaggcttgtcccgggaaagagaactgtcctgcagctgaaatggactgttctttactgacctgctcagcagtttcttctctcatatattcccaaaacaagtacatctgcgatcaactctagccaaatttgcccctgtgtgctacatgatggatgattattattttaaggtctgtttaggaagggaaatggctacttggccagccattgcctggcatttggtagtatagtatgattctcaccattatttgtcatggaggcagacatacaccagaaatgggggagaaacagtacatatctttctgtctttagtttattgtgtgctggtctaagcaagctgagatcatttgcaatggaaaacacgtaacttgtttaaaagtttttctggtagctttagctttatgctaaaaaaaataatgacattgggtatctatttctttctaagactacattagtaggaaaataagtcttttcatgcttatgatttagctgttttgtggtaattgctttttaaaggaagttattaatatcataagttattattaatattttgaacacaggtggatgtgaaggattttcatttaaaaaccaagtggttttgactttttctgttgaatgaacaactgtgccttgtggaatttttgcagaagtgtttatgctttgttagcatttcaacttgcattattataaagaggtattaatgcctcagttatgtgtttgtcaatgtactggctgaggattctatctcagctgtcttttctaactgtgtaggttgagttttgaacacgtgcttgtggacatcaggcctcctgccagcagttcttgaagcttctttttcattcctgctactctacctgtatttctcagttgcagcactgagtggtcaaaatacatttctgggccacctcagggaacccatgcatctgcctggcatttaggcagcagagcccctgaccgtcccccacagggctctgcctcacgtcctcatctcatttggctgtgtaaagaaatgggaaaagggaaaaggagagagcaattgaggcagttgaccatattcagttttatttatttatttttaatttgtttttttctccaagtccaccagtctctgaaattagaacagtaggcggtatgagataatcaggcctaatcatgttgtgattctcttttcttagtggagtggaatgttctatccccacaagaaggattatatcttatagacttgtcttgttcagattctgtatttacccattttattgaaacatatactaagttccatgtatttttgttacaaatcttctgaaaaaaaacaaaacaatgtgaaacattaaaattaaaaggcatt

SEQ ID NO: 4120 - DNA, 3858 bp, Homo sapiens
  source 1..3858: mol_type = genomic DNA
agtgtgcggatttgccggggtcagactccaagcttgattgtgagttctagcctttgtcagaaatgcagcaagtcatgctaacttgcaagggagtcaacagagggcacgcggtgcctgcggggccgggacggaagccccgcccccggcgcagttcccgcctgttagcgggggagaagcaccttacacgctccgctctgcttttgtgccacacagaggacggtcgggccctggaaggaacgctctcggaattggccgcggaaaccgatctgcccgttgtgtttgtgaaacagagaaagataggcggccatggtccaaccttgaaggcttatcaggagggcagacttcaaaagctactaaaaatgaacggccctgaagatcttcccaagtcctatgactatgaccttatcatcattggaggtggctcaggaggtctggcagctgctaaggaggcagcccaatatggcaagaaggtgatggtcctggactttgtcactcccacccctcttggaactagatggggtctcggaggaacatgtgtgaatgtgggttgcatacctaaaaaactgatgcatcaagcagctttgttaggacaagccctgcaagactctcgaaattatggatggaaagtcgaggagacagttaagcatgattgggacagaatgatagaagctgtacagaatcacattggctctttgaattggggctaccgagtagctctgcgggagaaaaaagtcgtctatgagaatgcttatgggcaatttattggtcctcacaggattaaggcaacaaataataaaggcaaagaaaaaatttattcagcagagagatttctcattgccactggtgaaagaccacgttacttgggcatccctggtgacaaagaatactgcatcagcagtgatgatcttttctccttgccttactgcccgggtaagaccctggttgttggagcatcctatgtcgctttggagtgcgctggatttcttgctggtattggtttagacgtcactgttatggttaggtccattcttcttagaggatttgaccaggacatggccaacaaaattggtgaacacatggaagaacatggcatcaagtttataagacagttcgtaccaattaaagttgaacaaattgaagcagggacaccaggccgactcagagtagtagctcagtccaccaatagtgaggaaatcattgaaggagaatataatacggtgatgctggcaataggaagagatgcttgcacaagaaaaattggcttagaaaccgtaggggtgaagataaatgaaaagactggaaaaatacctgtcacagatgaagaacagaccaatgtgccttacatctatgccattggcgatatattggaggataaggtggagctcaccccagttgcaatccaggcaggaagattgctggctcagaggctctatgcaggttccactgtcaagtgtgactatgaaaatgttccaaccactgtatttactcctttggaatatggtgcttgtggcctttctgaggagaaagctgtggagaagtttggggaagaaaatattgaggtttaccatagttacttttggccattggaatggacgattccgtcaagagataacaacaaatgttatgcaaaaataatctgtaatactaaagacaatgaacgtgttgtgggctttcacgtactgggtccaaatgctggagaagttacacaaggctttgcagctgcgctcaaatgtggactgaccaaaaagcagctggacagcacaattggaatccaccctgtctgtgcagagtttttttcatttatttgagatagggttcctgtcacccaggctggagtgcagtggtgtgatctcagttcactgcagccttgacctttcaagctcaagcgatgttcctgcctcagtctcctgagtagctgggaccacaggtattcacaacattgtctgtgaccaagcgctctggggcaagcatcctccaggctggctgctgaggttaagccccagtgtggatgctgttgccaagactgcaaaccactggctcgtttccgtgcccaaatccaaggcgaagttttctagagggttcttgggctcttggcacctgcgtgtcctgtgcttaccaccgcccaaggcccccttggatctcttggataggagttggtgaatagaaggcaggcagcatcacactggggtcactgacagacttgaagctgacatttggcagggcatcgaagggatgcatccatgaagtcaccagtctcaagcccatgtggtaggcggtgatggaacaactgtcaaatcagttttagcatgacctttccttgtggattttcttattctcgttgtcaagttttctagggttgaatttttttcttttttctccatggtgttaatgatattagagatgaaaaacgttagcagttgatttttgtccaaaagcaagtcatggctagagtatccatgcaaggtgtcttgttgcatggaagggatagtttggctcccttggaggctatgtaggcttgtcccgggaaagagaactgtcctgcagctgaaatggactgttctttactgacctgctcagcagtttcttctctcatatattcccaaaacaagtacatctgcgatcaactctagccaaatttgcccctgtgtgctacatgatggatgattattattttaaggtctgtttaggaagggaaatggctacttggccagccattgcctggcatttggtagtatagtatgattctcaccattatttgtcatggaggcagacatacaccagaaatgggggagaaacagtacatatctttctgtctttagtttattgtgtgctggtctaagcaagctgagatcatttgcaatggaaaacacgtaacttgtttaaaagtttttctggtagctttagctttatgctaaaaaaaataatgacattgggtatctatttctttctaagactacattagtaggaaaataagtcttttcatgcttatgatttagctgttttgtggtaattgctttttaaaggaagttattaatatcataagttattattaatattttgaacacaggtggatgtgaaggattttcatttaaaaaccaagtggttttgactttttctgttgaatgaacaactgtgccttgtggaatttttgcagaagtgtttatgctttgttagcatttcaacttgcattattataaagaggtattaatgcctcagttatgtgtttgtcaatgtactggctgaggattctatctcagctgtcttttctaactgtgtaggttgagttttgaacacgtgcttgtggacatcaggcctcctgccagcagttcttgaagcttctttttcattcctgctactctacctgtatttctcagttgcagcactgagtggtcaaaatacatttctgggccacctcagggaacccatgcatctgcctggcatttaggcagcagagcccctgaccgtcccccacagggctctgcctcacgtcctcatctcatttggctgtgtaaagaaatgggaaaagggaaaaggagagagcaattgaggcagttgaccatattcagttttatttatttatttttaatttgtttttttctccaagtccaccagtctctgaaattagaacagtaggcggtatgagataatcaggcctaatcatgttgtgattctcttttcttagtggagtggaatgttctatccccacaagaaggattatatcttatagacttgtcttgttcagattctgtatttacccattttattgaaacatatactaagttccatgtatttttgttacaaatcttctgaaaaaaaacaaaacaatgtgaaacattaaaattaaaaggcattaataat

SEQ ID NO: 4121 - DNA, 3900 bp, Homo sapiens
  source 1..3900: mol_type = genomic DNA
ggcagttagcccgcccgctcggcgcagggcgtggcttctcgtagccattaggaaacagcaaccctttcacctcagttttcttcactccggcatttgcagcagagcgaaaggtggtcgagtcctgaaggagggcctgatgtcttcatcattctcaaattcttgtaagctctgcgtcgggtgaaaccagacaaagccgcgagcccagggatgggagcacgcgggggacggcctgccggcggggacgacagcattgcgcctgggtgcagcagtgtgcgtctcggggaagggaagatattttaaggcgtgtctgagcagacggggaggcttttccaaacccaggcagcttcgtggcgtgtgcggtttcgacccggtcacacaaagcttcagcatgtcatgtgaggacggtcgggccctggaaggaacgctctcggaattggccgcggaaaccgatctgcccgttgtgtttgtgaaacagagaaagataggcggccatggtccaaccttgaaggcttatcaggagggcagacttcaaaagctactaaaaatgaacggccctgaagatcttcccaagtcctatgactatgaccttatcatcattggaggtggctcaggaggtctggcagctgctaaggaggcagcccaatatggcaagaaggtgatggtcctggactttgtcactcccacccctcttggaactagatggggtctcggaggaacatgtgtgaatgtgggttgcatacctaaaaaactgatgcatcaagcagctttgttaggacaagccctgcaagactctcgaaattatggatggaaagtcgaggagacagttaagcatgattgggacagaatgatagaagctgtacagaatcacattggctctttgaattggggctaccgagtagctctgcgggagaaaaaagtcgtctatgagaatgcttatgggcaatttattggtcctcacaggattaaggcaacaaataataaaggcaaagaaaaaatttattcagcagagagatttctcattgccactggtgaaagaccacgttacttgggcatccctggtgacaaagaatactgcatcagcagtgatgatcttttctccttgccttactgcccgggtaagaccctggttgttggagcatcctatgtcgctttggagtgcgctggatttcttgctggtattggtttagacgtcactgttatggttaggtccattcttcttagaggatttgaccaggacatggccaacaaaattggtgaacacatggaagaacatggcatcaagtttataagacagttcgtaccaattaaagttgaacaaattgaagcagggacaccaggccgactcagagtagtagctcagtccaccaatagtgaggaaatcattgaaggagaatataatacggtgatgctggcaataggaagagatgcttgcacaagaaaaattggcttagaaaccgtaggggtgaagataaatgaaaagactggaaaaatacctgtcacagatgaagaacagaccaatgtgccttacatctatgccattggcgatatattggaggataaggtggagctcaccccagttgcaatccaggcaggaagattgctggctcagaggctctatgcaggttccactgtcaagtgtgactatgaaaatgttccaaccactgtatttactcctttggaatatggtgcttgtggcctttctgaggagaaagctgtggagaagtttggggaagaaaatattgaggtttaccatagttacttttggccattggaatggacgattccgtcaagagataacaacaaatgttatgcaaaaataatctgtaatactaaagacaatgaacgtgttgtgggctttcacgtactgggtccaaatgctggagaagttacacaaggctttgcagctgcgctcaaatgtggactgaccaaaaagcagctggacagcacaattggaatccaccctgtctgtgcagaggtattcacaacattgtctgtgaccaagcgctctggggcaagcatcctccaggctggctgctgaggttaagccccagtgtggatgctgttgccaagactgcaaaccactggctcgtttccgtgcccaaatccaaggcgaagttttctagagggttcttgggctcttggcacctgcgtgtcctgtgcttaccaccgcccaaggcccccttggatctcttggataggagttggtgaatagaaggcaggcagcatcacactggggtcactgacagacttgaagctgacatttggcagggcatcgaagggatgcatccatgaagtcaccagtctcaagcccatgtggtaggcggtgatggaacaactgtcaaatcagttttagcatgacctttccttgtggattttcttattctcgttgtcaagttttctagggttgaatttttttcttttttctccatggtgttaatgatattagagatgaaaaacgttagcagttgatttttgtccaaaagcaagtcatggctagagtatccatgcaaggtgtcttgttgcatggaagggatagtttggctcccttggaggctatgtaggcttgtcccgggaaagagaactgtcctgcagctgaaatggactgttctttactgacctgctcagcagtttcttctctcatatattcccaaaacaagtacatctgcgatcaactctagccaaatttgcccctgtgtgctacatgatggatgattattattttaaggtctgtttaggaagggaaatggctacttggccagccattgcctggcatttggtagtatagtatgattctcaccattatttgtcatggaggcagacatacaccagaaatgggggagaaacagtacatatctttctgtctttagtttattgtgtgctggtctaagcaagctgagatcatttgcaatggaaaacacgtaacttgtttaaaagtttttctggtagctttagctttatgctaaaaaaaataatgacattgggtatctatttctttctaagactacattagtaggaaaataagtcttttcatgcttatgatttagctgttttgtggtaattgctttttaaaggaagttattaatatcataagttattattaatattttgaacacaggtggatgtgaaggattttcatttaaaaaccaagtggttttgactttttctgttgaatgaacaactgtgccttgtggaatttttgcagaagtgtttatgctttgttagcatttcaacttgcattattataaagaggtattaatgcctcagttatgtgtttgtcaatgtactggctgaggattctatctcagctgtcttttctaactgtgtaggttgagttttgaacacgtgcttgtggacatcaggcctcctgccagcagttcttgaagcttctttttcattcctgctactctacctgtatttctcagttgcagcactgagtggtcaaaatacatttctgggccacctcagggaacccatgcatctgcctggcatttaggcagcagagcccctgaccgtcccccacagggctctgcctcacgtcctcatctcatttggctgtgtaaagaaatgggaaaagggaaaaggagagagcaattgaggcagttgaccatattcagttttatttatttatttttaatttgtttttttctccaagtccaccagtctctgaaattagaacagtaggcggtatgagataatcaggcctaatcatgttgtgattctcttttcttagtggagtggaatgttctatccccacaagaaggattatatcttatagacttgtcttgttcagattctgtatttacccattttattgaaacatatactaagttccatgtatttttgttacaaatcttctgaaaaaaaacaaaacaatgtgaaacattaaaattaaaaggcatt

SEQ ID NO: 4122 - DNA, 3488 bp, Homo sapiens
  source 1..3488: mol_type = genomic DNA
atgttgtccaggctggtcttgaactcctgggctcaagcgatcatccggcctcggcctcctaaagtgctgggactgcaggtcacgacatttagtgaggcttatcaggagggcagacttcaaaagctactaaaaatgaacggccctgaagatcttcccaagtcctatgactatgaccttatcatcattggaggtggctcaggaggtctggcagctgctaaggaggcagcccaatatggcaagaaggtgatggtcctggactttgtcactcccacccctcttggaactagatggggtctcggaggaacatgtgtgaatgtgggttgcatacctaaaaaactgatgcatcaagcagctttgttaggacaagccctgcaagactctcgaaattatggatggaaagtcgaggagacagttaagcatgattgggacagaatgatagaagctgtacagaatcacattggctctttgaattggggctaccgagtagctctgcgggagaaaaaagtcgtctatgagaatgcttatgggcaatttattggtcctcacaggattaaggcaacaaataataaaggcaaagaaaaaatttattcagcagagagatttctcattgccactggtgaaagaccacgttacttgggcatccctggtgacaaagaatactgcatcagcagtgatgatcttttctccttgccttactgcccgggtaagaccctggttgttggagcatcctatgtcgctttggagtgcgctggatttcttgctggtattggtttagacgtcactgttatggttaggtccattcttcttagaggatttgaccaggacatggccaacaaaattggtgaacacatggaagaacatggcatcaagtttataagacagttcgtaccaattaaagttgaacaaattgaagcagggacaccaggccgactcagagtagtagctcagtccaccaatagtgaggaaatcattgaaggagaatataatacggtgatgctggcaataggaagagatgcttgcacaagaaaaattggcttagaaaccgtaggggtgaagataaatgaaaagactggaaaaatacctgtcacagatgaagaacagaccaatgtgccttacatctatgccattggcgatatattggaggataaggtggagctcaccccagttgcaatccaggcaggaagattgctggctcagaggctctatgcaggttccactgtcaagtgtgactatgaaaatgttccaaccactgtatttactcctttggaatatggtgcttgtggcctttctgaggagaaagctgtggagaagtttggggaagaaaatattgaggtttaccatagttacttttggccattggaatggacgattccgtcaagagataacaacaaatgttatgcaaaaataatctgtaatactaaagacaatgaacgtgttgtgggctttcacgtactgggtccaaatgctggagaagttacacaaggctttgcagctgcgctcaaatgtggactgaccaaaaagcagctggacagcacaattggaatccaccctgtctgtgcagaggtattcacaacattgtctgtgaccaagcgctctggggcaagcatcctccaggctggctgctgaggttaagccccagtgtggatgctgttgccaagactgcaaaccactggctcgtttccgtgcccaaatccaaggcgaagttttctagagggttcttgggctcttggcacctgcgtgtcctgtgcttaccaccgcccaaggcccccttggatctcttggataggagttggtgaatagaaggcaggcagcatcacactggggtcactgacagacttgaagctgacatttggcagggcatcgaagggatgcatccatgaagtcaccagtctcaagcccatgtggtaggcggtgatggaacaactgtcaaatcagttttagcatgacctttccttgtggattttcttattctcgttgtcaagttttctagggttgaatttttttcttttttctccatggtgttaatgatattagagatgaaaaacgttagcagttgatttttgtccaaaagcaagtcatggctagagtatccatgcaaggtgtcttgttgcatggaagggatagtttggctcccttggaggctatgtaggcttgtcccgggaaagagaactgtcctgcagctgaaatggactgttctttactgacctgctcagcagtttcttctctcatatattcccaaaacaagtacatctgcgatcaactctagccaaatttgcccctgtgtgctacatgatggatgattattattttaaggtctgtttaggaagggaaatggctacttggccagccattgcctggcatttggtagtatagtatgattctcaccattatttgtcatggaggcagacatacaccagaaatgggggagaaacagtacatatctttctgtctttagtttattgtgtgctggtctaagcaagctgagatcatttgcaatggaaaacacgtaacttgtttaaaagtttttctggtagctttagctttatgctaaaaaaaataatgacattgggtatctatttctttctaagactacattagtaggaaaataagtcttttcatgcttatgatttagctgttttgtggtaattgctttttaaaggaagttattaatatcataagttattattaatattttgaacacaggtggatgtgaaggattttcatttaaaaaccaagtggttttgactttttctgttgaatgaacaactgtgccttgtggaatttttgcagaagtgtttatgctttgttagcatttcaacttgcattattataaagaggtattaatgcctcagttatgtgtttgtcaatgtactggctgaggattctatctcagctgtcttttctaactgtgtaggttgagttttgaacacgtgcttgtggacatcaggcctcctgccagcagttcttgaagcttctttttcattcctgctactctacctgtatttctcagttgcagcactgagtggtcaaaatacatttctgggccacctcagggaacccatgcatctgcctggcatttaggcagcagagcccctgaccgtcccccacagggctctgcctcacgtcctcatctcatttggctgtgtaaagaaatgggaaaagggaaaaggagagagcaattgaggcagttgaccatattcagttttatttatttatttttaatttgtttttttctccaagtccaccagtctctgaaattagaacagtaggcggtatgagataatcaggcctaatcatgttgtgattctcttttcttagtggagtggaatgttctatccccacaagaaggattatatcttatagacttgtcttgttcagattctgtatttacccattttattgaaacatatactaagttccatgtatttttgttacaaatcttctgaaaaaaaacaaaacaatgtgaaacattaaaattaaaaggcatt

SEQ ID NO: 4123 - DNA, 3701 bp, Homo sapiens
  source 1..3701: mol_type = genomic DNA
atgccagttgatgactactggctgtgtttaccagcctcttgtgctagaccttttgtgcagactgtcagagtggtgcagtcttgcccccactgttgctggtttccaggtgttctcccttcagtccctgagccactacgtatgcccgccatgctgccaacaggtagccacagtgctgtgcttcctccttcacattgctccaccgcacccccttccacatcccaagaaccttcttcttccgctgaccccaagctctgcctttcaccccctacatctgatagtaggcaagagagaaatgtgcagtttgggctggcttatcaggagggcagacttcaaaagctactaaaaatgaacggccctgaagatcttcccaagtcctatgactatgaccttatcatcattggaggtggctcaggaggtctggcagctgctaaggaggcagcccaatatggcaagaaggtgatggtcctggactttgtcactcccacccctcttggaactagatggggtctcggaggaacatgtgtgaatgtgggttgcatacctaaaaaactgatgcatcaagcagctttgttaggacaagccctgcaagactctcgaaattatggatggaaagtcgaggagacagttaagcatgattgggacagaatgatagaagctgtacagaatcacattggctctttgaattggggctaccgagtagctctgcgggagaaaaaagtcgtctatgagaatgcttatgggcaatttattggtcctcacaggattaaggcaacaaataataaaggcaaagaaaaaatttattcagcagagagatttctcattgccactggtgaaagaccacgttacttgggcatccctggtgacaaagaatactgcatcagcagtgatgatcttttctccttgccttactgcccgggtaagaccctggttgttggagcatcctatgtcgctttggagtgcgctggatttcttgctggtattggtttagacgtcactgttatggttaggtccattcttcttagaggatttgaccaggacatggccaacaaaattggtgaacacatggaagaacatggcatcaagtttataagacagttcgtaccaattaaagttgaacaaattgaagcagggacaccaggccgactcagagtagtagctcagtccaccaatagtgaggaaatcattgaaggagaatataatacggtgatgctggcaataggaagagatgcttgcacaagaaaaattggcttagaaaccgtaggggtgaagataaatgaaaagactggaaaaatacctgtcacagatgaagaacagaccaatgtgccttacatctatgccattggcgatatattggaggataaggtggagctcaccccagttgcaatccaggcaggaagattgctggctcagaggctctatgcaggttccactgtcaagtgtgactatgaaaatgttccaaccactgtatttactcctttggaatatggtgcttgtggcctttctgaggagaaagctgtggagaagtttggggaagaaaatattgaggtttaccatagttacttttggccattggaatggacgattccgtcaagagataacaacaaatgttatgcaaaaataatctgtaatactaaagacaatgaacgtgttgtgggctttcacgtactgggtccaaatgctggagaagttacacaaggctttgcagctgcgctcaaatgtggactgaccaaaaagcagctggacagcacaattggaatccaccctgtctgtgcagaggtattcacaacattgtctgtgaccaagcgctctggggcaagcatcctccaggctggctgctgaggttaagccccagtgtggatgctgttgccaagactgcaaaccactggctcgtttccgtgcccaaatccaaggcgaagttttctagagggttcttgggctcttggcacctgcgtgtcctgtgcttaccaccgcccaaggcccccttggatctcttggataggagttggtgaatagaaggcaggcagcatcacactggggtcactgacagacttgaagctgacatttggcagggcatcgaagggatgcatccatgaagtcaccagtctcaagcccatgtggtaggcggtgatggaacaactgtcaaatcagttttagcatgacctttccttgtggattttcttattctcgttgtcaagttttctagggttgaatttttttcttttttctccatggtgttaatgatattagagatgaaaaacgttagcagttgatttttgtccaaaagcaagtcatggctagagtatccatgcaaggtgtcttgttgcatggaagggatagtttggctcccttggaggctatgtaggcttgtcccgggaaagagaactgtcctgcagctgaaatggactgttctttactgacctgctcagcagtttcttctctcatatattcccaaaacaagtacatctgcgatcaactctagccaaatttgcccctgtgtgctacatgatggatgattattattttaaggtctgtttaggaagggaaatggctacttggccagccattgcctggcatttggtagtatagtatgattctcaccattatttgtcatggaggcagacatacaccagaaatgggggagaaacagtacatatctttctgtctttagtttattgtgtgctggtctaagcaagctgagatcatttgcaatggaaaacacgtaacttgtttaaaagtttttctggtagctttagctttatgctaaaaaaaataatgacattgggtatctatttctttctaagactacattagtaggaaaataagtcttttcatgcttatgatttagctgttttgtggtaattgctttttaaaggaagttattaatatcataagttattattaatattttgaacacaggtggatgtgaaggattttcatttaaaaaccaagtggttttgactttttctgttgaatgaacaactgtgccttgtggaatttttgcagaagtgtttatgctttgttagcatttcaacttgcattattataaagaggtattaatgcctcagttatgtgtttgtcaatgtactggctgaggattctatctcagctgtcttttctaactgtgtaggttgagttttgaacacgtgcttgtggacatcaggcctcctgccagcagttcttgaagcttctttttcattcctgctactctacctgtatttctcagttgcagcactgagtggtcaaaatacatttctgggccacctcagggaacccatgcatctgcctggcatttaggcagcagagcccctgaccgtcccccacagggctctgcctcacgtcctcatctcatttggctgtgtaaagaaatgggaaaagggaaaaggagagagcaattgaggcagttgaccatattcagttttatttatttatttttaatttgtttttttctccaagtccaccagtctctgaaattagaacagtaggcggtatgagataatcaggcctaatcatgttgtgattctcttttcttagtggagtggaatgttctatccccacaagaaggattatatcttatagacttgtcttgttcagattctgtatttacccattttattgaaacatatactaagttccatgtatttttgttacaaatcttctgaaaaaaaacaaaacaatgtgaaacattaaaattaaaaggcatt

SEQ ID NO: 4124 - DNA, 3828 bp, Homo sapiens
  source 1..3828: mol_type = genomic DNA
ttcccacagggccttgtgcgacatgggctgcgccgagggcaaggcagtggcggcggccgccccaacggagctgcagacgaaaggcaagaacggcgatggccgccgtaggtcagctaaagatcatcaccctggtaaaactttgccagagaacccagcaggattcaccagcacggccactgcagactccagagccctgcttcaggcctatatagatggtcactctgtggtcatcttcagtaggtccacatgcacacgctgtactgaggtaaagaagttatttaaatctctgtgtgttccttattttgtgcttgaacttgatcaaacagaggacggtcgggccctggaaggaacgctctcggaattggccgcggaaaccgatctgcccgttgtgtttgtgaaacagagaaagataggcggccatggtccaaccttgaaggcttatcaggagggcagacttcaaaagctactaaaaatgaacggccctgaagatcttcccaagtcctatgactatgaccttatcatcattggaggtggctcaggaggtctggcagctgctaaggaggcagcccaatatggcaagaaggtgatggtcctggactttgtcactcccacccctcttggaactagatggggtctcggaggaacatgtgtgaatgtgggttgcatacctaaaaaactgatgcatcaagcagctttgttaggacaagccctgcaagactctcgaaattatggatggaaagtcgaggagacagttaagcatgattgggacagaatgatagaagctgtacagaatcacattggctctttgaattggggctaccgagtagctctgcgggagaaaaaagtcgtctatgagaatgcttatgggcaatttattggtcctcacaggattaaggcaacaaataataaaggcaaagaaaaaatttattcagcagagagatttctcattgccactggtgaaagaccacgttacttgggcatccctggtgacaaagaatactgcatcagcagtgatgatcttttctccttgccttactgcccgggtaagaccctggttgttggagcatcctatgtcgctttggagtgcgctggatttcttgctggtattggtttagacgtcactgttatggttaggtccattcttcttagaggatttgaccaggacatggccaacaaaattggtgaacacatggaagaacatggcatcaagtttataagacagttcgtaccaattaaagttgaacaaattgaagcagggacaccaggccgactcagagtagtagctcagtccaccaatagtgaggaaatcattgaaggagaatataatacggtgatgctggcaataggaagagatgcttgcacaagaaaaattggcttagaaaccgtaggggtgaagataaatgaaaagactggaaaaatacctgtcacagatgaagaacagaccaatgtgccttacatctatgccattggcgatatattggaggataaggtggagctcaccccagttgcaatccaggcaggaagattgctggctcagaggctctatgcaggttccactgtcaagtgtgactatgaaaatgttccaaccactgtatttactcctttggaatatggtgcttgtggcctttctgaggagaaagctgtggagaagtttggggaagaaaatattgaggtttaccatagttacttttggccattggaatggacgattccgtcaagagataacaacaaatgttatgcaaaaataatctgtaatactaaagacaatgaacgtgttgtgggctttcacgtactgggtccaaatgctggagaagttacacaaggctttgcagctgcgctcaaatgtggactgaccaaaaagcagctggacagcacaattggaatccaccctgtctgtgcagaggtattcacaacattgtctgtgaccaagcgctctggggcaagcatcctccaggctggctgctgaggttaagccccagtgtggatgctgttgccaagactgcaaaccactggctcgtttccgtgcccaaatccaaggcgaagttttctagagggttcttgggctcttggcacctgcgtgtcctgtgcttaccaccgcccaaggcccccttggatctcttggataggagttggtgaatagaaggcaggcagcatcacactggggtcactgacagacttgaagctgacatttggcagggcatcgaagggatgcatccatgaagtcaccagtctcaagcccatgtggtaggcggtgatggaacaactgtcaaatcagttttagcatgacctttccttgtggattttcttattctcgttgtcaagttttctagggttgaatttttttcttttttctccatggtgttaatgatattagagatgaaaaacgttagcagttgatttttgtccaaaagcaagtcatggctagagtatccatgcaaggtgtcttgttgcatggaagggatagtttggctcccttggaggctatgtaggcttgtcccgggaaagagaactgtcctgcagctgaaatggactgttctttactgacctgctcagcagtttcttctctcatatattcccaaaacaagtacatctgcgatcaactctagccaaatttgcccctgtgtgctacatgatggatgattattattttaaggtctgtttaggaagggaaatggctacttggccagccattgcctggcatttggtagtatagtatgattctcaccattatttgtcatggaggcagacatacaccagaaatgggggagaaacagtacatatctttctgtctttagtttattgtgtgctggtctaagcaagctgagatcatttgcaatggaaaacacgtaacttgtttaaaagtttttctggtagctttagctttatgctaaaaaaaataatgacattgggtatctatttctttctaagactacattagtaggaaaataagtcttttcatgcttatgatttagctgttttgtggtaattgctttttaaaggaagttattaatatcataagttattattaatattttgaacacaggtggatgtgaaggattttcatttaaaaaccaagtggttttgactttttctgttgaatgaacaactgtgccttgtggaatttttgcagaagtgtttatgctttgttagcatttcaacttgcattattataaagaggtattaatgcctcagttatgtgtttgtcaatgtactggctgaggattctatctcagctgtcttttctaactgtgtaggttgagttttgaacacgtgcttgtggacatcaggcctcctgccagcagttcttgaagcttctttttcattcctgctactctacctgtatttctcagttgcagcactgagtggtcaaaatacatttctgggccacctcagggaacccatgcatctgcctggcatttaggcagcagagcccctgaccgtcccccacagggctctgcctcacgtcctcatctcatttggctgtgtaaagaaatgggaaaagggaaaaggagagagcaattgaggcagttgaccatattcagttttatttatttatttttaatttgtttttttctccaagtccaccagtctctgaaattagaacagtaggcggtatgagataatcaggcctaatcatgttgtgattctcttttcttagtggagtggaatgttctatccccacaagaaggattatatcttatagacttgtcttgttcagattctgtatttacccattttattgaaacatatactaagttccatgtatttttgttacaaatcttctgaaaaaaaacaaaacaatgtgaaacattaaaattaaaaggcatt

SEQ ID NO: 4125 - DNA, 3930 bp, Homo sapiens
  source 1..3930: mol_type = genomic DNA
agaccctcacgtgatgacaacagctagcaaagttctgtagctactgccttagggcatagtctaatttcttcagtaaaaacacacttattccaaatttggttccagaattgccttaaattgtttttgctctgttcttaggttgggggcggctatgagcaggcagaggatgtggtgtcacccaattaggagctctcagcttacgaggcaattagcataggttgccagggctgcacgaggagtggatttctgctttgtcattctgactctggcagttagcccgcccgctcggcgcagggcgtggcttctcgtagccattaggaaacagcaaccctttcacctcagttttcttcactccggcatttgcagcagagcgaaaggtggtcgagtcctgaaggagggcctgatgtcttcatcattctcaaattcttaggacggtcgggccctggaaggaacgctctcggaattggccgcggaaaccgatctgcccgttgtgtttgtgaaacagagaaagataggcggccatggtccaaccttgaaggcttatcaggagggcagacttcaaaagctactaaaaatgaacggccctgaagatcttcccaagtcctatgactatgaccttatcatcattggaggtggctcaggaggtctggcagctgctaaggaggcagcccaatatggcaagaaggtgatggtcctggactttgtcactcccacccctcttggaactagatggggtctcggaggaacatgtgtgaatgtgggttgcatacctaaaaaactgatgcatcaagcagctttgttaggacaagccctgcaagactctcgaaattatggatggaaagtcgaggagacagttaagcatgattgggacagaatgatagaagctgtacagaatcacattggctctttgaattggggctaccgagtagctctgcgggagaaaaaagtcgtctatgagaatgcttatgggcaatttattggtcctcacaggattaaggcaacaaataataaaggcaaagaaaaaatttattcagcagagagatttctcattgccactggtgaaagaccacgttacttgggcatccctggtgacaaagaatactgcatcagcagtgatgatcttttctccttgccttactgcccgggtaagaccctggttgttggagcatcctatgtcgctttggagtgcgctggatttcttgctggtattggtttagacgtcactgttatggttaggtccattcttcttagaggatttgaccaggacatggccaacaaaattggtgaacacatggaagaacatggcatcaagtttataagacagttcgtaccaattaaagttgaacaaattgaagcagggacaccaggccgactcagagtagtagctcagtccaccaatagtgaggaaatcattgaaggagaatataatacggtgatgctggcaataggaagagatgcttgcacaagaaaaattggcttagaaaccgtaggggtgaagataaatgaaaagactggaaaaatacctgtcacagatgaagaacagaccaatgtgccttacatctatgccattggcgatatattggaggataaggtggagctcaccccagttgcaatccaggcaggaagattgctggctcagaggctctatgcaggttccactgtcaagtgtgactatgaaaatgttccaaccactgtatttactcctttggaatatggtgcttgtggcctttctgaggagaaagctgtggagaagtttggggaagaaaatattgaggtttaccatagttacttttggccattggaatggacgattccgtcaagagataacaacaaatgttatgcaaaaataatctgtaatactaaagacaatgaacgtgttgtgggctttcacgtactgggtccaaatgctggagaagttacacaaggctttgcagctgcgctcaaatgtggactgaccaaaaagcagctggacagcacaattggaatccaccctgtctgtgcagaggtattcacaacattgtctgtgaccaagcgctctggggcaagcatcctccaggctggctgctgaggttaagccccagtgtggatgctgttgccaagactgcaaaccactggctcgtttccgtgcccaaatccaaggcgaagttttctagagggttcttgggctcttggcacctgcgtgtcctgtgcttaccaccgcccaaggcccccttggatctcttggataggagttggtgaatagaaggcaggcagcatcacactggggtcactgacagacttgaagctgacatttggcagggcatcgaagggatgcatccatgaagtcaccagtctcaagcccatgtggtaggcggtgatggaacaactgtcaaatcagttttagcatgacctttccttgtggattttcttattctcgttgtcaagttttctagggttgaatttttttcttttttctccatggtgttaatgatattagagatgaaaaacgttagcagttgatttttgtccaaaagcaagtcatggctagagtatccatgcaaggtgtcttgttgcatggaagggatagtttggctcccttggaggctatgtaggcttgtcccgggaaagagaactgtcctgcagctgaaatggactgttctttactgacctgctcagcagtttcttctctcatatattcccaaaacaagtacatctgcgatcaactctagccaaatttgcccctgtgtgctacatgatggatgattattattttaaggtctgtttaggaagggaaatggctacttggccagccattgcctggcatttggtagtatagtatgattctcaccattatttgtcatggaggcagacatacaccagaaatgggggagaaacagtacatatctttctgtctttagtttattgtgtgctggtctaagcaagctgagatcatttgcaatggaaaacacgtaacttgtttaaaagtttttctggtagctttagctttatgctaaaaaaaataatgacattgggtatctatttctttctaagactacattagtaggaaaataagtcttttcatgcttatgatttagctgttttgtggtaattgctttttaaaggaagttattaatatcataagttattattaatattttgaacacaggtggatgtgaaggattttcatttaaaaaccaagtggttttgactttttctgttgaatgaacaactgtgccttgtggaatttttgcagaagtgtttatgctttgttagcatttcaacttgcattattataaagaggtattaatgcctcagttatgtgtttgtcaatgtactggctgaggattctatctcagctgtcttttctaactgtgtaggttgagttttgaacacgtgcttgtggacatcaggcctcctgccagcagttcttgaagcttctttttcattcctgctactctacctgtatttctcagttgcagcactgagtggtcaaaatacatttctgggccacctcagggaacccatgcatctgcctggcatttaggcagcagagcccctgaccgtcccccacagggctctgcctcacgtcctcatctcatttggctgtgtaaagaaatgggaaaagggaaaaggagagagcaattgaggcagttgaccatattcagttttatttatttatttttaatttgtttttttctccaagtccaccagtctctgaaattagaacagtaggcggtatgagataatcaggcctaatcatgttgtgattctcttttcttagtggagtggaatgttctatccccacaagaaggattatatcttatagacttgtcttgttcagattctgtatttacccattttattgaaacatatactaagttccatgtatttttgttacaaatcttctgaaaaaaaacaaaacaatgtgaaacattaaaattaaaaggcatt

SEQ ID NO: 4126 - DNA, 1933 bp, Homo sapiens
  source 1..1933: mol_type = genomic DNA
aggctggcggtttccttcctcttggtctttgtagagacagtttgcagaacagcggagaaaatggaggacggtcgggccctggaaggaacgctctcggaattggccgcggaaaccgatctgcccgttgtgtttgtgaaacagagaaagataggcggccatggtccaaccttgaaggcttatcaggagggcagacttcaaaagctactaaaaatgaacggccctgaagatcttcccaagtcctatgactatgaccttatcatcattggaggtggctcaggaggtctggcagctgctaaggaggcagcccaatatggcaagaaggtgatggtcctggactttgtcactcccacccctcttggaactagatggggtctcggaggaacatgtgtgaatgtgggttgcatacctaaaaaactgatgcatcaagcagctttgttaggacaagccctgcaagactctcgaaattatggatggaaagtcgaggagacagttaagcatgattgggacagaatgatagaagctgtacagaatcacattggctctttgaattggggctaccgagtagctctgcgggagaaaaaagtcgtctatgagaatgcttatgggcaatttattggtcctcacaggattaaggcaacaaataataaaggcaaagaaaaaatttattcagcagagagatttctcattgccactggtgaaagaccacgttacttgggcatccctggtgacaaagaatactgcatcagcagtgatgatcttttctccttgccttactgcccgggtaagaccctggttgttggagcatcctatgtcgctttggagtgcgctggatttcttgctggtattggtttagacgtcactgttatggttaggtccattcttcttagaggatttgaccaggacatggccaacaaaattggtgaacacatggaagaacatggcatcaagtttataagacagttcgtaccaattaaagttgaacaaattgaagcagggacaccaggccgactcagagtagtagctcagtccaccaatagtgaggaaatcattgaaggagaatataatacggtgatgctggcaataggaagagatgcttgcacaagaaaaattggcttagaaaccgtaggggtgaagataaatgaaaagactggaaaaatacctgtcacagatgaagaacagaccaatgtgccttacatctatgccattggcgatatattggaggataaggtggagctcaccccagttgcaatccaggcaggaagattgctggctcagaggctctatgcaggttccactgtcaagtgtgactatgaaaatgttccaaccactgtatttactcctttggaatatggtgcttgtggcctttctgaggagaaagctgtggagaagtttggggaagaaaatattgaggtttaccatagttacttttggccattggaatggacgattccgtcaagagataacaacaaatgttatgcaaaaataatctgtaatactaaagacaatgaacgtgttgtgggctttcacgtactgggtccaaatgctggagaagttacacaaggctttgcagctgcgctcaaatgtggactgaccaaaaagcagctggacagcacaattggaatccaccctgtctgtgcagaggtattcacaacattgtctgtgaccaagcgctctggggcaagcatcctccaggctggctgctgaggttaagccccagtgtggatgctgttgccaagactgcaaaccactggctcgtttccgtgcccaaatccaaggcgaagttttctagagggttcttgggctcttggcacctgcgtgtcctgtgcttaccaccgcccaaggcccccttggatctcttggataggagttggtgaatagaaggcaggcagcatcacactggggtcactgacagacttgaagctgacatttggca

SEQ ID NO: 4127 - DNA, 3836 bp, Homo sapiens
  source 1..3836: mol_type = genomic DNA
agttcccacagggccttgtgcgacatgggctgcgccgagggcaaggcagtggcggcggccgccccaacggagctgcagacgaaaggcaagaacggcgatggccgccgtaggtcagctaaagatcatcaccctggtaaaactttgccagagaacccagcaggattcaccagcacggccactgcagactccagagccctgcttcaggcctatatagatggtcactctgtggtcatcttcagtaggtccacatgcacacgctgtactgaggtaaagaagttatttaaatctctgtgtgttccttattttgtgcttgaacttgatcaaacagaggacggtcgggccctggaaggaacgctctcggaattggccgcggaaaccgatctgcccgttgtgtttgtgaaacagagaaagataggcggccatggtccaaccttgaaggcttatcaggagggcagacttcaaaagctactaaaaatgaacggccctgaagatcttcccaagtcctatgactatgaccttatcatcattggaggtggctcaggaggtctggcagctgctaaggaggcagcccaatatggcaagaaggtgatggtcctggactttgtcactcccacccctcttggaactagatggggtctcggaggaacatgtgtgaatgtgggttgcatacctaaaaaactgatgcatcaagcagctttgttaggacaagccctgcaagactctcgaaattatggatggaaagtcgaggagacagttaagcatgattgggacagaatgatagaagctgtacagaatcacattggctctttgaattggggctaccgagtagctctgcgggagaaaaaagtcgtctatgagaatgcttatgggcaatttattggtcctcacaggattaaggcaacaaataataaaggcaaagaaaaaatttattcagcagagagatttctcattgccactggtgaaagaccacgttacttgggcatccctggtgacaaagaatactgcatcagcagtgatgatcttttctccttgccttactgcccgggtaagaccctggttgttggagcatcctatgtcgctttggagtgcgctggatttcttgctggtattggtttagacgtcactgttatggttaggtccattcttcttagaggatttgaccaggacatggccaacaaaattggtgaacacatggaagaacatggcatcaagtttataagacagttcgtaccaattaaagttgaacaaattgaagcagggacaccaggccgactcagagtagtagctcagtccaccaatagtgaggaaatcattgaaggagaatataatacggtgatgctggcaataggaagagatgcttgcacaagaaaaattggcttagaaaccgtaggggtgaagataaatgaaaagactggaaaaatacctgtcacagatgaagaacagaccaatgtgccttacatctatgccattggcgatatattggaggataaggtggagctcaccccagttgcaatccaggcaggaagattgctggctcagaggctctatgcaggttccactgtcaagtgtgactatgaaaatgttccaaccactgtatttactcctttggaatatggtgcttgtggcctttctgaggagaaagctgtggagaagtttggggaagaaaatattgaggtttaccatagttacttttggccattggaatggacgattccgtcaagagataacaacaaatgttatgcaaaaataatctgtaatactaaagacaatgaacgtgttgtgggctttcacgtactgggtccaaatgctggagaagttacacaaggctttgcagctgcgctcaaatgtggactgaccaaaaagcagctggacagcacaattggaatccaccctgtctgtgcagaggtattcacaacattgtctgtgaccaagcgctctggggcaagcatcctccaggctggctgctgaggttaagccccagtgtggatgctgttgccaagactgcaaaccactggctcgtttccgtgcccaaatccaaggcgaagttttctagagggttcttgggctcttggcacctgcgtgtcctgtgcttaccaccgcccaaggcccccttggatctcttggataggagttggtgaatagaaggcaggcagcatcacactggggtcactgacagacttgaagctgacatttggcagggcatcgaagggatgcatccatgaagtcaccagtctcaagcccatgtggtaggcggtgatggaacaactgtcaaatcagttttagcatgacctttccttgtggattttcttattctcgttgtcaagttttctagggttgaatttttttcttttttctccatggtgttaatgatattagagatgaaaaacgttagcagttgatttttgtccaaaagcaagtcatggctagagtatccatgcaaggtgtcttgttgcatggaagggatagtttggctcccttggaggctatgtaggcttgtcccgggaaagagaactgtcctgcagctgaaatggactgttctttactgacctgctcagcagtttcttctctcatatattcccaaaacaagtacatctgcgatcaactctagccaaatttgcccctgtgtgctacatgatggatgattattattttaaggtctgtttaggaagggaaatggctacttggccagccattgcctggcatttggtagtatagtatgattctcaccattatttgtcatggaggcagacatacaccagaaatgggggagaaacagtacatatctttctgtctttagtttattgtgtgctggtctaagcaagctgagatcatttgcaatggaaaacacgtaacttgtttaaaagtttttctggtagctttagctttatgctaaaaaaaataatgacattgggtatctatttctttctaagactacattagtaggaaaataagtcttttcatgcttatgatttagctgttttgtggtaattgctttttaaaggaagttattaatatcataagttattattaatattttgaacacaggtggatgtgaaggattttcatttaaaaaccaagtggttttgactttttctgttgaatgaacaactgtgccttgtggaatttttgcagaagtgtttatgctttgttagcatttcaacttgcattattataaagaggtattaatgcctcagttatgtgtttgtcaatgtactggctgaggattctatctcagctgtcttttctaactgtgtaggttgagttttgaacacgtgcttgtggacatcaggcctcctgccagcagttcttgaagcttctttttcattcctgctactctacctgtatttctcagttgcagcactgagtggtcaaaatacatttctgggccacctcagggaacccatgcatctgcctggcatttaggcagcagagcccctgaccgtcccccacagggctctgcctcacgtcctcatctcatttggctgtgtaaagaaatgggaaaagggaaaaggagagagcaattgaggcagttgaccatattcagttttatttatttatttttaatttgtttttttctccaagtccaccagtctctgaaattagaacagtaggcggtatgagataatcaggcctaatcatgttgtgattctcttttcttagtggagtggaatgttctatccccacaagaaggattatatcttatagacttgtcttgttcagattctgtatttacccattttattgaaacatatactaagttccatgtatttttgttacaaatcttctgaaaaaaaacaaaacaatgtgaaacattaaaattaaaaggcattaataat

SEQ ID NO: 4128 - DNA, 577 bp, Homo sapiens
  source 1..577: mol_type = genomic DNA
gaagaagctaaatcaagcctctgagtttcaccttggaagggcctggcaggacctggcagtggttgcctgtttgtttagagggagtgtggcttctgctggctgttaggagcccgcaacgctctcagctgagagtgcttcaatctggcattatccaaagaacagagcgaaaggtggtcgagtcctgaaggagggcctgatgtcttcatcattctcaaattcttaggacggtcgggccctggaaggaacgctctcggaattggccgcggaaaccgatctgcccgttgtgtttgtgaaacagagaaagataggcggccatggtccaaccttgaaggcttatcaggagggcagacttcaaaagctactaaaaatgaacggccctgaagatcttcccaagtcctatgactatgaccttatcatcattggaggtggctcaggaggtctggcagctgctaaggaggcagcccaatatggcaagaaggtgatggtcctggactttgtcactcccacccctcttggaactagatggggtctcggaggaacatgtgtgaatgtgggttgcatacctaaaaaactgatg

SEQ ID NO: 4129 - DNA, 3808 bp, Homo sapiens
  source 1..3808: mol_type = genomic DNA
tagccattaggaaacagcaaccctttcacctcagttttcttcactccggcatttgcagcagagcgaaaggtggtcgagtcctgaaggagggcctgatgtcttcatcattctcaaattcttaggacggtcgggccctggaaggaacgctctcggaattggccgcggaaaccgatctgcccgttgtgtttgtgaaacagagaaagataggcggccatggtccaaccttgaaggggtaggggacccggaaaccccagggtctggaggagagcaaccaggaagctcttggggtgacttcgttttccttcagagatggaggtctcattatgttgtccaggctggtcttgaactcctgggctcaagcgatcatccggcctcggcctcctaaagtgctgggactgcaggtcacgacatttagtgaggcttatcaggagggcagacttcaaaagctactaaaaatgaacggccctgaagatcttcccaagtcctatgactatgaccttatcatcattggaggtggctcaggaggtctggcagctgctaaggaggcagcccaatatggcaagaaggtgatggtcctggactttgtcactcccacccctcttggaactagatggggtctcggaggaacatgtgtgaatgtgggttgcatacctaaaaaactgatgcatcaagcagctttgttaggacaagccctgcaagactctcgaaattatggatggaaagtcgaggagacagttaagcatgattgggacagaatgatagaagctgtacagaatcacattggctctttgaattggggctaccgagtagctctgcgggagaaaaaagtcgtctatgagaatgcttatgggcaatttattggtcctcacaggattaaggcaacaaataataaaggcaaagaaaaaatttattcagcagagagatttctcattgccactggtgaaagaccacgttacttgggcatccctggtgacaaagaatactgcatcagcagtgatgatcttttctccttgccttactgcccgggtaagaccctggttgttggagcatcctatgtcgctttggagtgcgctggatttcttgctggtattggtttagacgtcactgttatggttaggtccattcttcttagaggatttgaccaggacatggccaacaaaattggtgaacacatggaagaacatggcatcaagtttataagacagttcgtaccaattaaagttgaacaaattgaagcagggacaccaggccgactcagagtagtagctcagtccaccaatagtgaggaaatcattgaaggagaatataatacggtgatgctggcaataggaagagatgcttgcacaagaaaaattggcttagaaaccgtaggggtgaagataaatgaaaagactggaaaaatacctgtcacagatgaagaacagaccaatgtgccttacatctatgccattggcgatatattggaggataaggtggagctcaccccagttgcaatccaggcaggaagattgctggctcagaggctctatgcaggttccactgtcaagtgtgactatgaaaatgttccaaccactgtatttactcctttggaatatggtgcttgtggcctttctgaggagaaagctgtggagaagtttggggaagaaaatattgaggtttaccatagttacttttggccattggaatggacgattccgtcaagagataacaacaaatgttatgcaaaaataatctgtaatactaaagacaatgaacgtgttgtgggctttcacgtactgggtccaaatgctggagaagttacacaaggctttgcagctgcgctcaaatgtggactgaccaaaaagcagctggacagcacaattggaatccaccctgtctgtgcagaggtattcacaacattgtctgtgaccaagcgctctggggcaagcatcctccaggctggctgctgaggttaagccccagtgtggatgctgttgccaagactgcaaaccactggctcgtttccgtgcccaaatccaaggcgaagttttctagagggttcttgggctcttggcacctgcgtgtcctgtgcttaccaccgcccaaggcccccttggatctcttggataggagttggtgaatagaaggcaggcagcatcacactggggtcactgacagacttgaagctgacatttggcagggcatcgaagggatgcatccatgaagtcaccagtctcaagcccatgtggtaggcggtgatggaacaactgtcaaatcagttttagcatgacctttccttgtggattttcttattctcgttgtcaagttttctagggttgaatttttttcttttttctccatggtgttaatgatattagagatgaaaaacgttagcagttgatttttgtccaaaagcaagtcatggctagagtatccatgcaaggtgtcttgttgcatggaagggatagtttggctcccttggaggctatgtaggcttgtcccgggaaagagaactgtcctgcagctgaaatggactgttctttactgacctgctcagcagtttcttctctcatatattcccaaaacaagtacatctgcgatcaactctagccaaatttgcccctgtgtgctacatgatggatgattattattttaaggtctgtttaggaagggaaatggctacttggccagccattgcctggcatttggtagtatagtatgattctcaccattatttgtcatggaggcagacatacaccagaaatgggggagaaacagtacatatctttctgtctttagtttattgtgtgctggtctaagcaagctgagatcatttgcaatggaaaacacgtaacttgtttaaaagtttttctggtagctttagctttatgctaaaaaaaataatgacattgggtatctatttctttctaagactacattagtaggaaaataagtcttttcatgcttatgatttagctgttttgtggtaattgctttttaaaggaagttattaatatcataagttattattaatattttgaacacaggtggatgtgaaggattttcatttaaaaaccaagtggttttgactttttctgttgaatgaacaactgtgccttgtggaatttttgcagaagtgtttatgctttgttagcatttcaacttgcattattataaagaggtattaatgcctcagttatgtgtttgtcaatgtactggctgaggattctatctcagctgtcttttctaactgtgtaggttgagttttgaacacgtgcttgtggacatcaggcctcctgccagcagttcttgaagcttctttttcattcctgctactctacctgtatttctcagttgcagcactgagtggtcaaaatacatttctgggccacctcagggaacccatgcatctgcctggcatttaggcagcagagcccctgaccgtcccccacagggctctgcctcacgtcctcatctcatttggctgtgtaaagaaatgggaaaagggaaaaggagagagcaattgaggcagttgaccatattcagttttatttatttatttttaatttgtttttttctccaagtccaccagtctctgaaattagaacagtaggcggtatgagataatcaggcctaatcatgttgtgattctcttttcttagtggagtggaatgttctatccccacaagaaggattatatcttatagacttgtcttgttcagattctgtatttacccattttattgaaacatatactaagttccatgtatttttgttacaaatcttctgaaaaaaaacaaaacaatgtgaaacattaaaattaaaaggc

SEQ ID NO: 4130 - DNA, 400 bp, Homo sapiens
  source 1..400: mol_type = genomic DNA
aggtggtcgagtcctgaaggagggcctgatgtcttcatcattctcaaattcttgcttatcaggagggcagacttcaaaagctactaaaaatgaacggccctgaagatcttcccaagtcctatgactatgaccttatcatcattggaggtggctcaggaggtctggcagctgctaaggaggcagcccaatatggcaagaaggtgatggtcctggactttgtcactcccacccctcttggaactagatggggtctcggaggaacatgtgtgaatgtgggttgcatacctaaaaaactgatgcatcaagcagctttgttaggacaagccctgcaagactctcgaaattatggatggaaagtcgaggagacagttaagcatgattgggacagaatgatagaagc

SEQ ID NO: 4131 - DNA, 3974 bp, Homo sapiens
  source 1..3974: mol_type = genomic DNA
acgaggcaattagcataggttgccagggctgcacgaggagtggatttctgctttgtcattctgactctggcagttagcccgcccgctcggcgcagggcgtggcttctcgtagccattaggaaacagcaaccctttcacctcagttttcttcactccggcatttgcagcagagcgaaaggtggtcgagtcctgaaggagggcctgatgtcttcatcattctcaaattcttgtaagctctgcgtcgggtgaaaccagacaaagccgcgagcccagggatgggagcacgcgggggacggcctgccggcggggacgacagcattgcgcctgggtgcagcagtgtgcgtctcggggaagggaagatattttaaggcgtgtctgagcagacggggaggcttttccaaacccaggcagcttcgtggcgtgtgcggtttcgacccggtcacacaaagcttcagcatgtcatgtgaggacggtcgggccctggaaggaacgctctcggaattggccgcggaaaccgatctgcccgttgtgtttgtgaaacagagaaagataggcggccatggtccaaccttgaaggcttatcaggagggcagacttcaaaagctactaaaaatgaacggccctgaagatcttcccaagtcctatgactatgaccttatcatcattggaggtggctcaggaggtctggcagctgctaaggaggcagcccaatatggcaagaaggtgatggtcctggactttgtcactcccacccctcttggaactagatggggtctcggaggaacatgtgtgaatgtgggttgcatacctaaaaaactgatgcatcaagcagctttgttaggacaagccctgcaagactctcgaaattatggatggaaagtcgaggagacagttaagcatgattgggacagaatgatagaagctgtacagaatcacattggctctttgaattggggctaccgagtagctctgcgggagaaaaaagtcgtctatgagaatgcttatgggcaatttattggtcctcacaggattaaggcaacaaataataaaggcaaagaaaaaatttattcagcagagagatttctcattgccactggtgaaagaccacgttacttgggcatccctggtgacaaagaatactgcatcagcagtgatgatcttttctccttgccttactgcccgggtaagaccctggttgttggagcatcctatgtcgctttggagtgcgctggatttcttgctggtattggtttagacgtcactgttatggttaggtccattcttcttagaggatttgaccaggacatggccaacaaaattggtgaacacatggaagaacatggcatcaagtttataagacagttcgtaccaattaaagttgaacaaattgaagcagggacaccaggccgactcagagtagtagctcagtccaccaatagtgaggaaatcattgaaggagaatataatacggtgatgctggcaataggaagagatgcttgcacaagaaaaattggcttagaaaccgtaggggtgaagataaatgaaaagactggaaaaatacctgtcacagatgaagaacagaccaatgtgccttacatctatgccattggcgatatattggaggataaggtggagctcaccccagttgcaatccaggcaggaagattgctggctcagaggctctatgcaggttccactgtcaagtgtgactatgaaaatgttccaaccactgtatttactcctttggaatatggtgcttgtggcctttctgaggagaaagctgtggagaagtttggggaagaaaatattgaggtttaccatagttacttttggccattggaatggacgattccgtcaagagataacaacaaatgttatgcaaaaataatctgtaatactaaagacaatgaacgtgttgtgggctttcacgtactgggtccaaatgctggagaagttacacaaggctttgcagctgcgctcaaatgtggactgaccaaaaagcagctggacagcacaattggaatccaccctgtctgtgcagaggtattcacaacattgtctgtgaccaagcgctctggggcaagcatcctccaggctggctgctgaggttaagccccagtgtggatgctgttgccaagactgcaaaccactggctcgtttccgtgcccaaatccaaggcgaagttttctagagggttcttgggctcttggcacctgcgtgtcctgtgcttaccaccgcccaaggcccccttggatctcttggataggagttggtgaatagaaggcaggcagcatcacactggggtcactgacagacttgaagctgacatttggcagggcatcgaagggatgcatccatgaagtcaccagtctcaagcccatgtggtaggcggtgatggaacaactgtcaaatcagttttagcatgacctttccttgtggattttcttattctcgttgtcaagttttctagggttgaatttttttcttttttctccatggtgttaatgatattagagatgaaaaacgttagcagttgatttttgtccaaaagcaagtcatggctagagtatccatgcaaggtgtcttgttgcatggaagggatagtttggctcccttggaggctatgtaggcttgtcccgggaaagagaactgtcctgcagctgaaatggactgttctttactgacctgctcagcagtttcttctctcatatattcccaaaacaagtacatctgcgatcaactctagccaaatttgcccctgtgtgctacatgatggatgattattattttaaggtctgtttaggaagggaaatggctacttggccagccattgcctggcatttggtagtatagtatgattctcaccattatttgtcatggaggcagacatacaccagaaatgggggagaaacagtacatatctttctgtctttagtttattgtgtgctggtctaagcaagctgagatcatttgcaatggaaaacacgtaacttgtttaaaagtttttctggtagctttagctttatgctaaaaaaaataatgacattgggtatctatttctttctaagactacattagtaggaaaataagtcttttcatgcttatgatttagctgttttgtggtaattgctttttaaaggaagttattaatatcataagttattattaatattttgaacacaggtggatgtgaaggattttcatttaaaaaccaagtggttttgactttttctgttgaatgaacaactgtgccttgtggaatttttgcagaagtgtttatgctttgttagcatttcaacttgcattattataaagaggtattaatgcctcagttatgtgtttgtcaatgtactggctgaggattctatctcagctgtcttttctaactgtgtaggttgagttttgaacacgtgcttgtggacatcaggcctcctgccagcagttcttgaagcttctttttcattcctgctactctacctgtatttctcagttgcagcactgagtggtcaaaatacatttctgggccacctcagggaacccatgcatctgcctggcatttaggcagcagagcccctgaccgtcccccacagggctctgcctcacgtcctcatctcatttggctgtgtaaagaaatgggaaaagggaaaaggagagagcaattgaggcagttgaccatattcagttttatttatttatttttaatttgtttttttctccaagtccaccagtctctgaaattagaacagtaggcggtatgagataatcaggcctaatcatgttgtgattctcttttcttagtggagtggaatgttctatccccacaagaaggattatatcttatagacttgtcttgttcagattctgtatttacccattttattgaaacatatactaagttccatgtatttttgttacaaatcttctgaaaaaaaacaaaacaatgtgaaacattaaaattaaaaggcattaataat

SEQ ID NO: 4132 - DNA, 1847 bp, Homo sapiens
  source 1..1847: mol_type = genomic DNA
actgtcagagtggtgcagtcttgcccccactgttgctggtttccaggtgttctcccttcagtccctgagccactacgtatgcccgccatgctgccaacaggtagccacagtgctgtgcttcctccttcacattgctccaccgcacccccttccacatcccaagaaccttcttcttccgctgaccccaagctctgcctttcaccccctacatctgatagtaggcaagagagaaatgtgcagtttgggctggcttatcaggagggcagacttcaaaagctactaaaaatgaacggccctgaagatcttcccaagtcctatgactatgaccttatcatcattggaggtggctcaggaggtctggcagctgctaaggaggcagcccaatatggcaagaaggtgatggtcctggactttgtcactcccacccctcttggaactagatggggtctcggaggaacatgtgtgaatgtgggttgcatacctaaaaaactgatgcatcaagcagctttgttaggacaagccctgcaagactctcgaaattatggatggaaagtcgaggagacagttaagcatgattgggacagaatgatagaagctgtacagaatcacattggctctttgaattggggctaccgagtagctctgcgggagaaaaaagtcgtctatgagaatgcttatgggcaatttattggtcctcacaggattaaggcaacaaataataaaggcaaagaaaaaatttattcagcagagagatttctcattgccactggtgaaagaccacgttacttgggcatccctggtgacaaagaatactgcatcagcagtgatgatcttttctccttgccttactgcccgggtaagaccctggttgttggagcatcctatgtcgctttggagtgcgctggatttcttgctggtattggtttagacgtcactgttatggttaggtccattcttcttagaggatttgaccaggacatggccaacaaaattggtgaacacatggaagaacatggcatcaagtttataagacagttcgtaccaattaaagttgaacaaattgaagcagggacaccaggccgactcagagtagtagctcagtccaccaatagtgaggaaatcattgaaggagaatataatacggtgatgctggcaataggaagagatgcttgcacaagaaaaattggcttagaaaccgtaggggtgaagataaatgaaaagactggaaaaatacctgtcacagatgaagaacagaccaatgtgccttacatctatgccattggcgatatattggaggataaggtggagctcaccccagttgcaatccaggcaggaagattgctggctcagaggctctatgcaggttccactgtcaagtgtgactatgaaaatgttccaaccactgtatttactcctttggaatatggtgcttgtggcctttctgaggagaaagctgtggagaagtttggggaagaaaatattgaggtttaccatagttacttttggccattggaatggacgattccgtcaagagataacaacaaatgttatgcaaaaataatctgtaatactaaagacaatgaacgtgttgtgggctttcacgtactgggtccaaatgctggagaagttacacaaggctttgcagctgcgctcaaatgtggactgaccaaaaagcagctggacagcacaattggaatccaccctgtctgtgcagaggtattcacaacattgtctgtgaccaagcgctctggggcaagcatcctccaggctggctgctgaggttaagccccagtgtggatgctgttgccaagactgcaaaccactggctcgtttccgtgcccaaatcc

SEQ ID NO: 4133 - DNA, 786 bp, Homo sapiens
  source 1..786: mol_type = genomic DNA
accttacacgctccgctctgcttttgtgccacacagaggacggtcgggccctggaaggaacgctctcggaattggccgcggaaaccgatctgcccgttgtgtttgtgaaacagagaaagataggcggccatggtccaaccttgaaggggtaggggacccggaaaccccagggtctggaggagagcaaccaggaagctcttggggtgacttcgttttccttcaggcttatcaggagggcagacttcaaaagctactaaaaatgaacggccctgaagatcttcccaagtcctatgactatgaccttatcatcattggaggtggctcaggaggtctggcagctgctaaggaggcagcccaatatggcaagaaggtgatggtcctggactttgtcactcccacccctcttggaactagatggggtctcggaggaacatgtgtgaatgtgggttgcatacctaaaaaactgatgcatcaagcagctttgttaggacaagccctgcaagactctcgaaattatggatggaaagtcgaggagacagttaagcatgattgggacagaatgatagaagctgtacagaatcacattggctctttgaattggggctaccgagtagctctgcgggagaaaaaagtcgtctatgagaatgcttatgggcaatttattggtcctcacaggattaaggcaacaaataataaaggcaaagaaaaaatttattcagcagagagatttctcattgccactggtgaaagaccacgttacttgggcatccctggtgacaaagaata

SEQ ID NO: 4134 - DNA, 607 bp, Homo sapiens
  source 1..607: mol_type = genomic DNA
acacaaagcttcagcatgtcatgtggtaggtgaggccggcgcctgtaggctggcggtttccttcctcttggtctttgtagagacagtttgcagaacagcggagaaaatggaggacggtcgggccctggaaggaacgctctcggaattggccgcggaaaccgatctgcccgttgtgtttgtgaaacagagaaagataggcggccatggtccaaccttgaagtgctttgtattgaaggaggaaccttggccataatgccagttgatgactactggctgtgtttaccagcctcttgtgctagaccttttgtgcagactgtcagagtggtgcagtcttgcccccactgttgctggtttccaggtgttctcccttcagtccctgagccactacgtatgcccgccatgctgccaacaggcttatcaggagggcagacttcaaaagctactaaaaatgaacggccctgaagatcttcccaagtcctatgactatgaccttatcatcattggaggtggctcaggaggtctggcagctgctaaggaggcagcccaatatggcaagaaggtgatggtcctggactttgtcactcccacccctcttggaactagatgg

SEQ ID NO: 4135 - DNA, 554 bp, Homo sapiens
  source 1..554: mol_type = genomic DNA
attaggaaacagcaaccctttcacctcagttttcttcactccggcatttgcagcagagcgaaaggtggtcgagtcctgaaggagggcctgatgtcttcatcattctcaaattcttaggacggtcgggccctggaaggaacgctctcggaattggccgcggaaaccgatctgcccgttgtgtttgtgaaacagagaaagataggcggccatggtccaaccttgaaggggtaggggacccggaaaccccagggtctggaggagagcaaccaggaagctcttggggtgacttcgttttccttcaggcttatcaggagggcagacttcaaaagctactaaaaatgaacggccctgaagatcttcccaagtcctatgactatgaccttatcatcattggaggtggctcaggaggtctggcagctgctaaggaggcagcccaatatggcaagaaggtgatggtcctggactttgtcactcccacccctcttggaactagatggggtctcggaggaacatgtgtgaatgtgggttgcatacctaaaaaactgatgcatcaa

SEQ ID NO: 4136 - DNA, 728 bp, Homo sapiens
  source 1..728: mol_type = genomic DNA
tttctgctttgtcattctgactctggcagttagcccgcccgctcggcgcagggcgtggcttctcgtagccattaggaaacagcaaccctttcacctcagttttcttcactccggcatttgcagcagagcgaaaggtggtcgagtcctgaaggagggcctgatgtcttcatcattctcaaattcttaggacggtcgggccctggaaggaacgctctcggaattggccgcggaaaccgatctgcccgttgtgtttgtgaaacagagaaagataggcggccatggtccaaccttgaagagatggaggtctcattatgttgtccaggctggtcttgaactcctgggctcaagcgatcatccggcctcggcctcctaaagtgctgggactgcaggtcacgacatttagtgaggcttatcaggagggcagacttcaaaagctactaaaaatgaacggccctgaagatcttcccaagtcctatgactatgaccttatcatcattggaggtggctcaggaggtctggcagctgctaaggaggcagcccaatatggcaagaaggtgatggtcctggactttgtcactcccacccctcttggaactagatggggtctcggaggaacatgtgtgaatgtgggttgcatacctaaaaaactgatgcatcaagcagctttgttaggacaagccctgcaagactctcgaaattatggatggaaagtcgaggagacaggtatg

SEQ ID NO: 4137 - DNA, 2048 bp, Homo sapiens
  source 1..2048: mol_type = genomic DNA
actccggcatttgcagcagagcgaaaggtggtcgagtcctgaaggagggcctgatgtcttcatcattctcaaattcttaggacggtcgggccctggaaggaacgctctcggaattggccgcggaaaccgatctgcccgttgtgtttgtgaaacagagaaagataggcggccatggtccaaccttgaaggaggcagcccaatatggcaagaaggtgatggtcctggactttgtcactcccacccctcttggaactagatggggtctcggaggaacatgtgtgaatgtgggttgcatacctaaaaaactgatgcatcaagcagctttgttaggacaagccctgcaagactctcgaaattatggatggaaagtcgaggagacagttaagcatgattgggacagaatgatagaagctgtacagaatcacattggctctttgaattggggctaccgagtagctctgcgggagaaaaaagtcgtctatgagaatgcttatgggcaatttattggtcctcacaggattaaggcaacaaataataaaggcaaagaaaaaatttattcagcagagagatttctcattgccactggtgaaagaccacgttacttgggcatccctggtgacaaagaatactgcatcagcagtgatgatcttttctccttgccttactgcccgggtaagaccctggttgttggagcatcctatgtcgctttggagtgcgctggatttcttgctggtattggtttagacgtcactgttatggttaggtccattcttcttagaggatttgaccaggacatggccaacaaaattggtgaacacatggaagaacatggcatcaagtttataagacagttcgtaccaattaaagttgaacaaattgaagcagggacaccaggccgactcagagtagtagctcagtccaccaatagtgaggaaatcattgaaggagaatataatacggtgatgctggcaataggaagagatgcttgcacaagaaaaattggcttagaaaccgtaggggtgaagataaatgaaaagactggaaaaatacctgtcacagatgaagaacagaccaatgtgccttacatctatgccattggcgatatattggaggataaggtggagctcaccccagttgcaatccaggcaggaagattgctggctcagaggctctatgcaggttccactgtcaagtgtgactatgaaaatgttccaaccactgtatttactcctttggaatatggtgcttgtggcctttctgaggagaaagctgtggagaagtttggggaagaaaatattgaggtttaccatagttacttttggccattggaatggacgattccgtcaagagataacaacaaatgttatgcaaaaataatctgtaatactaaagacaatgaacgtgttgtgggctttcacgtactgggtccaaatgctggagaagttacacaaggctttgcagctgcgctcaaatgtggactgaccaaaaagcagctggacagcacaattggaatccaccctgtctgtgcagaggtattcacaacattgtctgtgaccaagcgctctggggcaagcatcctccaggctggctgctgaggttaagccccagtgtggatgctgttgccaagactgcaaaccactggctcgtttccgtgcccaaatccaaggcgaagttttctagagggttcttgggctcttggcacctgcgtgtcctgtgcttaccaccgcccaaggcccccttggatctcttggataggagttggtgaatagaaggcaggcagcatcacactggggtcactgacagacttgaagctgacatttggcagggcatcgaagggatgcatccatgaagtcaccagtctcaagcccatgtggtaggcggtgatggaacaactgtcaaatcagttttagcatgacctttccttgtggattttcttattctcgttgtcaagttttctagggttgaatttttttcttttttctccatggtgttaatgatattagagatgaaaaacgttagcagttgatttttgtccaaaagcaagtcat

SEQ ID NO: 4138 - DNA, 1933 bp, Homo sapiens; identical to SEQ ID NO: 4126
  source 1..1933: mol_type = genomic DNA

SEQ ID NO: 4139 - DNA, 1877 bp, Homo sapiens
  source 1..1877: mol_type = genomic DNA
gctcatccgagggcttcctgatgtgacggactgtgaagaggcagccctggatgacctctgtgccgcggaaaccgatgtggaagaccccgaggtggagtgtggctgaggccctgagtgtccagccacatggtggcaccagcaccactcctttccttaccacatcaactgattaaagcagtgaccagcaggaactgcccagagaactggctggccttgtttcctgagtctgatctgtttggcggagtgggaggggtggagcaggacccggaccctgagtggctgggatccttcttcctgtccctggctgttgctgagcccgtccccatggtaactgatctgccttgaggaaggagccctgccctgcctgtggaattgtcctgagtcattgctttgggctggggccatgggaagaaaccattgtgtggcagggaaggaggtggctcttggcccaggcctaaaccaggaaagcctgggaaactgggacccacaggtgggcatgaaagggccgcagcaggggctcccagcagtgtgtaagaccgggagctggtctggcaccactgccctggtccttccagctgcctgtcactggtatgatggccccggtgcattgtgccaccagcaggccacagctgtggatcttggaaggcctctggggtcccccgggagcaggggagtgggtgtgggggggaacggatggtggtgagagggacagaccaggcaggctgacgagcagggcgggcctggctcacgtgggcctgtaggcgggcccacgccaagtttcacttcccgccactgctgccagcgagagccgcgggagagtgtgcagccgagtcactactgcctgcctgcctgcctgctacggctcagcagcaggtacgtacccaaccatgggctcgcaggccctgcccccggggcccatgcagaccctcatctttttcgacatggaggccactggcttgcccttctcccagcccaaggtcacggagctgtgcctgctggctgtccacagatgtgccctggagagcccccccacctctcaggggccacctcccacagttcctccaccaccgcgtgtggtagacaagctctccctgtgtgtggctccggggaaggcctgcagccctgcagccagcgagatcacaggtctgagcacagctgtgctggcagcgcatgggcgtcaatgttttgatgacaacctggccaacctgctcctagccttcctgcggcgccagccacagccctggtgcctggtggcacacaatggtgaccgctacgacttccccctgctccaagcagagctggctatgctgggcctcaccagtgctctggatggtgccttctgtgtggatagcatcactgcgctgaaggccctggagcgagcaagcagcccctcagaacacggcccaaggaagagctacagcctaggcagcatctacactcgcctgtatgggcagtcccctccagactcgcacacggctgagggtgatgtcctggccctgctcagcatctgtcagtggagaccacaggccctgctgcggtgggtggatgctcacgccaggcctttcggcaccatcaggcccatgtatggggtcacagcctctgctaggaccaagccaagaccatctgctgtcacaaccactgcacacctggccacaaccaggaacactagtcccagccttggagagagcaggggtaccaaggatcttcctccagtgaaggaccctggagccctatccagggaggggctgctggccccactgggtctgctggccatcctgaccttggcagtagccacactgtatggactatccctggccacacctggggagtaggccaagaaggaaaatctgacgaataaagacccccgctgccccata

SEQ ID NO: 4140 - DNA, 1813 bp, Homo sapiens
  source 1..1813: mol_type = genomic DNA
gtcattgctttgggctggggccatgggaagaaaccattgtgtggcagggaaggaggtggctcttggcccaggcctaaaccaggaaagcctgggaaactgggacccacaggtgggcatgaaagggccgcagcaggggctcccagcagtgtgtaagaccgggagctggtctggcaccactgccctggtccttccagctgcctgtcactggtatgatggccccggtgcattgtgccaccagcaggccacagctgtggatcttggaaggcctctggggtcccccgggagcaggggagtgggtgtgggggggaacggatggtggtgagagggacagaccaggcaggctgacgagcagggcgggcctggctcacgtgggcctgtaggcgggcccacgccaagtttcacttcccgccactgctgccagcgagagccgcgggagagtgtgcagccgagtcactactgcctgcctgcctgcctgctacggtgagtgtggcccccacaatgggatggcgcagggcaggagggccatgggttcccccaccccagactaagggggcactaggggaggggccgagtcatgtgaagagggagaccctctcagacagtcgaatgtgctggtcccactaaggaaaccacctcaccctctccaacttcctgcctgaaaatgggccctggagctcgcagacagggcaggattgtgcagggaaggcctgagatgtgcttctgcccaccccctaccccactccctccccttcggatcttaacactgggcactcacacacccaccccatgctcctctccaggctcagcagcaggtacgtacccaaccatgggctcgcaggccctgcccccggggcccatgcagaccctcatctttttcgacatggaggccactggcttgcccttctcccagcccaaggtcacggagctgtgcctgctggctgtccacagatgtgccctggagagcccccccacctctcaggggccacctcccacagttcctccaccaccgcgtgtggtagacaagctctccctgtgtgtggctccggggaaggcctgcagccctgcagccagcgagatcacaggtctgagcacagctgtgctggcagcgcatgggcgtcaatgttttgatgacaacctggccaacctgctcctagccttcctgcggcgccagccacagccctggtgcctggtggcacacaatggtgaccgctacgacttccccctgctccaagcagagctggctatgctgggcctcaccagtgctctggatggtgccttctgtgtggatagcatcactgcgctgaaggccctggagcgagcaagcagcccctcagaacacggcccaaggaagagctacagcctaggcagcatctacactcgcctgtatgggcagtcccctccagactcgcacacggctgagggtgatgtcctggccctgctcagcatctgtcagtggagaccacaggccctgctgcggtgggtggatgctcacgccaggcctttcggcaccatcaggcccatgtatggggtcacagcctctgctaggaccaagccaagaccatctgctgtcacaaccactgcacacctggccacaaccaggaacactagtcccagccttggagagagcaggggtaccaaggatcttcctccagtgaaggaccctggagccctatccagggaggggctgctggccccactgggtctgctggccatcctgaccttggcagtagccacactgtatggactatccctggccacacctggggagtaggccaagaaggaaaatctgacgaataaagacccccgctgcccc

SEQ ID NO: 4141 - DNA, 1105 bp, Homo sapiens
  source 1..1105: mol_type = genomic DNA
gcctgtggaattgtcctgagtcattgctttgggctggggccatgggaagaaaccattgtgtggcagggaaggaggtggctcttggcccaggcctaaaccaggaaagcctgggaaactgggacccacagcgagagccgcgggagagtgtgcagccgagtcactactgcctgcctgcctgcctgctacggctcagcagcagcccaaggtcacggagctgtgcctgctggctgtccacagatgtgccctggagagcccccccacctctcaggggccacctcccacagttcctccaccaccgcgtgtggtagacaagctctccctgtgtgtggctccggggaaggcctgcagccctgcagccagcgagatcacaggtctgagcacagctgtgctggcagcgcatgggcgtcaatgttttgatgacaacctggccaacctgctcctagccttcctgcggcgccagccacagccctggtgcctggtggcacacaatggtgaccgctacgacttccccctgctccaagcagagctggctatgctgggcctcaccagtgctctggatggtgccttctgtgtggatagcatcactgcgctgaaggccctggagcgagcaagcagcccctcagaacacggcccaaggaagagctacagcctaggcagcatctacactcgcctgtatgggcagtcccctccagactcgcacacggctgagggtgatgtcctggccctgctcagcatctgtcagtggagaccacaggccctgctgcggtgggtggatgctcacgccaggcctttcggcaccatcaggcccatgtatggggtcacagcctctgctaggaccaagccaagaccatctgctgtcacaaccactgcacacctggccacaaccaggaacactagtcccagccttggagagagcaggggtaccaaggatcttcctccagtgaaggaccctggagccctatccagggaggggctgctggccccactgggtctgctggccatcctgaccttggcagtagccacactgtatggactatccctggccacacctggggagtaggccaagaaggaaaatctgacgaataaagacccccgctgccccata

SEQ ID NO: 4142 - DNA, 1493 bp, Homo sapiens
  source 1..1493: mol_type = genomic DNA
gtcattgctttgggctggggccatgggaagaaaccattgtgtggcagggaaggaggtggctcttggcccaggcctaaaccaggaaagcctgggaaactgggacccacaggtgggcatgaaagggccgcagcaggggctcccagcagtgtgtaagaccgggagctggtctggcaccactgccctggtccttccagctgcctgtcactggtatgatggccccggtgcattgtgccaccagcaggccacagctgtggatcttggaaggcctctggggtcccccgggagcaggggagtgggtgtgggggggaacggatggtggtgagagggacagaccaggcaggctgacgagcagggcgggcctggctcacgtgggcctgtaggcgggcccacgccaagtttcacttcccgccactgctgccagcgagagccgcgggagagtgtgcagccgagtcactactgcctgcctgcctgcctgctacggctcagcagcaggtacgtacccaaccatgggctcgcaggccctgcccccggggcccatgcagaccctcatctttttcgacatggaggccactggcttgcccttctcccagcccaaggtcacggagctgtgcctgctggctgtccacagatgtgccctggagagcccccccacctctcaggggccacctcccacagttcctccaccaccgcgtgtggtagacaagctctccctgtgtgtggctccggggaaggcctgcagccctgcagccagcgagatcacaggtctgagcacagctgtgctggcagcgcatgggcgtcaatgttttgatgacaacctggccaacctgctcctagccttcctgcggcgccagccacagccctggtgcctggtggcacacaatggtgaccgctacgacttccccctgctccaagcagagctggctatgctgggcctcaccagtgctctggatggtgccttctgtgtggatagcatcactgcgctgaaggccctggagcgagcaagcagcccctcagaacacggcccaaggaagagctacagcctaggcagcatctacactcgcctgtatgggcagtcccctccagactcgcacacggctgagggtgatgtcctggccctgctcagcatctgtcagtggagaccacaggccctgctgcggtgggtggatgctcacgccaggcctttcggcaccatcaggcccatgtatggggtcacagcctctgctaggaccaagccaagaccatctgctgtcacaaccactgcacacctggccacaaccaggaacactagtcccagccttggagagagcaggggtaccaaggatcttcctccagtgaaggaccctggagccctatccagggaggggctgctggccccactgggtctgctggccatcctgaccttggcagtagccacactgtatggactatccctggccacacctggggagtaggccaagaaggaaaatctgacgaataaagacccccgctgcccc

SEQ ID NO: 4143 - DNA, 1200 bp, Homo sapiens
  source 1..1200: mol_type = genomic DNA
tgaaagggccgcagcaggggctcccagcagtgtgtaagaccgggagctggtctggcaccactgccctggtccttccagctgcctgtcactggtatgatggccccggtgcattgtgccaccagcaggccacagctgtggatcttggaaggcctctggggtcccccgggagcaggggagtgggtgtgggggggaacggatggtggtgagagggacagaccaggcaggccctgcccccggggcccatgcagaccctcatctttttcgacatggaggccactggcttgcccttctcccagcccaaggtcacggagctgtgcctgctggctgtccacagatgtgccctggagagcccccccacctctcaggggccacctcccacagttcctccaccaccgcgtgtggtagacaagctctccctgtgtgtggctccggggaaggcctgcagccctgcagccagcgagatcacaggtctgagcacagctgtgctggcagcgcatgggcgtcaatgttttgatgacaacctggccaacctgctcctagccttcctgcggcgccagccacagccctggtgcctggtggcacacaatggtgaccgctacgacttccccctgctccaagcagagctggctatgctgggcctcaccagtgctctggatggtgccttctgtgtggatagcatcactgcgctgaaggccctggagcgagcaagcagcccctcagaacacggcccaaggaagagctacagcctaggcagcatctacactcgcctgtatgggcagtcccctccagactcgcacacggctgagggtgatgtcctggccctgctcagcatctgtcagtggagaccacaggccctgctgcggtgggtggatgctcacgccaggcctttcggcaccatcaggcccatgtatggggtcacagcctctgctaggaccaagccaagaccatctgctgtcacaaccactgcacacctggccacaaccaggaacactagtcccagccttggagagagcaggggtaccaaggatcttcctccagtgaaggaccctggagccctatccagggaggggctgctggccccactgggtctgctggccatcctgaccttggcagtagccacactgtatggactatccctggccacacctggggagtaggccaagaaggaaaatctgacgaataaagacccccgctgcccca

SEQ ID NO: 4144 - DNA, 629 bp, Homo sapiens
  source 1..629: mol_type = genomic DNA
ggagagtgtgcagccgagtcactactgcctgcctgcctgcctgctacgagctggctatgctgggcctcaccagtgctctggatggtgccttctgtgtggatagcatcactgcgctgaaggccctggagcgagcaagcagcccctcagaacacggcccaaggaagagctacagcctaggcagcatctacactcgcctgtatgggcagtcccctccagactcgcacacggctgagggtgatgtcctggccctgctcagcatctgtcagtggagaccacaggccctgctgcggtgggtggatgctcacgccaggcctttcggcaccatcaggcccatgtatggggtcacagcctctgctaggaccaagccaagaccatctgctgtcacaaccactgcacacctggccacaaccaggaacactagtcccagccttggagagagcaggggtaccaaggatcttcctccagtgaaggaccctggagccctatccagggaggggctgctggccccactgggtctgctggccatcctgaccttggcagtagccacactgtatggactatccctggccacacctggggagtaggccaagaaggaaaatctgacgaataaagacccccgctgccccata

SEQ ID NO: 4145 - DNA, 7775 bp, Homo sapiens
  source 1..7775: mol_type = genomic DNA
agctggcctgcgagttcagggctcctgtcgctctccaggagcaacctctactccggacgcacaggcattccccgcgcccctccagccctcgccgccctcgccaccgctcccggccgccgcgctccggtacacacaggatccctgctgggcaccaacagctccaccatggggctggcctggggactaggcgtcctgttcctgatgcatgtgtgtggcaccaaccgcattccagagtctggcggagacaacagcgtgtttgacatctttgaactcaccggggccgcccgcaaggggtctgggcgccgactggtgaagggccccgacccttccagcccagctttccgcatcgaggatgccaacctgatcccccctgtgcctgatgacaagttccaagacctggtggatgctgtgcgggcagaaaagggtttcctccttctggcatccctgaggcagatgaagaagacccggggcacgctgctggccctggagcggaaagaccactctggccaggtcttcagcgtggtgtccaatggcaaggcgggcaccctggacctcagcctgaccgtccaaggaaagcagcacgtggtgtctgtggaagaagctctcctggcaaccggccagtggaagagcatcaccctgtttgtgcaggaagacagggcccagctgtacatcgactgtgaaaagatggagaatgctgagttggacgtccccatccaaagcgtcttcaccagagacctggccagcatcgccagactccgcatcgcaaaggggggcgtcaatgacaatttccagggggtgctgcagaatgtgaggtttgtctttggaaccacaccagaagacatcctcaggaacaaaggctgctccagctctaccagtgtcctcctcacccttgacaacaacgtggtgaatggttccagccctgccatccgcactaactacattggccacaagacaaaggacttgcaagccatctgcggcatctcctgtgatgagctgtccagcatggtcctggaactcaggggcctgcgcaccattgtgaccacgctgcaggacagcatccgcaaagtgactgaagagaacaaagagttggccaatgagctgaggcggcctcccctatgctatcacaacggagttcagtacagaaataacgaggaatggactgttgatagctgcactgagtgtcactgtcagaactcagttaccatctgcaaaaaggtgtcctgccccatcatgccctgctccaatgccacagttcctgatggagaatgctgtcctcgctgttggcccagcgactctgcggacgatggctggtctccatggtccgagtggacctcctgttctacgagctgtggcaatggaattcagcagcgcggccgctcctgcgatagcctcaacaaccgatgtgagggctcctcggtccagacacggacctgccacattcaggagtgtgacaagagatttaaacaggatggtggctggagccactggtccccgtggtcatcttgttctgtgacatgtggtgatggtgtgatcacaaggatccggctctgcaactctcccagcccccagatgaacgggaaaccctgtgaaggcgaagcgcgggagaccaaagcctgcaagaaagacgcctgccccatcaatggaggctggggtccttggtcaccatgggacatctgttctgtcacctgtggaggaggggtacagaaacgtagtcgtctctgcaacaaccccacaccccagtttggaggcaaggactgcgttggtgatgtaacagaaaaccagatctgcaacaagcaggactgtccaattgatggatgcctgtccaatccctgctttgccggcgtgaagtgtactagctaccctgatggcagctggaaatgtggtgcttgtccccctggttacagtggaaatggcatccagtgcacagatgttgatgagtgcaaagaagtgcctgatgcctgcttcaaccacaatggagagcaccggtgtgagaacacggaccccggctacaactgcctgccctgccccccacgcttcaccggctcacagcccttcggccagggtgtcgaacatgccacggccaacaaacaggtgtgcaagccccgtaacccctgcacggatgggacccacgactgcaacaagaacgccaagtgcaactacctgggccactatagcgaccccatgtaccgctgcgagtgcaagcctggctacgctggcaatggcatcatctgcggggaggacacagacctggatggctggcccaatgagaacctggtgtgcgtggccaatgcgacttaccactgcaaaaaggataattgccccaaccttcccaactcagggcaggaagactatgacaaggatggaattggtgatgcctgtgatgatgacgatgacaatgataaaattccagatgacagggacaactgtccattccattacaacccagctcagtatgactatgacagagatgatgtgggagaccgctgtgacaactgtccctacaaccacaacccagatcaggcagacacagacaacaatggggaaggagacgcctgtgctgcagacattgatggagacggtatcctcaatgaacgggacaactgccagtacgtctacaatgtggaccagagagacactgatatggatggggttggagatcagtgtgacaattgccccttggaacacaatccggatcagctggactctgactcagaccgcattggagatacctgtgacaacaatcaggatattgatgaagatggccaccagaacaatctggacaactgtccctatgtgcccaatgccaaccaggctgaccatgacaaagatggcaagggagatgcctgtgaccacgatgatgacaacgatggcattcctgatgacaaggacaactgcagactcgtgcccaatcccgaccagaaggactctgacggcgatggtcgaggtgatgcctgcaaagatgattttgaccatgacagtgtgccagacatcgatgacatctgtcctgagaatgttgacatcagtgagaccgatttccgccgattccagatgattcctctggaccccaaagggacatcccaaaatgaccctaactgggttgtacgccatcagggtaaagaactcgtccagactgtcaactgtgatcctggactcgctgtaggttatgatgagtttaatgctgtggacttcagtggcaccttcttcatcaacaccgaaagggacgatgactatgctggatttgtctttggctaccagtccagcagccgcttttatgttgtgatgtggaagcaagtcacccagtcctactgggacaccaaccccacgagggctcagggatactcgggcctttctgtgaaagttgtaaactccaccacagggcctggcgagcacctgcggaacgccctgtggcacacaggaaacacccctggccaggtgcgcaccctgtggcatgaccctcgtcacataggctggaaagatttcaccgcctacagatggcgtctcagccacaggccaaagacgggtttcattagagtggtgatgtatgaagggaagaaaatcatggctgactcaggacccatctatgataaaacctatgctggtggtagactagggttgtttgtcttctctcaagaaatggtgttcttctctgacctgaaatacgaatgtagagatccctaatcatcaaattgttgattgaaagactgatcataaaccaatgctggtattgcaccttctggaactatgggcttgagaaaacccccaggatcacttctccttggcttccttcttttctgtgcttgcatcagtgtggactcctagaacgtgcgacctgcctcaagaaaatgcagttttcaaaaacagactcagcattcagcctccaatgaataagacatcttccaagcatataaacaattgctttggtttccttttgaaaaagcatctacttgcttcagttgggaaggtgcccattccactctgcctttgtcacagagcagggtgctattgtgaggccatctctgagcagtggactcaaaagcattttcaggcatgtcagagaagggaggactcactagaattagcaaacaaaaccaccctgacatcctccttcaggaacacggggagcagaggccaaagcactaaggggagggcgcatacccgagacgattgtatgaagaaaatatggaggaactgttacatgttcggtactaagtcattttcaggggattgaaagactattgctggatttcatgatgctgactggcgttagctgattaacccatgtaaataggcacttaaatagaagcaggaaagggagacaaagactggcttctggacttcctccctgatccccacccttactcatcacctgcagtggccagaattagggaatcagaatcaaaccagtgtaaggcagtgctggctgccattgcctggtcacattgaaattggtggcttcattctagatgtagcttgtgcagatgtagcaggaaaataggaaaacctaccatctcagtgagcaccagctgcctcccaaaggaggggcagccgtgcttatatttttatggttacaatggcacaaaattattatcaacctaactaaaacattccttttctcttttttcctgaattatcatggagttttctaattctctcttttggaatgtagattttttttaaatgctttacgatgtaaaatatttattttttacttattctggaagatctggctgaaggattattcatggaacaggaagaagcgtaaagactatccatgtcatctttgttgagagtcttcgtgactgtaagattgtaaatacagattatttattaactctgttctgcctggaaatttaggcttcatacggaaagtgtttgagagcaagtagttgacatttatcagcaaatctcttgcaagaacagcacaaggaaaatcagtctaataagctgctctgccccttgtgctcagagtggatgttatgggattctttttttctctgttttatcttttcaagtggaattagttggttatccatttgcaaatgttttaaattgcaaagaaagccatgaggtcttcaatactgttttaccccatcccttgtgcatatttccagggagaaggaaagcatatacacttttttctttcatttttccaaaagagaaaaaaatgacaaaaggtgaaacttacatacaaatattacctcatttgttgtgtgactgagtaaagaatttttggatcaagcggaaagagtttaagtgtctaacaaacttaaagctactgtagtacctaaaaagtcagtgttgtacatagcataaaaactctgcagagaagtattcccaataaggaaatagcattgaaatgttaaatacaatttctgaaagttatgttttttttctatcatctggtataccattgctttatttttataaattattttctcattgccattggaatagatatctcagattgtgtagatatgctatttaaataatttatcaggaaatactgcctgtagagttagtatttctatttttatataatgtttgcacactgaattgaagaattgttggttttttcttttttttgttttgtttttttttttttttttttttgcttttgacctcccatttttactatttgccaatacctttttctaggaatgtgcttttttttgtacacatttttatccattttacattctaaagcagtgtaagttgtatattactgtttcttatgtacaaggaacaacaataaatcatatggaaatttatatttatacttactgtatccatgcttatttgttctctactggctttatgtcatgaagtatatgcgtaaataccattcataaatcaatatagcatatacaaaaataaattacagtaagtcatagcaacattcacagtttgtatgtgattgagaaagactgagttgctcaggcctaggcttagaatttgctgcgtttgtggaataaaagaacaaaatgatacattagcctgccatatcaaaaacatataaaagagaaattatccctaagtcaagggcccccataagaataaaatttcttattaaggtcattagatgtcattgaatccttttcaaagtgcagtatgaaaacaaagggaaaaacactgaagcacacgcaactctcacagcgacattttctgacccacgaatgatgccttgggtgggcaacacgattgcatgttgtggagacacttcggaagtaaatgtggatgagggaggagctgtccttgcaatgttgagccaagcattacagatacctcctcttgaagaaggaataataagtttaatcaaaaaagaagactaaaaaatgtaaaatttggaaggaatccataaatgcgtgtgtgtctaaatacaaattatcatgtgaagaaaaggcccaagtgtaccaataagcagaccttgatttttggatgggctaattatgaatgtggaatactgaccagttaatttccagttttaatgaaaacagatcaaagaagaaattttatgagtaggttaaaggtctggctttgaggtctattaaacactagaaaggactggctgggtgagataaaatcttccttgttgattttcactctcattctataaatactcatctttctgagtagccatgatcacatacaaatgtaaattgccaaatcattttatagtaccaaggtgaagaagcaggaactagaaagtgttgataatagctgtggagttaggaaaactgatgtgaaggaaataattctttgaaatggcaaagaattaaataccatcattcattatcagaagagttcaacgtttgaagtgctgggagataattctaattcattcttggatagtgaagcaaaactgattgaaaataccaagataagacagaaaaagtgactggaaagaggagcttttcttccaggcatgttccagtttcaccctaagactgaccttcaaataatcaggttgtactgaaataaaggacttgttaaaaattaaaattatgtcatcgagatgatagcttttttcctcctccaacagtttattgtcatgtgttgtgggagagctcgagtgaagagcaataaactccaggtcttataagaatgtacatacaataaaggtggtgccagcagtttttttttttctaaagagtcacatgtagaaaagcctccagtattaagctcctgaattcattccttaaataaattggctctctctctcttctataatttctttttctttttatttttgagatgaagtcttgctctgtcgcccaggctggagtgcagtgacacaatctcggctcactgcaacctctgcctccccggttcaagcaattctccctcctgcctcagcctcccaagtagctgggactacaagcgcccgccaccaagcctggctaattctgtatttttagtaaagacggggtttcaccttgttccggacaaacactaagccctaaagggaaatccaaaataaaaacatctatttttaataacactttctatctaaatcagggtgactttttaaaaaaaatccggaagctttttgttgaattacgttacagacttagttaccagtccttgttagagttaccttcagttgacatgctgtgaatggtcccacctcttttatggcagaattcattacttaaaataactctattttcttcccccttacctaaataacagaaaggctcactatgtcccaaatatcattggcagaagcaaactataaagtcataagccctttgcagtgcaagtctagaaataatttt

SEQ ID NO: 4146 - DNA, 582 bp, Homo sapiens
  source 1..582: mol_type = genomic DNA
agccgctgcgcccgagctggcctgcgagttcagggctcctgtcgctctccaggagcaacctctactccggacgcacaggcattccccgcgcccctccagccctcgccgccctcgccaccgctcccggccgccgcgctccggtacacacagcaaacgcggggtcaaagagggatggtcccggccctgtccccatgcccagccccgtttctgcgcaccgtccctccctgcctagctgatctctgaccctcggctcttgtgcttcctgctacaggatccctgctgggcaccaacagctccaccatggggctggcctggggactaggcgtcctgttcctgatgcatgtgtgtggcaccaaccgcattccagagtctggcggagacaacagcgtgtttgacatctttgaactcaccggggccgcccgcaaggggtctgggcgccgactggtgaagggccccgacccttccagcccagctttccgcatcgaggatgccaacctgatcccccctgtgcctgatgacaagttccaagacctggtggatgctgtgcgggcagaaaagggtttcctccttctggcatccctg

SEQ ID NO: 4147 - DNA, 1235 bp, Homo sapiens
  source 1..1235: mol_type = genomic DNA
gaaaaccagatctgcaacaagcaggactgtccaattgatggatgcctgtccaatccctgctttgccggcgtgaagtgtactagctaccctgatggcagctggaaatgtggtgcttgtccccctggttacagtggaaatggcatccagtgcacagatgttgatgagtgcaaagaagtgcctgatgcctgcttcaaccacaatggagagcaccggtgtgagaacacggaccccggctacaactgcctgccctgccccccacgcttcaccggctcacagcccttcggccagggtgtcgaacatgccacggccaacaaacaggtgtgcaagccccattccactctgcctttgtcacagagcagggtgctattgtgaggccatctctgagcagtggactcaaaagcattttcaggcatgtcagagaagggaggactcactagaattagcaaacaaaaccaccctgacatcctccttcaggaacacggggagcagaggccaaagcactaaggggagggcgcatacccgagacgattgtatgaagaaaatatggaggaactgttacatgttcggtactaagtcattttcaggggattgaaagactattgctggatttcatgatgctgactggcgttagctgattaacccatgtaaataggcacttaaatagaagcaggaaagggagacaaagactggcttctggacttcctccctgatccccacccttactcatcacctgcagtggccagaattagggaatcagaatcaaaccagtgtaaggcagtgctggctgccattgcctggtcacattgaaattggtggcttcattctagatgtagcttgtgcagatgtagcaggaaaataggaaaacctaccatctcagtgagcaccagctgcctcccaaaggaggggcagccgtgcttatatttttatggttacaatggcacaaaattattatcaacctaactaaaacattccttttctcttttttcctgaattatcatggagttttctaattctctcttttggaatgtagattttttttaaatgctttacgatgtaaaatatttattttttacttattctggaagatctggctgaaggattattcatggaacaggaagaagcgtaaagactatccatgtcatctttgttgagagtcttcgtgactgtaagattgtaaatacagattatttattaactctgttctgcctggaaatttaggcttcatacggaaagtg

SEQ ID NO: 4148 - DNA, 5811 bp, Homo sapiens
  source 1..5811: mol_type = genomic DNA
aggaggaggagacggcatccagtacagaggggctggacttggacccctgcagcagccctgcacaggagaagcggcatataaagccgcgctgcccgggagccgctcggccacgtccaccggagcatcctgcactgcagggccggtctctcgctccagcagagcctgcgcctttctgactcggtccggaacactgaaaccagtcatcactgcatctttttggcaaaccaggagctcagctgcaggaggcaggatggtctggaggctggtcctgctggctctgtgggtgtggcccagcacgcaagctggtcaccaggacaaagacacgaccttcgaccttttcagtatcagcaacatcaaccgcaagaccattggcgccaagcagttccgcgggcccgaccccggcgtgccggcttaccgcttcgtgcgctttgactacatcccaccggtgaacgcagatgacctcagcaagatcaccaagatcatgcggcagaaggagggcttcttcctcacggcccagctcaagcaggacggcaagtccaggggcacgctgttggctctggagggccccggtctctcccagaggcagttcgagatcgtctccaacggccccgcggacacgctggatctcacctactggattgacggcacccggcatgtggtctccctggaggacgtcggcctggctgactcgcagtggaagaacgtcaccgtgcaggtggctggcgagacctacagcttgcacgtgggctgcgacctcatagacagcttcgctctggacgagcccttctacgagcacctgcaggcggaaaagagccggatgtacgtggccaaaggctctgccagagagagtcacttcaggggtttgcttcagaacgtccacctagtgtttgaaaactctgtggaagatattctaagcaagaagggttgccagcaaggccagggagctgagatcaacgccatcagtgagaacacagagacgctgcgcctgggtccgcatgtcaccaccgagtacgtgggccccagctcggagaggaggcccgaggtgtgcgaacgctcgtgcgaggagctgggaaacatggtccaggagctctcggggctccacgtcctcgtgaaccagctcagcgagaacctcaagagagtgtcgaatgataaccagtttctctgggagctcattggtggccctcctaagacaaggaacatgtcagcttgctggcaggatggccggttctttgcggaaaatgaaacgtgggtggtggacagctgcaccacgtgtacctgcaagaaatttaaaaccatttgccaccaaatcacctgcccgcctgcaacctgcgccagtccatcctttgtggaaggcgaatgctgcccttcctgcctccactcggtggacggtgaggagggctggtctccgtgggcagagtggacccagtgctccgtgacgtgtggctctgggacccagcagagaggccggtcctgtgacgtcaccagcaacacctgcttggggccctccatccagacacgggcttgcagtctgagcaagtgtgacacccgcatccggcaggacggcggctggagccactggtcaccttggtcttcatgctctgtgacctgtggagttggcaatatcacacgcatccgtctctgcaactccccagtgccccagatggggggcaagaattgcaaagggagtggccgggagaccaaagcctgccagggcgccccatgcccaatcgatggccgctggagcccctggtccccgtggtcggcctgcactgtcacctgtgccggtgggatccgggagcgcacccgggtctgcaacagccctgagcctcagtacggagggaaggcctgcgtgggggatgtgcaggagcgtcagatgtgcaacaagaggagctgccccgtggatggctgtttatccaacccctgcttcccgggagcccagtgcagcagcttccccgatgggtcctggtcatgcggctcctgccctgtgggcttcttgggcaatggcacccactgtgaggacctggacgagtgtgccctggtccccgacatctgcttctccaccagcaaggtgcctcgctgtgtcaacactcagcctggcttccactgcctgccctgcccgccccgatacagagggaaccagcccgtcggggtcggcctggaagcagccaagacggaaaagcaagtgtgtgagcccgaaaacccatgcaaggacaagacacacaactgccacaagcacgcggagtgcatctacctgggccacttcagcgaccccatgtacaagtgcgagtgccagacaggctacgcgggcgacgggctcatctgcggggaggactcggacctggacggctggcccaacctcaatctggtctgcgccaccaacgccacctaccactgcatcaaggataactgcccccatctgccaaattctgggcaggaagactttgacaaggacgggattggcgatgcctgtgatgatgacgatgacaatgacggtgtgaccgatgagaaggacaactgccagctcctcttcaatccccgccaggctgactatgacaaggatgaggttggggaccgctgtgacaactgcccttacgtgcacaaccctgcccagatcgacacagacaacaatggagagggtgacgcctgctccgtggacattgatggggacgatgtcttcaatgaacgagacaattgtccctacgtctacaacactgaccagagggacacggatggtgacggtgtgggggatcactgtgacaactgccccctggtgcacaaccctgaccagaccgacgtggacaatgaccttgttggggaccagtgtgacaacaacgaggacatagatgacgacggccaccagaacaaccaggacaactgcccctacatctccaacgccaaccaggctgaccatgacagagacggccagggcgacgcctgtgaccctgatgatgacaacgatggcgtccccgatgacagggacaactgccggcttgtgttcaacccagaccaggaggacttggacggtgatggacggggtgatatttgtaaagatgattttgacaatgacaacatcccagatattgatgatgtgtgtcctgaaaacaatgccatcagtgagacagacttcaggaacttccagatggtccccttggatcccaaagggaccacccaaattgatcccaactgggtcattcgccatcaaggcaaggagctggttcagacagccaactcggaccccggcatcgctgtaggttttgacgagtttgggtctgtggacttcagtggcacattctacgtaaacactgaccgggacgacgactatgccggcttcgtctttggttaccagtcaagcagccgcttctatgtggtgatgtggaagcaggtgacgcagacctactgggaggaccagcccacgcgggcctatggctactccggcgtgtccctcaaggtggtgaactccaccacggggacgggcgagcacctgaggaacgcgctgtggcacacggggaacacgccggggcaggtgcgaaccttatggcacgaccccaggaacattggctggaaggactacacggcctataggtggcacctgactcacaggcccaagactggctacatcagagtcttagtgcatgaaggaaaacaggtcatggcagactcaggacctatctatgaccaaacctacgctggcgggcggctgggtctatttgtcttctctcaagaaatggtctatttctcagacctcaagtacgaatgcagagatatttaaacaagatttgctgcatttccggcaatgccctgtgcatgccatggtccctagacacctcagttcattgtggtccttgtggcttctctctctagcagcacctcctgtcccttgaccttaactctgatggttcttcacctcctgccagcaaccccaaacccaagtgccttcagaggataaatatcaatggaactcagagatgaacatctaacccactagaggaaaccagtttggtgatatatgagactttatgtggagtgaaaattgggcatgccattacattgctttttcttgtttgtttaaaaagaatgacgtttacatataaaatgtaattacttattgtatttatgtgtatatggagttgaagggaatactgtgcataagccattatgataaattaagcatgaaaaatattgctgaactacttttggtgcttaaagttgtcactattcttgaattagagttgctctacaatgacacacaaatcccattaaataaattataaacaagggtcaattcaaatttgaagtaatgttttagtaaggagagattagaagacaacaggcatagcaaatgacataagctaccgattaactaatcggaacatgtaaaacagttacaaaaataaacgaactctcctcttgtcctacaatgaaagccctcatgtgcagtagagatgcagtttcatcaaagaacaaacatccttgcaaatgggtgtgacgcggttccagatgtggatttggcaaaacctcatttaagtaaaaggttagcagagcaaagtgcggtgctttagctgctgcttgtgccgctgtggcgtcggggaggctcctgcctgagcttccttccccagctttgctgcctgagaggaaccagagcagacgcacaggccggaaaaggcgcatctaacgcgtatctaggctttggtaactgcggacaagttgcttttacctgatttgatgatacatttcattaaggttccagttataaatattttgttaatatttattaagtgactatagaatgcaactccatttaccagtaacttattttaaatatgcctagtaacacatatgtagtataatttctagaaacaaacatctaataagtatataatcctgtgaaaatatgaggcttgataatattaggttgtcacgatgaagcatgctagaagctgtaacagaatacatagagaataatgaggagtttatgatggaaccttaaatatataatgttgccagcgattttagttcaatatttgttactgttatctatctgctgtatatggaattcttttaattcaaacgctgaaaagaatcagcatttagtcttgccaggcacacccaataatcagtcatgtgtaatatgcacaagtttgtttttgtttttgttttttttgttggttggtttgtttttttgctttaagttgcatgatctttctgcaggaaatagtcactcatcccactccacataaggggtttagtaagagaagtctgtctgtctgatgatggatagggggcaaatctttttcccctttctgttaatagtcatcacatttctatgccaaacaggaacaatccataactttagtcttaatgtacacattgcattttgataaaattaattttgttgtttcctttgaggttgatcgttgtgttgttgttttgctgcactttttacttttttgcgtgtggagctgtattcccgagaccaacgaagcgttgggatacttcattaaatgtagcgactgtcaacagcgtgcaggttttctgtttctgtgttgtggggtcaaccgtacaatggtgtgggagtgacgatgatgtgagtatttagaatgtaccatattttttgtaaattatttatgtttttctaaacaaatttatcgtataggttgatgaaacgtcatgtgttttgccaaagactgtaaatatttatttatgtgttcacatggtcaaaatttcaccactgaaaccctgcacttagctagaacctcatttttaaagattaacaacaggaaataaattgtaaaaaaggttttctatacatga

SEQ ID NO: 4149 - DNA, 1291 bp, Homo sapiens
  source 1..1291: mol_type = genomic DNA
tgacgatgacaatgacggtgtgaccgatgagaaggacaactgccagctcctcttcaatccccgccaggctgactatgacaaggatgaggttggggaccgctgtgacaactgcccttacgtgcacaaccctgcccagatcgacacagacaacaatggagagggtgacgcctgctccgtggacattgatggggacgatgtcttcaatgaacgagacaattgtccctacgtctacaacactgaccagagggacacggatggtgacggtgtgggggatcactgtgacaactgccccctggtgcacaaccctgaccagaccgacgtggacaatgaccttgttggggaccagtgtgacaacaacgaggacatagatgacgacggccaccagaacaaccaggacaactgcccctacatctccaacgccaaccaggctgaccatgacagagacggccagggcgacgcctgtgaccctgatgatgacaacgatggcgtccccgatgacagggacaactgccggcttgtgttcaacccagaccaggaggacttggacggtgatggacggggtgatatttgtaaagatgattttgacaatgacaacatcccagatattgatgatgtgtgtcctgaaaacaatgccatcagtgagacagacttcaggaacttccagatggtccccttggatcccaaagggaccacccaaattgatcccaactgggtcattcgccatcaaggcaaggagctggttcagacagccaactcggaccccggcatcgctgtaggttttgacgagtttgggtctgtggacttcagtggcacattctacgtaaacactgaccgggacgacgactatgccggcttcgtctttggttaccagtcaagcagccgcttctatgtggtgatgtggaagcaggtgacgcagacctactgggaggaccagcccacgcgggcctatggctactccggcgtgtccctcaaggtggtgaactccaccacggggacgggcgagcacctgaggaacgcgctgtggcacacggggaacacgccggggcaggtgcgaaccttatggcacgaccccaggaacattggctggaaggactacacggcctataggtggcacctgactcacaggcccaagactggctacatcagagtcttagtgcatgaaggaaaacaggtcatggcagactcaggacctatctatgaccaaacctacgctggcgggcggctgggtctatttgtcttctctcaagaaatggtctatttctcagacctcaagtacgaatgcagagttatc

SEQ ID NO: 4150 - DNA, 437 bp, Homo sapiens
  source 1..437: mol_type = genomic DNA
acattctgctccggtaacccatgcctgtggctcgctgggctaagtcagcccctggtgaagtttcatttgccgaattcatctctcatgacaacccgatgaggtgggcattttacatgacgctacgtttcattctacggatgaggaaactgagacagagaagttaagagctcagctgcaggaggcaggatggtctggaggctggtcctgctggctctgtgggtgtggcccagcacgcaagctggtcaccaggacaaagacacgaccttcgaccttttcagtatcagcaacatcaaccgcaagaccattggcgccaagcagttccgcgggcccgaccccggcgtgccggcttaccgcttcgtgcgctttgactacatcccaccggtgaacgcagatgacctcagcaagatcaccaagatcatgcggcagaaggagggctt

SEQ ID NO: 4151 - DNA, 1630 bp, Homo sapiens
  source 1..1630: mol_type = genomic DNA
cccacccgcctgccgtcctggggcgccgccgccccgccgccggcagtggaccgctgtgcgcgaaccctgaaccctacggtcccgacccgcgggcgaggccgggtacctgggctgggatccggagcaagcgggcgagggcagcgccctaagcaggcccggagcgatggcagccttgatgaccccgggaaccggggccccacccgcgcctggtgacttctccggggaagggagccagggacttcccgacccttcgccagagcccaagcagctcccggagctgatccgcatgaagcgagacggaggccgcctgagcgaagcggacatcaggggcttcgtggccgctgtggtgaatgggagcgcgcagggcgcacagatcggggccatgctgatggccatccgacttcggggcatggatctggaggagacctcggtgctgacccaggccctggctcagtcgggacagcagctggagtggccagaggcctggcgccagcagcttgtggacaagcattccacagggggtgtgggtgacaaggtcagcctggtcctcgcacctgccctggcggcatgtggctgcaaggtgccaatgatcagcggacgtggtctggggcacacaggaggcaccttggataagctggagtctattcctggattcaatgtcatccagagcccagagcagatgcaagtgctgctggaccaggcgggctgctgtatcgtgggtcagagtgagcagctggttcctgcggacggaatcctatatgcagccagagatgtgacagccaccgtggacagcctgccactcatcacagcctccattctcagtaagaaactcgtggaggggctgtccgctctggtggtggacgttaagttcggaggggccgccgtcttccccaaccaggagcaggcccgggagctggcaaagacgctggttggcgtgggagccagcctagggcttcgggtcgcggcagcgctgaccgccatggacaagcccctgggtcgctgcgtgggccacgccctggaggtggaggaggcgctgctctgcatggacggcgcaggcccgccagacttaagggacctggtcaccacgctcgggggcgccctgctctggctcagcggacacgcggggactcaggcccagggcgctgcccgggtggccgcggcgctggacgacggctcggcccttggccgcttcgagcggatgctggcggcgcagggcgtggatcccggtctggcccgagccctgtgctcgggaagtcccgcagaacgccggcagctgctgcctcgcgcccgggagcaggaggagctgctggcgcccgcagatggcaccgtggagctggtccgggcgctgccgctggcgctggtgctgcacgagctcggggccgggcgcagccgcgctggggagccgctccgcctgggggtgggcgcagagctgctggtcgacgtgggtcagaggctgcgccgtgggaccccctggctccgcgtgcaccgggacggccccgcgctcagcggcccgcagagccgcgccctgcaggaggcgctcgtactctccgaccgcgcgccattcgccgccccctcgcccttcgcagagctcgttctgccgccgcagcaataaagctcctttgccgcgaaa

SEQ ID NO: 4152 - DNA, 1614 bp, Homo sapiens
  source 1..1614: mol_type = genomic DNA
gccgccgccccgccgccggcagtggaccgctgtgcgcgaaccctgaaccctacggtcccgacccgcgggcgaggccgggtacctgggctgggatccggagcaagcgggcgagggcagcgccctaagcaggcatccccgcaggcccggagcgatggcagccttgatgaccccgggaaccggggccccacccgcgcctggtgacttctccggggaagggagccagggacttcccgacccttcgccagagcccaagcagctcccggagctgatccgcatgaagcgagacggaggccgcctgagcgaagcggacatcaggggcttcgtggccgctgtggtgaatgggagcgcgcagggcgcacagatcggggccatgctgatggccatccgacttcggggcatggatctggaggagacctcggtgctgacccaggccctggctcagtcgggacagcagctggagtggccagaggcctggcgccagcagcttgtggacaagcattccacagggggtgtgggtgacaaggtcagcctggtcctcgcacctgccctggcggcatgtggctgcaaggtgccaatgatcagcggacgtggtctggggcacacaggaggcaccttggataagctggagtctattcctggattcaatgtcatccagagcccagagcagatgcaagtgctgctggaccaggcgggctgctgtatcgtgggtcagagtgagcagctggttcctgcggacggaatcctatatgcagccagagatgtgacagccaccgtggacagcctgccactcatcacagcctccattctcagtaagaaactcgtggaggggctgtccgctctggtggtggacgttaagttcggaggggccgccgtcttccccaaccaggagcaggcccgggagctggcaaagacgctggttggcgtgggagccagcctagggcttcgggtcgcggcagcgctgaccgccatggacaagcccctgggtcgctgcgtgggccacgccctggaggtggaggaggcgctgctctgcatggacggcgcaggcccgccagacttaagggacctggtcaccacgctcgggggcgccctgctctggctcagcggacacgcggggactcaggcccagggcgctgcccgggtggccgcggcgctggacgacggctcggcccttggccgcttcgagcggatgctggcggcgcagggcgtggatcccggtctggcccgagccctgtgctcgggaagtcccgcagaacgccggcagctgctgcctcgcgcccgggagcaggaggagctgctggcgcccgcagatggcaccgtggagctggtccgggcgctgccgctggcgctggtgctgcacgagctcggggccgggcgcagccgcgctggggagccgctccgcctgggggtgggcgcagagctgctggtcgacgtgggtcagaggctgcgccgtgggaccccctggctccgcgtgcaccgggacggccccgcgctcagcggcccgcagagccgcgccctgcaggaggcgctcgtactctccgaccgcgcgccattcgccgccccctcgcccttcgcagagctcgttctgccgccgcagcaataaagctcctttgccgc

SEQ ID NO: 4153 - DNA, 1608 bp, Homo sapiens
  source 1..1608: mol_type = genomic DNA
gcgcgaaccctgaaccctacggtcccgacccgcgggcgaggccgggtacctgggctgggatccggagcaagcgggcgagggcagcgccctaagcaggccgcagaccccggacgtgtcaggcatccccgcaggcccggagcgatggcagccttgatgaccccgggaaccggggccccacccgcgcctggtgacttctccggggaagggagccagggacttcccgacccttcgccagagcccaagcagctcccggagctgatccgcatgaagcgagacggaggccgcctgagcgaagcggacatcaggggcttcgtggccgctgtggtgaatgggagcgcgcagggcgcacagatcggggccatgctgatggccatccgacttcggggcatggatctggaggagacctcggtgctgacccaggccctggctcagtcgggacagcagctggagtggccagaggcctggcgccagcagcttgtggacaagcattccacagggggtgtgggtgacaaggtcagcctggtcctcgcacctgccctggcggcatgtggctgcaaggtgccaatgatcagcggacgtggtctggggcacacaggaggcaccttggataagctggagtctattcctggattcaatgtcatccagagcccagagcagatgcaagtgctgctggaccaggcgggctgctgtatcgtgggtcagagtgagcagctggttcctgcggacggaatcctatatgcagccagagatgtgacagccaccgtggacagcctgccactcatcacagcctccattctcagtaagaaactcgtggaggggctgtccgctctggtggtggacgttaagttcggaggggccgccgtcttccccaaccaggagcaggcccgggagctggcaaagacgctggttggcgtgggagccagcctagggcttcgggtcgcggcagcgctgaccgccatggacaagcccctgggtcgctgcgtgggccacgccctggaggtggaggaggcgctgctctgcatggacggcgcaggcccgccagacttaagggacctggtcaccacgctcgggggcgccctgctctggctcagcggacacgcggggactcaggcccagggcgctgcccgggtggccgcggcgctggacgacggctcggcccttggccgcttcgagcggatgctggcggcgcagggcgtggatcccggtctggcccgagccctgtgctcgggaagtcccgcagaacgccggcagctgctgcctcgcgcccgggagcaggaggagctgctggcgcccgcagatggcaccgtggagctggtccgggcgctgccgctggcgctggtgctgcacgagctcggggccgggcgcagccgcgctggggagccgctccgcctgggggtgggcgcagagctgctggtcgacgtgggtcagaggctgcgccgtgggaccccctggctccgcgtgcaccgggacggccccgcgctcagcggcccgcagagccgcgccctgcaggaggcgctcgtactctccgaccgcgcgccattcgccgccccctcgcccttcgcagagctcgttctgccgccgcagcaataaagctcctttgccgcgaaa

SEQ ID NO: 4154 - DNA, 3251 bp, Homo sapiens
  source 1..3251: mol_type = genomic DNA
agtacgcgtgggatttggctccgaggaggcggaagtgcagcacagaaagggggtccgtgggggacggtagaagcctggaggaggagcttgagtccagccactgtctgggtactgccagccatcgggcccaggtctctggggttgtcttaccgcagtgagtaccacgcggtactacagagaccggctgcccgtgtgcccggcaggtggagccgcccgcatcagcggcctcggggaatggaagcggagaacgcgggcagctattcccttcagcaagctcaagctttttatacgtttccatttcaacaactgatggctgaagctcctaatatggcagttgtgaatgaacagcaaatgccagaagaagttccagccccagctcctgctcaggaaccagtgcaagaggctccaaaaggaagaaaaagaaaacccagaacaacagaaccaaaacaaccagtggaacccaaaaaacctgttgagtcaaaaaaatctggcaagtctgcaaaatcaaaagaaaaacaagaaaaaattacagacacatttaaagtaaaaagaaaagtagaccgttttaatggtgtttcagaagctgaacttctgaccaagactctccccgatattttgaccttcaatctggacattgtcattattggcataaacccgggactaatggctgcttacaaagggcatcattaccctggacctggaaaccatttttggaagtgtttgtttatgtcagggctcagtgaggtccagctgaaccatatggatgatcacactctaccagggaagtatggtattggatttaccaacatggtggaaaggaccacgcccggcagcaaagatctctccagtaaagaatttcgtgaaggaggacgtattctagtacagaaattacagaaatatcagccacgaatagcagtgtttaatggaaaatgtatttatgaaatttttagtaaagaagtttttggagtaaaggttaagaacttggaatttgggcttcagccccataagattccagacacagaaactctctgctatgttatgccatcatccagtgcaagatgtgctcagtttcctcgagcccaagacaaagttcattactacataaaactgaaggacttaagagatcagttgaaaggcattgaacgaaatatggacgttcaagaggtgcaatatacatttgacctacagcttgcccaagaggatgcaaagaagatggctgttaaggaagaaaaatatgatccaggttatgaggcagcatatggtggtgcttacggagaaaatccatgcagcagtgaaccttgtggcttctcttcaaatgggctaattgagagcgtggagttaagaggagaatcagctttcagtggcattcctaatgggcagtggatgacccagtcatttacagaccaaattccttcctttagtaatcactgtggaacacaagaacaggaagaagaaagccatgcttaagaatggtgcttctcagctctgcttaaatgctgcagttttaatgcagttgtcaacaagtagaacctcagtttgctaactgaagtgttttattagtattttactctagtggtgtaattgtaatgtagaacagttgtgtggtagtgtgaaccgtatgaacctaagtagtttggaagaaaaagtagggtttttgtatactagcttttgtatttgaattaattatcattccagctttttatatactatatttcatttatgaagaaattgattttcttttgggagtcacttttaatctgtaattttaaaatacaagtctgaatatttatagttgattcttaactgcataaacctagatataccattatcccttttatacctaagaagggcatgctaataattaccactgtcaaagaggcaaaggtgttgatttttgtatatgaagttaagcctcagtggagtctcatttgttagtttttagtggtaactaagggtaaactcagggttccctgagctatatgcacactcagacctctttgctttaccagtggtgtttgtgagttgctcagtagtaaaaactggcccttacctgacagagccctggctttgacctgctcagccctgtgtgttaatcctctagtagccaattaactactctggggtggcaggttccagagaatgcagtagaccttttgccactcatctgtgttttacttgagacatgtaaatatgatagggaaggaactgaatttctccattcatatttataaccattctagttttatcttccttggctttaagagtgtgccatggaaagtgataagaaatgaacttctaggctaagcaaaaagatgctggagatatttgatactctcatttaaactggtgctttatgtacatgagatgtactaaaataagtaatatagaatttttcttgctaggtaaatccagtaagccaataattttaaagattctttatctgcatcattgctgtttgttactataaattaaatgaacctcatggaaaggttgaggtgtatacctttgtgattttctaatgagttttccatggtgctacaaataatccagactaccaggtctggtagatattaaagctgggtactaagaaatgttatttgcatcctctcagttactcctgaatattctgatttcatacgtacccagggagcatgctgttttgtcaatcaatataaaatatttatgaggtctcccccacccccaggaggttatatgattgctcttctctttataataagagaaacaaattcttattgtgaatcttaacatgctttttagctgtggctatgatggattttattttttcctaggtcaagctgtgtaaaagtcatttatgttatttaaatgatgtactgtactgctgtttacatggacgttttgtgcgggtgctttgaagtgccttgcatcagggattaggagcaattaaattattttttcacgggactgtgtaaagcatgtaactaggtattgctttggtatataactattgtagctttacaagagattgttttatttgaatggggaaaataccctttaaattatgacggacatccactagagatgggtttgaggattttccaagcgtgtaataatgatgtttttcctaacatgacagatgagtagtaaatgttgatatatcctatacatgacagtgtgagactttttcattaaataatattgaaagattttaaaattcatttgaaagtctgatggcttttacaataaaagatattaagaattgttatccttaa

SEQ ID NO: 4155 - DNA, 1014 bp, Homo sapiens
  source 1..1014: mol_type = genomic DNA
aattacagacacatttaaagtaaaaagaaaagtagaccgttttaatggtgtttcagaagctgaacttctgaccaagactctccccgatattttgaccttcaatctggacattgtcattattggcataaacccgggactaatggctgcttacaaagggcatcattaccctggacctggaaaccatttttggaagtgtttgtttatgtcagggctcagtgaggtccagctgaaccatatggatgatcacactctaccagggaagtatggtattggatttaccaacatggtggaaaggaccacgcccggcagcaaagatctctccaggtatttatgaaatttttagtaaagaagtttttggagtaaaggttaagaacttggaatttgggcttcagccccataagattccagacacagaaactctctgctatgttatgccatcatccagtgcaagatgtgctcagtttcctcgagcccaagacaaagttcattactacataaaactgaaggacttaagagatcagttgaaaggcattgaacgaaatatggacgttcaagaggtgcaatatacatttgacctacagcttgcccaagaggatgcaaagaagatggctgttaaggaagaaaaatatgatccaggttatgaggcagcatatggtggtgcttacggagaaaatccatgcagcagtgaaccttgtggcttctcttcaaatgggctaattgagagcgtggagttaagaggagaatcagctttcagtggcattcctaatgggcagtggatgacccagtcatttacagaccaaattccttcctttagtaatcactgtggaacacaagaacaggaagaagaaagccatgcttaagaatggtgcttctcagctctgcttaaatgctgcagttttaatgcagttgtcaacaagtagaacctcagtttgctaactgaagtgttttattagtattttactctagtggtgtaattgtaatgtagaacagttgtgtggtagtgtgaaccgtatg

SEQ ID NO: 4156 - DNA, 3294 bp, Homo sapiens
  source 1..3294: mol_type = genomic DNA
atgagcagctgcaggagcctctgttgtggtgacatctctcagtcagctgtcttattcctctgtcaggggacacttgccatgttggactggcagaacggaagcatgggtcggagtggggaggccctgctcttggatactgcacatgttttgttcaccttgagttcacagattaaagagccaacgctggaaatgtttctgtctagaatcttagcatcctggactaattcagccatacaagtccttgaatcaagttccccgagcctaacggacagcctgaatgggaattcaagtatagttgggagacttttggaatatgtctatacccattgggaacatccattggatgctctgagacaccaaaccaaaatcatgttcaaaaaccttctccaaatgcaccggctcactgtggaaggtgcagatttcgtccctgatcctttctttgtggaattgactgagagtcttttacgattggaatggcatattaaaggaaagtacacgtgccttggttgtttggtagagtgcataggagttgaacatattttggctatagataaaactattccatctcaaatcttagaggtgatgggagaccagtcattggtaccttatgcaagtgacctcttggaaaccatgtttagaaatcataagagtcatttgaaatcccagactgctgagagttcttggattgaccagtggcatgagacttgggtttctcctctcctttttatattgtgtgaaggaaacttggatcaaaaatcttacgtgattgattattacttgccaaaattattaagttacagccctgaaagcttacagtacatggtaaagattcttcagacttctattgatgctaaaactggacaagagcaatctttcccatccttagggtcttgtaatagcaggggggctctgggagctttgatggcatgtctgcgaatagctagagctcatggacatcttcagtctgcaactgatacctgggagaacctcgtgtctgatgcaagaataaagcaaggcttaattcatcagcattgccaagtaaggatagatacattaggcttgctttgtgaaagtaatcggagcacagaaattgtttccatggaagaaatgcagtggattcagttctttattacatacaatcttaacagccagtctccaggagtgcggcaacagatctgttctcttcttaaaaagttgttttgtaggatacaggaaagttctcaggtactttataaattggagcagagtaaatccaaacgtgaaccagagaatgagttaaccaaacagcacccttctgtttctttacagcagtataagaatttcatgtcatccatttgtaacagtctttttgaagcattgtttcctggatcttcctactcgactagattttcagctttaaccattttaggttcaatagctgaagtttttcatgtcccagaaggcagaatttatacagtatatcagctgagtcatgatattgatgttggtcgtttccaaacactaatggaatgttttaccagcacttttgaagacgtgaaaattttagcatttgatcttctgatgaagttatcaaaaacagctgtacattttcaggattcggggaaactgcaaggcttatttcaggcagcattggagctcagcacaagcaccaaaccatacgactgtgtgacagcttcctacctgctgaacttcttaatctggcaggatgctctaccgtcatccttgtctgcctacttaactcagcaagttgcatgtgataatggagataggcctgctgctgtggtggaaaggaacacattaatggttatcaaatgcttgatggaaaatcttgaggaagaagtatctcaggctgaaaattctctgcttcaggcagcagcagcatttccaatgtatgggcgagtccactgtataacaggagctttgcagaagttatctctaaacagcctgcagttggtgagcgagtggagacctgtggtagagaagctccttttgatgtcctacaggctttccactgtggtgtctccagtcattcagagctcatcccctgaaggcctcatcccaatggacactgattcagagtcagcaagccgcttacagatgattctgaatgagattcagcctcgagatactaatgattattttaaccaagccaaaatattgaaagaacatgatagctttgatatgaaggacttgaatgctagtgtggtgaatattgatacttctacagaaatcaaaggtaaagaagtaaaaacatgtgatgtaactgcgcagatggtgctggtatgttgttggagaagtatgaaggaagttgctttacttttaggcatgttgtgccagcttctgcccatgcagcctgtgccagaatcttctgatggattattgacggtggagcaggtaaaagaaataggagattactttaaacaacaccttttgcagtccaggcacagaggagcatttgaattggcttatactggttttgtgaaactcactgaagtactaaacaggtgcccaaatgtgagtctgcaaaagctgccagaacagtggctatggagtgttttagaggaaattaaatgcagtgatccttcatctaaactctgtgctacaaggcgcagtgctggaattcctttctacatacaggcactgttggcatctgaaccaaagaaaggcagaatggatttgttgaaaataacaatgaaagagttaatctctttggctgggcctacagatgacatacagagtacagtcccccaggttcatgctttaaatatccttagagcattgttcagagatacgcgcctgggagaaaatattattccttatgttgctgatggagctaaggctgcaattctgggttttacatcaccggtctgggcagtgcgaaattcatccacacttctctttagtgccttgatcacaagaatttttggagttaaaagggcaaaggatgaacattccaaaacaaatagaatgacagggagagagtttttctctcgtttcccagaactctatccttttcttctcaaacagttggaaactgtagccaatacagtagacagtgatatgggagaaccaaatcgtcatccaagcatgtttctcttacttttggtgttggagagactctacgcttccccgatggatggtacttcttctgctctcagcatgggaccttttgttcccttcattatgagagtcttgctctgttgtccaggctggagtgcagtggcacgatctcagctcactgcaacctccacctcctgggttcaagcaattctcctgcctcagcctcccgagtag

SEQ ID NO: 4157 - DNA, 5894 bp, Homo sapiens
  source 1..5894: mol_type = genomic DNA
gacccggtagtcgaccgtggaccgcgctgcgagcctcggagacgccgtagaaggagacctgcttccgggactggaccaggcgcctgcgactcttctcagacgccgacgtgcacgagtgactactattaattctatttaaaatgggtgtaaagaagaagaaagaaatgcaagttgctgcgctgaccatttgccatcaggaccttgaaactttgaaatcttttgctgatgtggaagggaaaaatctagcttctttgctgttacattgtgtgcaactcacggatggagtgtcacaaatccattatattaaacagattgtgcctctgctggagaaagcagataaaaatggcatgtgtgatcccactattcaaagttgtttggatatcttagcaggcatttatctttctttgagtctaaagaatcccttgaagaaagtattggcaagctcactaaatagcctgcctgatttttttctacctgaggctatgcaccgttttacttctcgtcttcaggaagaattgaatactactgacttatactcttacaggaaagttactgacaatatttcttcctgtatggagaactttaacttgggtagagcaagtgttaataatctgcttaaaaatgtgcttcattttctgcagaagagtttaattgaaatcctggaagaaaatagaaaatgtgctggaaatcatattattcaaacacagttgatgaatgacttactggtaggcattagagtttcaatgatgttagtacagaaagtacaagatttccagggaaatctttggaagacttccgattctcccatatggcaaaatatgtgtggattgctgagtatttttaccaaggttttaagcgatgatgatctgttacagactgtacagagcacatctggattagctattattctttttattaagactatgtttcacccgtctgaaaagattcctcatttgattagcagtgtgctgcttcgttcagtggactgcaccagtgtccccgagtggtttatgagcagctgcaggagcctctgttgtggtgacatctctcagtcagctgtcttattcctctgtcaggggacacttgccatgttggactggcagaacggaagcatgggtcggagtggggaggccctgctcttggatactgcacatgttttgttcaccttgagttcacagattaaagagccaacgctggaaatgtttctgtctagaatcttagcatcctggactaattcagccatacaagtccttgaatcaagttccccgagcctaacggacagcctgaatgggaattcaagtatagttgggagacttttggaatatgtctatacccattgggaacatccattggatgctctgagacaccaaaccaaaatcatgttcaaaaaccttctccaaatgcaccggctcactgtggaaggtgcagatttcgtccctgatcctttctttgtggaattgactgagagtcttttacgattggaatggcatattaaaggaaagtacacgtgccttggttgtttggtagagtgcataggagttgaacatattttggctatagataaaactattccatctcaaatcttagaggtgatgggagaccagtcattggtaccttatgcaagtgacctcttggaaaccatgtttagaaatcataagagtcatttgaaatcccagactgctgagagttcttggattgaccagtggcatgagacttgggtttctcctctcctttttatattgtgtgaaggaaacttggatcaaaaatcttacgtgattgattattacttgccaaaattattaagttacagccctgaaagcttacagtacatggtaaagattcttcagacttctattgatgctaaaactggacaagagcaatctttcccatccttagggtcttgtaatagcaggggggctctgggagctttgatggcatgtctgcgaatagctagagctcatggacatcttcagtctgcaactgatacctgggagaacctcgtgtctgatgcaagaataaagcaaggcttaattcatcagcattgccaagtaaggatagatacattaggcttgctttgtgaaagtaatcggagcacagaaattgtttccatggaagaaatgcagtggattcagttctttattacatacaatcttaacagccagtctccaggagtgcggcaacagatctgttctcttcttaaaaagaagttgttttgtaggatacaggaaagttctcaggtactttataaattggagcagagtaaatccaaacgtgaaccagagaatgagttaaccaaacagcacccttctgtttctttacagcagtataagaatttcatgtcatccatttgtaacagtctttttgaagcattgtttcctggatcttcctactcgactagattttcagctttaaccattttaggttcaatagctgaagtttttcatgtcccagaaggcagaatttatacagtatatcagctgagtcatgatattgatgttggtcgtttccaaacactaatggaatgttttaccagcacttttgaagacgtgaaaattttagcatttgatcttctgatgaagttatcaaaaacagctgtacattttcaggattcggggaaactgcaaggcttatttcaggcagcattggagctcagcacaagcaccaaaccatacgactgtgtgacagcttcctacctgctgaacttcttaatctggcaggatgctctaccgtcatccttgtctgcctacttaactcagcaagttgcatgtgataatggagataggcctgctgctgtggtggaaaggaacacattaatggttatcaaatgcttgatggaaaatcttgaggaagaagtatctcaggctgaaaattctctgcttcaggcagcagcagcatttccaatgtatgggcgagtccactgtataacaggagctttgcagaagttatctctaaacagcctgcagttggtgagcgagtggagacctgtggtagagaagctccttttgatgtcctacaggctttccactgtggtgtctccagtcattcagagctcatcccctgaaggcctcatcccaatggacactgattcagagtcagcaagccgcttacagatgattctgaatgagattcagcctcgagatactaatgattattttaaccaagccaaaatattgaaagaacatgatagctttgatatgaaggacttgaatgctagtgtggtgaatattgatacttctacagaaatcaaaggtaaagaagtaaaaacatgtgatgtaactgcgcagatggtgctggtatgttgttggagaagtatgaaggaagttgctttacttttaggcatgttgtgccagcttctgcccatgcagcctgtgccagaatcttctgatggattattgacggtggagcaggtaaaagaaataggagattactttaaacaacaccttttgcagtccaggcacagaggagcatttgaattggcttatactggttttgtgaaactcactgaagtactaaacaggtgcccaaatgtgagtctgcaaaagctgccagaacagtggctatggagtgttttagaggaaattaaatgcagtgatccttcatctaaactctgtgctacaaggcgcagtgctggaattcctttctacatacaggcactgttggcatctgaaccaaagaaaggcagaatggatttgttgaaaataacaatgaaagagttaatctctttggctgggcctacagatgacatacagagtacagtcccccaggttcatgctttaaatatccttagagcattgttcagagatacgcgcctgggagaaaatattattccttatgttgctgatggagctaaggctgcaattctgggttttacatcaccggtctgggcagtgcgaaattcatccacacttctctttagtgccttgatcacaagaatttttggagttaaaagggcaaaggatgaacattccaaaacaaataggtgtggtcactcacctgtctaccactcccgtgaaatggcagctcgtgccttggtcccatttgttatgatagatcacattcctaataccattcgaactctgttgtccacactccccagctgcactgaccagtgtttccggcaaaaccacattcatgggacacttctccaggtttttcatttgttgcaagcctactcagactccaaacacggaacgaattcagacttccagcacgagctgactgacatcactgtttgtaccaaagccaaactctggctggccaagaggcaaaatccatgtttggtgaccagagctgtatatattgatattctcttcctattgacttgctgcctcaacagatctgcaaaggacaaccagccagttctggagagtcttggcttctgggaggaagtcagagggattatctcaggatcagagctgataacgggattcccttgggccttcaaggtgccaggcctgccccagtacctccagagcctcaccagactagccattgctgcagtgtgggccgcggcagccaagagtggagagcgggagacgaatgtccccatctctttctctcagctgttagaatctgccttccctgaagtgcgctcactaacactggaagccctcttggaaaagttcttagcagcagcctctggacttggagagaagggcgtgccacccttgctgtgcaacatgggagagaagttcttattgttggccatgaaggaaaatcacccagaatgcttctgcaagatactgaaaattctccactgcatggaccctggtgagtggcttccccagacggagcactgtgtccatctgaccccaaaggagttcttgatctggacgatggatattgcttccaatgaaagatctgaaattcagagtgtagctctgagacttgcttccaaagtcatttcccaccacatgcagacatgtgtggagaacagggaattgatagctgctgagctgaagcagtgggttcagctggtcatcttgtcatgtgaagaccatcttcctacagagtctaggctggccgtcgttgaagtcctcaccagtactacaccacttttcctcaccaacccccatcctattcttgagttgcaggatacacttgctctctggaagtgtgtccttacccttctgcagagtgaggagcaagctgttagagatgcagccacggaaaccgtgacaactgccatgtcacaagaaaatacctgccagtcaacagagtttgccttctgccaggtggatgcctccatcgctctggccctggccctggccgtcctgtgtgatctgctccagcagtgggaccagttggcccctggactgcccatcctgctgggatggctgttgggagagagtgatgacctcgtggcctgtgtggagagcatgcatcaggtggaagaagactacctgtttgaaaaagcagaagtcaacttttgggccgagaccctgatctttgtgaaatacctctgcaagcacctcttctgtctcctctcaaagtccggctggcgtcccccaagccctgagatgctctgtcaccttcaaaggatggtgtcagagcagtgccacctcctgtctcagttcttcagagagcttccaccagctgctgagtttgtgaagacagtggagttcacaagactacgcattcaagaggaaaggactttggcttgcttgaggctgctggcctttttggaaggaaaggaaggggaagacaccctagttctcagtgtttgggactcttatgcagaatcgaggcagttaactcttccaagaacagaagcggcatgttgaagaaaatctgggggattgggatgggggtatgtgtggatttttcctccactaaatctgcaggaaacatgttgaacataaattcaaaaattttatcccattcatgcctcccct

SEQ ID NO: 4158 - DNA, 6310 bp, Homo sapiens
  source 1..6310: mol_type = genomic DNA
ggaccaggcgcctgcgactcttctcagacgccgacgtgcacgaggtttggctcccaggtgtcctgcctgccagacccgcggtagctcggctcggccagttttgctagggctgcctggcgagccacaccaattcccatcctttggtatcgccaggattcggcggctgtgaaactgatttccggtcgctaaggtctccatggagacagcactttaaccactttctcccactgtcattcctcgactccacgtggttcagaaatcgcccagagaatgtttgtgggagtcagccaggaaggtgtagagtgaagcagcgttctaaagggaagcatgactactattaattctatttaaaatgggtgtaaagaagaagaaagaaatgcaagttgctgcgctgaccatttgccatcaggaccttgaaactttgaaatcttttgctgatgtggaagggaaaaatctagcttctttgctgttacattgtgtgcaactcacggatggagtgtcacaaatccattatattaaacagattgtgcctctgctggagaaagcagataaaaatggcatgtgtgatcccactattcaaagttgtttggatatcttagcaggcatttatctttctttgagtctaaagaatcccttgaagaaagtattggcaagctcactaaatagcctgcctgatttttttctacctgaggctatgcaccgttttacttctcgtcttcaggaagaattgaatactactgacttatactcttacaggaaagttactgacaatatttcttcctgtatggagaactttaacttgggtagagcaagtgttaataatctgcttaaaaatgtgcttcattttctgcagaagagtttaattgaaatcctggaagaaaatagaaaatgtgctggaaatcatattattcaaacacagttgatgaatgacttactggtaggcattagagtttcaatgatgttagtacagaaagtacaagatttccagggaaatctttggaagacttccgattctcccatatggcaaaatatgtgtggattgctgagtatttttaccaaggttttaagcgatgatgatctgttacagactgtacagagcacatctggattagctattattctttttattaagactatgtttcacccgtctgaaaagattcctcatttgattagcagtgtgctgcttcgttcagtggactgcaccagtgtccccgagtggtttatgagcagctgcaggagcctctgttgtggtgacatctctcagtcagctgtcttattcctctgtcaggggacacttgccatgttggactggcagaacggaagcatgggtcggagtggggaggccctgctcttggatactgcacatgttttgttcaccttgagttcacagattaaagagccaacgctggaaatgtttctgtctagaatcttagcatcctggactaattcagccatacaagtccttgaatcaagttccccgagcctaacggacagcctgaatgggaattcaagtatagttgggagacttttggaatatgtctatacccattgggaacatccattggatgctctgagacaccaaaccaaaatcatgttcaaaaaccttctccaaatgcaccggctcactgtggaaggtgcagatttcgtccctgatcctttctttgtggaattgactgagagtcttttacgattggaatggcatattaaaggaaagtacacgtgccttggttgtttggtagagtgcataggagttgaacatattttggctatagataaaactattccatctcaaatcttagaggtgatgggagaccagtcattggtaccttatgcaagtgacctcttggaaaccatgtttagaaatcataagagtcatttgaaatcccagactgctgagagttcttggattgaccagtggcatgagacttgggtttctcctctcctttttatattgtgtgaaggaaacttggatcaaaaatcttacgtgattgattattacttgccaaaattattaagttacagccctgaaagcttacagtacatggtaaagattcttcagacttctattgatgctaaaactggacaagagcaatctttcccatccttagggtcttgtaatagcaggggggctctgggagctttgatggcatgtctgcgaatagctagagctcatggacatcttcagtctgcaactgatacctgggagaacctcgtgtctgatgcaagaataaagcaaggcttaattcatcagcattgccaagtaaggatagatacattaggcttgctttgtgaaagtaatcggagcacagaaattgtttccatggaagaaatgcagtggattcagttctttattacatacaatcttaacagccagtctccaggagtgcggcaacagatctgttctcttcttaaaaagttgttttgtaggatacaggaaagttctcaggtactttataaattggagcagagtaaatccaaacgtgaaccagagaatgagttaaccaaacagcacccttctgtttctttacagcagtataagaatttcatgtcatccatttgtaacagtctttttgaagcattgtttcctggatcttcctactcgactagattttcagctttaaccattttaggttcaatagctgaagtttttcatgtcccagaaggcagaatttatacagtatatcagctgagtcatgatattgatgttggtcgtttccaaacactaatggaatgttttaccagcacttttgaagacgtgaaaattttagcatttgatcttctgatgaagttatcaaaaacagctgtacattttcaggattcggggaaactgcaaggcttatttcaggcagcattggagctcagcacaagcaccaaaccatacgactgtgtgacagcttcctacctgctgaacttcttaatctggcaggatgctctaccgtcatccttgtctgcctacttaactcagcaagttgcatgtgataatggagataggcctgctgctgtggtggaaaggaacacattaatggttatcaaatgcttgatggaaaatcttgaggaagaagtatctcaggctgaaaattctctgcttcaggcagcagcagcatttccaatgtatgggcgagtccactgtataacaggagctttgcagaagttatctctaaacagcctgcagttggtgagcgagtggagacctgtggtagagaagctccttttgatgtcctacaggctttccactgtggtgtctccagtcattcagagctcatcccctgaaggcctcatcccaatggacactgattcagagtcagcaagccgcttacagatgattctgaatgagattcagcctcgagatactaatgattattttaaccaagccaaaatattgaaagaacatgatagctttgatatgaaggacttgaatgctagtgtggtgaatattgatacttctacagaaatcaaaggtaaagaagtaaaaacatgtgatgtaactgcgcagatggtgctggtatgttgttggagaagtatgaaggaagttgctttacttttaggcatgttgtgccagcttctgcccatgcagcctgtgccagaatcttctgatggattattgacggtggagcaggtaaaagaaataggagattactttaaacaacaccttttgcagtccaggcacagaggagcatttgaattggcttatactggttttgtgaaactcactgaagtactaaacaggtgcccaaatgtgagtctgcaaaagctgccagaacagtggctatggagtgttttagaggaaattaaatgcagtgatccttcatctaaactctgtgctacaaggcgcagtgctggaattcctttctacatacaggcactgttggcatctgaaccaaagaaaggcagaatggatttgttgaaaataacaatgaaagagttaatctctttggctgggcctacagatgacatacagagtacagtcccccaggttcatgctttaaatatccttagagcattgttcagagatacgcgcctgggagaaaatattattccttatgttgctgatggagctaaggctgcaattctgggttttacatcaccggtctgggcagtgcgaaattcatccacacttctctttagtgccttgatcacaagaatttttggagttaaaagggcaaaggatgaacattccaaaacaaatagaatgacagggagagagtttttctctcgtttcccagaactctatccttttcttctcaaacagttggaaactgtagccaatacagtagacagtgatatgggagaaccaaatcgtcatccaagcatgtttctcttacttttggtgttggagagactctacgcttccccgatggatggtacttcttctgctctcagcatgggaccttttgttcccttcattatgaggtgtggtcactcacctgtctaccactcccgtgaaatggcagctcgtgccttggtcccatttgttatgatagatcacattcctaataccattcgaactctgttgtccacactccccagctgcactgaccagtgtttccggcaaaaccacattcatgggacacttctccaggtttttcatttgttgcaagcctactcagactccaaacacggaacgaattcagacttccagcacgagctgactgacatcactgtttgtaccaaagccaaactctggctggccaagaggcaaaatccatgtttggtgaccagagctgtatatattgatattctcttcctattgacttgctgcctcaacagatctgcaaaggacaaccagccagttctggagagtcttggcttctgggaggaagtcagagggattatctcaggatcagagctgataacgggattcccttgggccttcaaggtgccaggcctgccccagtacctccagagcctcaccagactagccattgctgcagtgtgggccgcggcagccaagagtggagagcgggagacgaatgtccccatctctttctctcagctgttagaatctgccttccctgaagtgcgctcactaacactggaagccctcttggaaaagttcttagcagcagcctctggacttggagagaagggcgtgccacccttgctgtgcaacatgggagagaagttcttattgttggccatgaaggaaaatcacccagaatgcttctgcaagatactgaaaattctccactgcatggaccctggtgagtggcttccccagacggagcactgtgtccatctgaccccaaaggagttcttgatctggacgatggatattgcttccaatgaaagatctgaaattcagagtgtagctctgagacttgcttccaaagtcatttcccaccacatgcagacatgtgtggagaacagggaattgatagctgctgagctgaagcagtgggttcagctggtcatcttgtcatgtgaagaccatcttcctacagagtctaggctggccgtcgttgaagtcctcaccagtactacaccacttttcctcaccaacccccatcctattcttgagttgcaggatacacttgctctctggaagtgtgtccttacccttctgcagagtgaggagcaagctgttagagatgcagccacggaaaccgtgacaactgccatgtcacaagaaaatacctgccagtcaacagagtttgccttctgccaggtggatgcctccatcgctctggccctggccctggccgtcctgtgtgatctgctccagcagtgggaccagttggcccctggactgcccatcctgctgggatggctgttgggagagagtgatgacctcgtggcctgtgtggagagcatgcatcaggtggaagaagactacctgtttgaaaaagcagaagtcaacttttgggccgagaccctgatctttgtgaaatacctctgcaagcacctcttctgtctcctctcaaagtccggctggcgtcccccaagccctgagatgctctgtcaccttcaaaggatggtgtcagagcagtgccacctcctgtctcagttcttcagagagcttccaccagctgctgagtttgtgaagacagtggagttcacaagactacgcattcaagaggaaaggactttggcttgcttgaggctgctggcctttttggaaggaaaggaaggggaagacaccctagttctcagtgtttgggactcttatgcagaatcgaggcagttaactcttccaagaacagaagcggcatgttgaagaaaatctgggggattgggatgggggtatgtgtggatttttcctccactaaatctgcaggaaacatgttgaacataaattcaaaaattttatccc

SEQ ID NO: 4159 - DNA, 6114 bp, Homo sapiens
  source 1..6114: mol_type = genomic DNA
gacccggtagtcgaccgtggaccgcgctgcgagcctcggagacgccgtagaaggagacctgcttccgggactggaccaggcgcctgcgactcttctcagacgccgacgtgcacgagtgactactattaattctatttaaaatgggtgtaaagaagaagaaagaaatgcaagttgctgcgctgaccatttgccatcaggaccttgaaactttgaaatcttttgctgatgtggaagggaaaaatctagcttctttgctgttacattgtgtgcaactcacggatggagtgtcacaaatccattatattaaacagattgtgcctctgctggagaaagcagataaaaatggcatgtgtgatcccactattcaaagttgtttggatatcttagcaggcatttatctttctttgagtctaaagaatcccttgaagaaagtattggcaagctcactaaatagcctgcctgatttttttctacctgaggctatgcaccgttttacttctcgtcttcaggaagaattgaatactactgacttatactcttacaggaaagttactgacaatatttcttcctgtatggagaactttaacttgggtagagcaagtgttaataatctgcttaaaaatgtgcttcattttctgcagaagagtttaattgaaatcctggaagaaaatagaaaatgtgctggaaatcatattattcaaacacagttgatgaatgacttactggtaggcattagagtttcaatgatgttagtacagaaagtacaagatttccagggaaatctttggaagacttccgattctcccatatggcaaaatatgtgtggattgctgagtatttttaccaaggttttaagcgatgatgatctgttacagactgtacagagcacatctggattagctattattctttttattaagactatgtttcacccgtctgaaaagattcctcatttgattagcagtgtgctgcttcgttcagtggactgcaccagtgtccccgagtggtttatgagcagctgcaggagcctctgttgtggtgacatctctcagtcagctgtcttattcctctgtcaggggacacttgccatgttggactggcagaacggaagcatgggtcggagtggggaggccctgctcttggatactgcacatgttttgttcaccttgagttcacagattaaagagccaacgctggaaatgtttctgtctagaatcttagcatcctggactaattcagccatacaagtccttgaatcaagttccccgagcctaacggacagcctgaatgggaattcaagtatagttgggagacttttggaatatgtctatacccattgggaacatccattggatgctctgagacaccaaaccaaaatcatgttcaaaaaccttctccaaatgcaccggctcactgtggaaggtgcagatttcgtccctgatcctttctttgtggaattgactgagagtcttttacgattggaatggcatattaaaggaaagtacacgtgccttggttgtttggtagagtgcataggagttgaacatattttggctatagataaaactattccatctcaaatcttagaggtgatgggagaccagtcattggtaccttatgcaagtgacctcttggaaaccatgtttagaaatcataagagtcatttgaaatcccagactgctgagagttcttggattgaccagtggcatgagacttgggtttctcctctcctttttatattgtgtgaaggaaacttggatcaaaaatcttacgtgattgattattacttgccaaaattattaagttacagccctgaaagcttacagtacatggtaaagattcttcagacttctattgatgctaaaactggacaagagcaatctttcccatccttagggtcttgtaatagcaggggggctctgggagctttgatggcatgtctgcgaatagctagagctcatggacatcttcagtctgcaactgatacctgggagaacctcgtgtctgatgcaagaataaagcaaggcttaattcatcagcattgccaagtaaggatagatacattaggcttgctttgtgaaagtaatcggagcacagaaattgtttccatggaagaaatgcagtggattcagttctttattacatacaatcttaacagccagtctccaggagtgcggcaacagatctgttctcttcttaaaaagttgttttgtaggatacaggaaagttctcaggtactttataaattggagcagagtaaatccaaacgtgaaccagagaatgagttaaccaaacagcacccttctgtttctttacagcagtataagaatttcatgtcatccatttgtaacagtctttttgaagcattgtttcctggatcttcctactcgactagattttcagctttaaccattttaggttcaatagctgaagtttttcatgtcccagaaggcagaatttatacagtatatcagctgagtcatgatattgatgttggtcgtttccaaacactaatggaatgttttaccagcacttttgaagacgtgaaaattttagcatttgatcttctgatgaagttatcaaaaacagctgtacattttcaggattcggggaaactgcaaggcttatttcaggcagcattggagctcagcacaagcaccaaaccatacgactgtgtgacagcttcctacctgctgaacttcttaatctggcaggatgctctaccgtcatccttgtctgcctacttaactcagcaagttgcatgtgataatggagataggcctgctgctgtggtggaaaggaacacattaatggttatcaaatgcttgatggaaaatcttgaggaagaagtatctcaggctgaaaattctctgcttcaggcagcagcagcatttccaatgtatgggcgagtccactgtataacaggagctttgcagaagttatctctaaacagcctgcagttggtgagcgagtggagacctgtggtagagaagctccttttgatgtcctacaggctttccactgtggtgtctccagtcattcagagctcatcccctgaaggcctcatcccaatggacactgattcagagtcagcaagccgcttacagatgattctgaatgagattcagcctcgagatactaatgattattttaaccaagccaaaatattgaaagaacatgatagctttgatatgaaggacttgaatgctagtgtggtgaatattgatacttctacagaaatcaaaggtaaagaagtaaaaacatgtgatgtaactgcgcagatggtgctggtatgttgttggagaagtatgaaggaagttgctttacttttaggcatgttgtgccagcttctgcccatgcagcctgtgccagaatcttctgatggattattgacggtggagcaggtaaaagaaataggagattactttaaacaacaccttttgcagtccaggcacagaggagcatttgaattggcttatactggttttgtgaaactcactgaagtactaaacaggtgcccaaatgtgagtctgcaaaagctgccagaacagtggctatggagtgttttagaggaaattaaatgcagtgatccttcatctaaactctgtgctacaaggcgcagtgctggaattcctttctacatacaggcactgttggcatctgaaccaaagaaaggcagaatggatttgttgaaaataacaatgaaagagttaatctctttggctgggcctacagatgacatacagagtacagtcccccaggttcatgctttaaatatccttagagcattgttcagagatacgcgcctgggagaaaatattattccttatgttgctgatggagctaaggctgcaattctgggttttacatcaccggtctgggcagtgcgaaattcatccacacttctctttagtgccttgatcacaagaatttttggagttaaaagggcaaaggatgaacattccaaaacaaatagaatgacagggagagagtttttctctcgtttcccagaactctatccttttcttctcaaacagttggaaactgtagccaatacagtagacagtgatatgggagaaccaaatcgtcatccaagcatgtttctcttacttttggtgttggagagactctacgcttccccgatggatggtacttcttctgctctcagcatgggaccttttgttcccttcattatgaggtgtggtcactcacctgtctaccactcccgtgaaatggcagctcgtgccttggtcccatttgttatgatagatcacattcctaataccattcgaactctgttgtccacactccccagctgcactgaccagtgtttccggcaaaaccacattcatgggacacttctccaggtttttcatttgttgcaagcctactcagactccaaacacggaacgaattcagacttccagcacgagctgactgacatcactgtttgtaccaaagccaaactctggctggccaagaggcaaaatccatgtttggtgaccagagctgtatatattgatattctcttcctattgacttgctgcctcaacagatctgcaaaggacaaccagccagttctggagagtcttggcttctgggaggaagtcagagggattatctcaggatcagagctgataacgggattcccttgggccttcaaggtgccaggcctgccccagtacctccagagcctcaccagactagccattgctgcagtgtgggccgcggcagccaagagtggagagcgggagacgaatgtccccatctctttctctcagctgttagaatctgccttccctgaagtgcgctcactaacactggaagccctcttggaaaagttcttagcagcagcctctggacttggagagaagggcgtgccacccttgctgtgcaacatgggagagaagttcttattgttggccatgaaggaaaatcacccagaatgcttctgcaagatactgaaaattctccactgcatggaccctggtgagtggcttccccagacggagcactgtgtccatctgaccccaaaggagttcttgatctggacgatggatattgcttccaatgaaagatctgaaattcagagtgtagctctgagacttgcttccaaagtcatttcccaccacatgcagacatgtgtggagaacagggaattgatagctgctgagctgaagcagtgggttcagctggtcatcttgtcatgtgaagaccatcttcctacagagtctaggctggccgtcgttgaagtcctcaccagtactacaccacttttcctcaccaacccccatcctattcttgagttgcaggatacacttgctctctggaagtgtgtccttacccttctgcagagtgaggagcaagctgttagagatgcagccacggaaaccgtgacaactgccatgtcacaagaaaatacctgccagtcaacagagtttgccttctgccaggtggatgcctccatcgctctggccctggccctggccgtcctgtgtgatctgctccagcagtgggaccagttggcccctggactgcccatcctgctgggatggctgttgggagagagtgatgacctcgtggcctgtgtggagagcatgcatcaggtggaagaagactacctgtttgaaaaagcagaagtcaacttttgggccgagaccctgatctttgtgaaatacctctgcaagcacctcttctgtctcctctcaaagtccggctggcgtcccccaagccctgagatgctctgtcaccttcaaaggatggtgtcagagcagtgccacctcctgtctcagttcttcagagagcttccaccagctgctgagtttgtgaagacagtggagttcacaagactacgcattcaagaggaaaggactttggcttgcttgaggctgctggcctttttggaaggaaaggaaggggaagacaccctagttctcagtgtttgggactcttatgcagaatcgaggcagttaactcttccaagaacagaagcggcatgttgaagaaaatctgggggattgggatgggggtatgtgtggatttttcctccactaaatctgcaggaaacatgttgaacataaattcaaaaattttatcccattcatgcctccccta

SEQ ID NO: 4160 - DNA, 6026 bp, Homo sapiens
  source 1..6026: mol_type = genomic DNA
gacccggtagtcgaccgtggaccgcgctgcgagcctcggagacgccgtagaaggagacctgcttccgggactggaccaggcgcctgcgactcttctcagacgccgacgtgcacgagtgactactattaattctatttaaaatgggtgtaaagaagaagaaagaaatgcaagttgctgcgctgaccatttgccatcaggaccttgaaactttgaaatcttttgctgatgtggaagggaaaaatctagcttctttgctgttacattgtgtgcaactcacggatggagtgtcacaaatccattatattaaacagattgtgcctctgctggagaaagcagataaaaatggcatgtgtgatcccactattcaaagttgtttggatatcttagcaggcatttatctttctttgagtctaaagaatcccttgaagaaagtattggcaagctcactaaatagcctgcctgatttttttctacctgaggctatgcaccgttttacttctcgtcttcaggaagaattgaatactactgacttatactcttacaggaaagttactgacaatatttcttcctgtatggagaactttaacttgggtagagcaagtgttaataatctgcttaaaaatgtgcttcattttctgcagaagagtttaattgaaatcctggaagaaaatagaaaatgtgctggaaatcatattattcaaacacagttgatgaatgacttactggtaggcattagagtttcaatgatgttagtacagaaagtacaagatttccagggaaatctttggaagacttccgattctcccatatggcaaaatatgtgtggattgctgagtatttttaccaaggttttaagcgatgatgatctgttacagactgtacagagcacatctggattagctattattctttttattaagactatgtttcacccgtctgaaaagattcctcatttgattagcagtgtgctgcttcgttcagtggactgcaccagtgtccccgagtggtttatgagcagctgcaggagcctctgttgtggtgacatctctcagtcagctgtcttattcctctgtcaggggacacttgccatgttggactggcagaacggaagcatgggtcggagtggggaggccctgctcttggatactgcacatgttttgttcaccttgagttcacagattaaagagccaacgctggaaatgtttctgtctagaatcttagcatcctggactaattcagccatacaagtccttgaatcaagttccccgagcctaacggacagcctgaatgggaattcaagtatagttgggagacttttggaatatgtctatacccattgggaacatccattggatgctctgagacaccaaaccaaaatcatgttcaaaaaccttctccaaatgcaccggctcactgtggaaggtgcagatttcgtccctgatcctttctttgtggaattgactgagagtcttttacgattggaatggcatattaaaggaaagtacacgtgccttggttgtttggtagagtgcataggagttgaacatattttggctatagataaaactattccatctcaaatcttagaggtgatgggagaccagtcattggtaccttatgcaagtgacctcttggaaaccatgtttagaaatcataagagtcatttgaaatcccagactgctgagagttcttggattgaccagtggcatgagacttgggtttctcctctcctttttatattgtgtgaaggaaacttggatcaaaaatcttacgtgattgattattacttgccaaaattattaagttacagccctgaaagcttacagtacatggtaaagattcttcagacttctattgatgctaaaactggacaagagcaatctttcccatccttagggtcttgtaatagcaggggggctctgggagctttgatggcatgtctgcgaatagctagagctcatggacatcttcagtctgcaactgatacctgggagaacctcgtgtctgatgcaagaataaagcaaggcttaattcatcagcattgccaagtaaggatagatacattaggcttgctttgtgaaagtaatcggagcacagaaattgtttccatggaagaaatgcagtggattcagttctttattacatacaatcttaacagccagtctccaggagtgcggcaacagatctgttctcttcttaaaaagttgttttgtaggatacaggaaagttctcaggtactttataaattggagcagagtaaatccaaacgtgaaccagagaatgagttaaccaaacagcacccttctgtttctttacagcagtataagaatttcatgtcatccatttgtaacagtctttttgaagcattgtttcctggatcttcctactcgactagattttcagctttaaccattttaggttcaatagctgaagtttttcatgtcccagaaggcagaatttatacagtatatcagctgagtcatgatattgatgttggtcgtttccaaacactaatggaatgttttaccagcacttttgaagacgtgaaaattttagcatttgatcttctgatgaagttatcaaaaacagctgtacattttcaggattcggggaaactgcaaggcttatttcaggcagcattggagctcagcacaagcaccaaaccatacgactgtgtgacagcttcctacctgctgaacttcttaatctggcaggatgctctaccgtcatccttgtctgcctacttaactcagcaagttgcatgtgataatggagataggcctgctgctgtggtggaaaggaacacattaatggttatcaaatgcttgatggaaaatcttgaggaagaagtatctcaggctgaaaattctctgcttcaggcagcagcagcatttccaatgtatgggcgagtccactgtataacaggagctttgcagaagttatctctaaacagcctgcagttggtgagcgagtggagacctgtggtagagaagctccttttgatgtcctacaggctttccactgtggtgtctccagtcattcagagctcatcccctgaaggcctcatcccaatggacactgattcagagtcagcaagccgcttacagatgattctgaatgagattcagcctcgagatactaatgattattttaaccaagccaaaatattgaaagaacatgatagctttgatatgaaggacttgaatgctagtgtggtgaatattgatacttctacagaaatcaaaggtaaagaagtaaaaacatgtgatgtaactgcgcagatggtgctggtatgttgttggagaagtatgaaggaagttgctttacttttaggcatgttgtgccagcttctgcccatgcagcctgtgccagaatcttctgatggattattgacggtggagcaggtaaaagaaataggagattactttaaacaacaccttttgcagtccaggcacagaggagcatttgaattggcttatactggttttgtgaaactcactgaagtactaaacaggtgcccaaatgtgagtctgcaaaagctgccagaacagtggctatggagtgttttagaggaaattaaatgcagtgatccttcatctaaactctgtgctacaaggcgcagtgctggaattcctttctacatacaggcactgttggcatctgaaccaaagaaaggcagaatggatttgttgaaaataacaatgaaagagttaatctctttggctgggcctacagatgacatacagagtacagtcccccaggttcatgctttaaatatccttagagcattgttcagagatacgcgcctgggagaaaatattattccttatgttgctgatggagctaaggctgcaattctgggttttacatcaccggtctgggcatctcaaatgacagggagagagtttttctctcgtttcccagaactctatccttttcttctcaaacagttggaaactgtagccaatacagtagacagtgatatgggagaaccaaatcgtcatccaagcatgtttctcttacttttggtgttggagagactctacgcttccccgatggatggtacttcttctgctctcagcatgggaccttttgttcccttcattatgaggtgtggtcactcacctgtctaccactcccgtgaaatggcagctcgtgccttggtcccatttgttatgatagatcacattcctaataccattcgaactctgttgtccacactccccagctgcactgaccagtgtttccggcaaaaccacattcatgggacacttctccaggtttttcatttgttgcaagcctactcagactccaaacacggaacgaattcagacttccagcacgagctgactgacatcactgtttgtaccaaagccaaactctggctggccaagaggcaaaatccatgtttggtgaccagagctgtatatattgatattctcttcctattgacttgctgcctcaacagatctgcaaaggacaaccagccagttctggagagtcttggcttctgggaggaagtcagagggattatctcaggatcagagctgataacgggattcccttgggccttcaaggtgccaggcctgccccagtacctccagagcctcaccagactagccattgctgcagtgtgggccgcggcagccaagagtggagagcgggagacgaatgtccccatctctttctctcagctgttagaatctgccttccctgaagtgcgctcactaacactggaagccctcttggaaaagttcttagcagcagcctctggacttggagagaagggcgtgccacccttgctgtgcaacatgggagagaagttcttattgttggccatgaaggaaaatcacccagaatgcttctgcaagatactgaaaattctccactgcatggaccctggtgagtggcttccccagacggagcactgtgtccatctgaccccaaaggagttcttgatctggacgatggatattgcttccaatgaaagatctgaaattcagagtgtagctctgagacttgcttccaaagtcatttcccaccacatgcagacatgtgtggagaacagggaattgatagctgctgagctgaagcagtgggttcagctggtcatcttgtcatgtgaagaccatcttcctacagagtctaggctggccgtcgttgaagtcctcaccagtactacaccacttttcctcaccaacccccatcctattcttgagttgcaggatacacttgctctctggaagtgtgtccttacccttctgcagagtgaggagcaagctgttagagatgcagccacggaaaccgtgacaactgccatgtcacaagaaaatacctgccagtcaacagagtttgccttctgccaggtggatgcctccatcgctctggccctggccctggccgtcctgtgtgatctgctccagcagtgggaccagttggcccctggactgcccatcctgctgggatggctgttgggagagagtgatgacctcgtggcctgtgtggagagcatgcatcaggtggaagaagactacctgtttgaaaaagcagaagtcaacttttgggccgagaccctgatctttgtgaaatacctctgcaagcacctcttctgtctcctctcaaagtccggctggcgtcccccaagccctgagatgctctgtcaccttcaaaggatggtgtcagagcagtgccacctcctgtctcagttcttcagagagcttccaccagctgctgagtttgtgaagacagtggagttcacaagactacgcattcaagaggaaaggactttggcttgcttgaggctgctggcctttttggaaggaaaggaaggggaagacaccctagttctcagtgtttgggactcttatgcagaatcgaggcagttaactcttccaagaacagaagcggcatgttgaagaaaatctgggggattgggatgggggtatgtgtggatttttcctccactaaatctgcaggaaacatgttgaacataaattcaaaaattttatcccattcatgcctcccct

SEQ ID NO: 4161 - DNA, 3043 bp, Homo sapiens
  source 1..3043: mol_type = genomic DNA
gcgctgcgagcctcggagacgccgtagaaggagacctgcttccgggactggaccaggcgcctgcgactcttctcagacgccgacgtgcacgagtgactactattaattctatttaaaatgggtgtaaagaagaagaaagaaatgcaagttgctgcgctgaccatttgccatcaggaccttgaaactttgaaatcttttgctgatgtggaagggaaaaatctagcttctttgctgttacattgtgtgcaactcacggatggagtgtcacaaatccattatattaaacagattgtgcctctgctggagaaagcagataaaaatggcatgtgtgatcccactattcaaagttgtttggatatcttagcaggcatttatctttctttgagtctaaagaatcccttgaagaaagtattggcaagctcactaaatagcctgcctgatttttttctacctgaggctatgcaccgttttacttctcgtcttcaggaagaattgaatactactgacttatactcttacaggaaagttactgacaatatttcttcctgtatggagaactttaacttgggtagagcaagtgttaataatctgcttaaaaatgtgcttcattttctgcagaagagtttaattgaaatcctggaagaaaatagaaaatgtgctggaaatcatattattcaaacacagttgatgaatgacttactggtaggcattagagtttcaatgatgttagtacagaaagtacaagatttccagggaaatctttggaagacttccgattctcccatatggcaaaatatgtgtggattgctgagtatttttaccaaggttttaagcgatgatgatctgttacagactgtacagagcacatctggattagctattattctttttattaagactatgtttcacccgtctgaaaagattcctcatttgattagcagtgtgctgcttcgttcagtggactgcaccagtgtccccgagtggtttatgagcagctgcaggagcctctgttgtggtgacatctctcagtcagctgtcttattcctctgtcaggggacacttgccatgttggactggcagaacggaagcatgggtcggagtggggaggccctgctcttggatactgcacatgttttgttcaccttgagttcacagattaaagagccaacgctggaaatgtttctgtctagaatcttagcatcctggactaattcagccatacaagtccttgaatcaagttccccgagcctaacggacagcctgaatgggaattcaagtatagttgggagacttttggaatatgtctatacccattgggaacatccattggatgctctgagacaccaaaccaaaatcatgttcaaaaaccttctccaaatgcaccggctcactgtggaaggtgcagatttcgtccctgatcctttctttgtggaattgactgagagtcttttacgattggaatggcatattaaaggaaagtacacgtgccttggttgtttggtagagtgcataggagttgaacatattttggctatagataaaactattccatctcaaatcttagaggtgatgggagaccagtcattggtaccttatgcaagtgacctcttggaaaccatgtttagaaatcataagagtcatttgaaatcccagactgctgagagttcttggattgaccagtggcatgagacttgggtttctcctctcctttttatattgtgtgaaggaaacttggatcaaaaatcttacgtgattgattattacttgccaaaattattaagttacagccctgaaagcttacagtacatggtaaagattcttcagacttctattgatgctaaaactggacaagagcaatctttcccatccttagggtcttgtaatagcaggggggctctgggagctttgatggcatgtctgcgaatagctagagctcatggacatcttcagtctgcaactgatacctgggagaacctcgtgtctgatgcaagaataaagcaaggcttaattcatcagcattgccaagtaaggatagatacattaggcttgctttgtgaaagtaatcggagcacagaaattgtttccatggaagaaatgcagtggattcagttctttattacatacaatcttaacagccagtctccaggagtgcggcaacagatctgttctcttcttaaaaagttgttttgtaggatacaggaaagttctcaggtactttataaattggagcagagtaaatccaaacgtgaaccagagaatgagttaaccaaacagcacccttctgtttctttacagcagtataagaatttcatgtcatccatttgtaacagtctttttgaagcattgtttcctggatcttcctactcgactagattttcagctttaaccattttaggttcaatagctgaagtttttcatgtcccagaaggcagaatttatacagtatatcagctgagtcatgatattgatgttggtcgtttccaaacactaatggaatgttttaccagcacttttgaagacgtgaaaattttagcatttgatcttctgatgaagttatcaaaaacagctgtacattttcaggattcggggaaactgcaaggcttatttcaggcagcattggagctcagcacaagcaccaaaccatacgactgtgtgacagcttcctacctgctgaacttcttaatctggcaggatgctctaccgtcatccttgtctgcctacttaactcagcaagttgcatgtgataatggagataggcctgctgctgtggtggaaaggaacacattaatgggtttgtattgatgtttgctcttatcaaaacgaatagcttagtctcagtattcatttggttagaatatctaatggttaaacatatattttgtggttttttatttaaaagtttatcagcatataagagcaccatgggttctcattatgcaaatgaacattttagtcagctataatacttttttctaaacagtggatttatgttgaataagtacatatacaaatatttattaataaagctcttttgaaatgagaa

SEQ ID NO: 4162 - DNA, 892 bp, Homo sapiens
  source 1..892: mol_type = genomic DNA
ttctgcactgatggtgggtggatgagtaatgcatccaggaagcctggaggcctgtggtttccgcacccgctgccacccccgcccctagcgtggacatttatcctctagcgctcaggccctgccgccatcgccgcagatccagcgcccagagagacaccagagaacccaccatggccccctttgagcccctggcttctggcatcctgttgttgctgtggctgatagcccccagcagggcctgcacctgtgtcccaccccacccacagacggccttctgcaattccgacctcgtcatcagggccaagttcgtggggacaccagaagtcaaccagaccaccttataccagcgttatgagatcaagatgaccaagatgtataaagggttccaagccttaggggatgccgctgacatccggttcgtctacacccccgccatggagagtgtctgcggatacttccacaggtcccacaaccgcagcgaggagtttctcattgctggaaaactgcaggatggactcttgcacatcactacctgcagttttgtggctccctggaacagcctgagcttagctcagcgccggggcttcaccaagacctacactgttggctgtgaggaatgcacagtgtttccctgtttatccatcccctgcaaactgcagagtggcactcattgcttgtggacggaccagctcctccaaggctctgaaaagggcttccagtcccgtcaccttgcctgcctgcctcgggagccagggctgtgcacctggcagtccctgcggtcccagatagcctgaatcctgcccggagtggaagctgaagcctgcacagtgtccaccctgttcccactcccatctttcttccggacaatgaaataaagagttaccacccagca

SEQ ID NO: 4163 - DNA, 626 bp, Homo sapiens
  source 1..626: mol_type = genomic DNA
tccagcgcccagagagacaccagagtcatcagggccaagttcgtggggacaccagaagtcaaccagaccaccttataccagcgttatgagatcaagatgaccaagatgtataaagggttccaagccttaggggatgccgctgacatccggttcgtctacacccccgccatggagagtgtctgcggatacttccacaggtcccacaaccgcagcgaggagtttctcattgctggaaaactgcaggatggactcttgcacatcactacctgcagttttgtggctccctggaacagcctgagcttagctcagcgccggggcttcaccaagacctacactgttggctgtgaggaatgcacagtgtttccctgtttatccatcccctgcaaactgcagagtggcactcattgcttgtggacggaccagctcctccaaggctctgaaaagggcttccagtcccgtcaccttgcctgcctgcctcgggagccagggctgtgcacctggcagtccctgcggtcccagatagcctgaatcctgcccggagtggaagctgaagcctgcacagtgtccaccctgttcccactcccatctttcttccggacaatgaaataaagagttaccacccagca

SEQ ID NO: 4164 - DNA, 1415 bp, Homo sapiens
  source 1..1415: mol_type = genomic DNA
agtaatgcatccaggaagcctggaggcctgtggtttccgcacccgctgccacccccgcccctagcgtggacatttatcctctagcgctcaggccctgccgccatcgccgcagatccagcgcccagagagacaccagagaacccaccatggccccctttgagcccctggcttctggcatcctgttgttgctgtggctgatagcccccagcagggcctgcacctgtgtcccaccccacccacagacggccttctgcaattccgacctcgtcatcagggccaagttcgtggggacaccagaagtcaaccagaccaccttataccagcgttatgagatcaagatgaccaaggtatcccctgcccccgcctctttcccagcattttctaacatcttcctcctggtcaaaacagaaacttctggccactggttggtgcgagaaagttggctgtgatcttgggatgctatatgacttcagggaagaacctggagtgggaggattatgtcagtaaaagagacacttcccctcatccatcaacagatgtataaagggttccaagccttaggggatgccgctgacatccggttcgtctacacccccgccatggagagtgtctgcggatacttccacaggtcccacaaccgcagcgaggagtttctcattgctggtgaggcaccgtccccgcgccctgtgccacaccaaccagtccctggggcgcggcctagcaaccacgagggggcgaggctctgatgggaatggtcccactggaaatggggaccaccccaatttcagtctatcagaaggccgggcctttggcagcttggcagctcagccaatcacaagctgcttgtcggtccccgccccgcctttctccttaggaaaactgcaggatggactcttgcacatcactacctgcagttttgtggctccctggaacagcctgagcttagctcagcgccggggcttcaccaagacctacactgttggctgtgaggaatgcacagtgagtgcctggaccctgacctccaacgggagatccttcccggggccattccctaaatcgtgggcttgtttcttgctccctctggctattctgtgtccctgtggctgctccccaaccctaagggctgtccctgatctctcttgctatttccccaagcccgagactgctcccttacaaattctggctgctccctttccctgtgtccaataccgtgtgatcacctgtccctccctggtccctctaattctcccttgtgactattctgtaatcccactccccgttcctgagcccccgggattgtttcttggttccccagaatgttctccaagaacccaaagtgctgttccctaatcccactgacccttcctcagcacatctgcttgttgctctgcagctctgactattccagacaccag

SEQ ID NO: 4165 - DNA, 341 bp, Homo sapiens
  source 1..341: mol_type = genomic DNA
gagctgggctgcagcttgggtgctggccaccaggcccgtgcactcccgtgccagatgcctgtctactcagcttggcctgcggaacccaccatggccccctttgagcccctggcttctggcatcctgttgttgctgtggctgatagcccccagcagggcctgcacctgtgtcccaccccacccacagacggccttctgcaattccgacctcgtcatcagggccaagttcgtggggacaccagaagtcaaccagaccaccttataccagcgttatgagatcaagatgaccaagatgtataaagggttccaagccttaggggatgccgctgacatccggttcgt

SEQ ID NO: 4166 - DNA, 595 bp, Homo sapiens
  source 1..595: mol_type = genomic DNA
gtccccgcgccctgtgccacaccaaccagtccctggggcgcggcctagcaaccacgagggggcgaggctctgatgggaatggtcccactggaaatggggaccaccccaatttcagtctatcagaaggccgggcctttggcagcttggcagctcagccaatcacaagctgcttgtcggtccccgccccgcctttctccttaggaaaactgcaggatggactcttgcacatcactacctgcagttttgtggctccctggaacagcctgagcttagctcagcgccggggcttcaccaagacctacactgttggctgtgaggaatgcacagtgtttccctgtttatccatcccctgcaaactgcagagtggcactcattgcttgtggacggaccagctcctccaaggctctgaaaagggcttccagtcccgtcaccttgcctgcctgcctcgggagccagggctgtgcacctggcagtccctgcggtcccagatagcctgaatcctgcccggagtggaagctgaagcctgcacagtgtccaccctgttcccactcccatctttcttccggacaatgaaataaagagttaccacccagca

SEQ ID NO: 4167 - DNA, 1095 bp, Homo sapiens
  source 1..1095: mol_type = genomic DNA
atttatcctctagcgctcaggccctgccgccatcgccgcagatccagcgcccagagagacaccagagaacccaccatggccccctttgagcccctggcttctggcatcctgttgttgctgtggctgatagcccccagcagggcctgcacctgtgtcccaccccacccacagacggccttctgcaattccgacctcgtcatcagggccaagttcgtggggacaccagaagtcaaccagaccaccttataccagcgttatgagatcaagatgaccaagatgtataaagggttccaagccttaggggatgccgctgacatccggttcgtctacacccccgccatggagagtgtctgcggatacttccacaggtcccacaaccgcagcgaggagtttctcattgctggtgaggcaccgtccccgcgccctgtgccacaccaaccagtccctggggcgcggcctagcaaccacgagggggcgaggctctgatgggaatggtcccactggaaatggggaccaccccaatttcagtctatcagaaggccgggcctttggcagcttggcagctcagccaatcacaagctgcttgtcggtccccgccccgcctttctccttaggaaaactgcaggatggactcttgcacatcactacctgcagttttgtggctccctggaacagcctgagcttagctcagcgccggggcttcaccaagacctacactgttggctgtgaggaatgcacagtgagtgcctggaccctgacctccaacgggagatccttcccggggccattccctaaatcgtgggcttgtttcttgctccctctggctattctgtgtccctgtggctgctccccaaccctaagggctgtccctgatctctcttgctatttccccaagcccgagactgctcccttacaaattctggctgctccctttccctgtgtccaataccgtgtgatcacctgtccctccctggtccctctaattctcccttgtgactattctgtaatcccactccccgttcctgagcccccgggattgtttcttggttccccagaatgttctccaagaacccaaagtgctgttccctaatccca

SEQ ID NO: 4168 - DNA, 3652 bp, Homo sapiens
  source 1..3652: mol_type = genomic DNA
agcaaacacatccgtagaaggcagcgcggccgccgagaaccgcagcgccgctcgcccgccgccccccaccccgccgccccgcccggcgaattgcgccccgcgcccctcccctcgcgcccccgagacaaagaggagagaaagtttgcgcggccgagcggggcaggtgaggagggtgagccgcgcgggaggggcccgcctcggccccggctcagcccccgcccgcgcccccagcccgccgccgcgagcagcgcccggaccccccagcggcggcccccgcccgcccagccccccggcccgccatgggcgccgcggcccgcaccctgcggctggcgctcggcctcctgctgctggcgacgctgcttcgcccggccgacgcctgcagctgctccccggtgcacccgcaacaggcgttttgcaatgcagatgtagtgatcagggccaaagcggtcagtgagaaggaagtggactctggaaacgacatttatggcaaccctatcaagaggatccagtatgagatcaagcagataaagatgttcaaagggcctgagaaggatatagagtttatctacacggccccctcctcggcagtgtgtggggtctcgctggacgttggaggaaagaaggaatatctcattgcaggaaaggccgagggggacggcaagatgcacatcaccctctgtgacttcatcgtgccctgggacaccctgagcaccacccagaagaagagcctgaaccacaggtaccagatgggctgcgagtgcaagatcacgcgctgccccatgatcccgtgctacatctcctccccggacgagtgcctctggatggactgggtcacagagaagaacatcaacgggcaccaggccaagttcttcgcctgcatcaagagaagtgacggctcctgtgcgtggtaccgcggcgcggcgccccccaagcaggagtttctcgacatcgaggacccataagcaggcctccaacgcccctgtggccaactgcaaaaaaagcctccaagggtttcgactggtccagctctgacatcccttcctggaaacagcatgaataaaacactcatcccatgggtccaaattaatatgattctgctccccccttctccttttagacatggttgtgggtctggagggagacgtgggtccaaggtcctcatcccatcctccctctgccaggcactatgtgtctggggcttcgatccttgggtgcaggcagggctgggacacgcggcttccctcccagtccctgccttggcaccgtcacagatgccaagcaggcagcacttagggatctcccagctgggttagggcagggcctggaaatgtgcattttgcagaaacttttgagggtcgttgcaagactgtgtagcaggcctaccaggtccctttcatcttgagagggacatggcccttgttttctgcagcttccacgcctctgcactccctgcccctggcaagtgctcccatcgccccggtgcccaccatgagctcccagcacctgactccccccacatccaagggcagcctggaaccagtggctagttcttgaaggagccccatcaatcctattaatcctcagaattccagtgggagcctccctctgagccttgtagaaatgggagcgagaaaccccagctgagctgcgttccagcctcagctgagtctttttggtctgcacccacccccccacccccccccccccgcccacatgctccccagcttgcaggaggaatcggtgaggtcctgtcctgaggctgctgtccggggccggtggctgccctcaaggtcccttccctagctgctgcggttgccattgcttcttgcctgttctggcatcaggcacctggattgagttgcacagctttgctttatccgggcttgtgtgcagggcccggctgggctccccatctgcacatcctgaggacagaaaaagctgggtcttgctgtgccctcccaggcttagtgttccctccctcaaagactgacagccatcgttctgcacggggctttctgcatgtgacgccagctaagcatagtaagaagtccagcctaggaagggaaggattttggaggtaggtggctttggtgacacactcacttctttctcagcctccaggacactatggcctgttttaagagacatcttatttttctaaaggtgaattctcagatgataggtgaacctgagttgcagatataccaacttctgcttgtatttcttaaatgacaaagattacctagctaagaaacttcctagggaactagggaacctatgtgttccctcagtgtggtttcctgaagccagtgatatgggggttaggataggaagaactttctcggtaatgataaggagaatctcttgtttcctcccacctgtgttgtaaagataaactgacgatatacaggcacattatgtaaacatacacacgcaatgaaaccgaagcttggcggcctgggcgtggtcttgcaaaatgcttccaaagccaccttagcctgttctattcagcggcaaccccaaagcacctgttaagactcctgacccccaagtggcatgcagcccccatgcccaccgggacctggtcagcacagatcttgatgacttccctttctagggcagactgggagggtatccaggaatcggcccctgccccacgggcgttttcatgctgtacagtgacctaaagttggtaagatgtcataatggaccagtccatgtgatttcagtatatacaactccaccagacccctccaacccatataacaccccacccctgttcgcttcctgtatggtgatatcatatgtaacatttactcctgtttctgctgattgtttttttaatgttttggtttgtttttgacatcagctgtaatcattcctgtgctgtgttttttattacccttggtaggtattagacttgcacttttttaaaaaaaggtttctgcatcgtggaagcatttgacccagagtggaacgcgtggcctatgcaggtggattccttcaggtctttcctttggttctttgagcatctttgctttcattcgtctcccgtctttggttctccagttcaaattattgcaaagtaaaggatctttgagtaggttcggtctgaaaggtgtggcctttatatttgatccacacacgttggtcttttaaccgtgctgagcagaaaacaaaacaggttaagaagagccgggtggcagctgacagaggaagccgctcaaataccttcacaataaatagtggcaatatatatatagtttaagaaggctctccatttggcatcgtttaatttatatgttatgttctaagcacagctctcttctcctattttcatcctgcaagcaactcaaaatatttaaaataaagtttacattgtagttattttcaaatctttgcttgataagtattaagaaatattggacttgctgccgtaatttaaagctctgttgattttgtttccgtttggatttttgggggaggggagcactgtgtttatgctggaatatgaagtctgagaccttccggtgctgggaacacacaagagttgttgaaagttgacaagcagactgcgcatgtctctgatgctttgtatcattcttgagcaatcgctcggtccgtggacaataaacagtattatcaaagagaa

SEQ ID NO: 4169 - DNA, 1140 bp, Homo sapiens
  source 1..1140: mol_type = genomic DNA
gcatttgaggggggacgtaattcagcccatacaccaggctgccttctcttattcccagtcaccctttccgtgctcaaccaacttgggataaacaacccaggacatcccagggtagggtcccggaacaaatcccacagggacgacagcggcctgtctattctccagtgttcgattctcctcgaagcgatgcagtgatcagggccaaagcggtcagtgagaaggaagtggactctggaaacgacatttatggcaaccctatcaagaggatccagtatgagatcaagcagataaagatgttcaaagggcctgagaaggatatagagtttatctacacggccccctcctcggcagtgtgtggggtctcgctggacgttggaggaaagaaggaatatctcattgcaggaaaggccgagggggacggcaagatgcacatcaccctctgtgacttcatcgtgccctgggacaccctgagcaccacccagaagaagagcctgaaccacaggtaccagatgggctgcgagtgcaagatcacgcgctgccccatgatcccgtgctacatctcctccccggacgagtgcctctggatggactgggtcacagagaagaacatcaacgggcaccaggccaagttcttcgcctgcatcaagagaagtgacggctcctgtgcgtggtaccgcggcgcggcgccccccaagcaggagtttctcgacatcgaggacccataagcaggcctccaacgcccctgtggccaactgcaaaaaaagcctccaagggtttcgactggtccagctctgacatcccttcctggaaacagcatgaataaaacactcatcccatgggtccaaattaatatgattctgctccccccttctccttttagacatggttgtgggtctggagggagacgtgggtccaaggtcctcatcccatcctccctctgccaggcactatgtgtctggggcttcgatccttgggtgcaggcagggctgggacacgcggcttccctcccagtccctgccttggcaccgtcacagatgccaagcaggcagcacttagggatctcccagctgggttagggcagggcctggaaatgtgcattttgcagaaacttttgagggtcgttgcaagactgtgtagcag

SEQ ID NO: 4170 - DNA, 4603 bp, Homo sapiens
  source 1..4603: mol_type = genomic DNA
gcgcagagcgggcagcaggcaggcggcgggcgctcagacggcttctcctcctcctcttgctcctccagctcctgctccttcgccgggaggccgcccgccgagtcctgcgccagcgccgaggcagcctcgctgcgccccatcccgtcccgccgggcactcggagggcagcgcgccggaggccaaggttgccccgcacggcccggcgggcgagcgagctcgggctgcagcagccccgccggcggcgcgcacggcaactttggagaggcgagcagcagccccggcagcggcggcagcagcggcaatgaccccttggctcgggctcatcgtgctcctgggcagctggagcctgggggactggggcgccgaggcgtgcacatgctcgcccagccacccccaggacgccttctgcaactccgacatcgtgatccgggccaaggtggtggggaagaagctggtaaaggaggggcccttcggcacgctggtctacaccatcaagcagatgaagatgtaccgaggcttcaccaagatgccccatgtgcagtacatccatacggaagcttccgagagtctctgtggccttaagctggaggtcaacaagtaccagtacctgctgacaggtcgcgtctatgatggcaagatgtacacggggctgtgcaacttcgtggagaggtgggaccagctcaccctctcccagcgcaaggggctgaactatcggtatcacctgggttgtaactgcaagatcaagtcctgctactacctgccttgctttgtgacttccaagaacgagtgtctctggaccgacatgctctccaatttcggttaccctggctaccagtccaaacactacgcctgcatccggcagaagggcggctactgcagctggtaccgaggatgggcccccccggataaaagcatcatcaatgccacagacccctgagcgccagaccctgccccacctcacttccctcccttcccgctgagcttcccttggacactaactcttcccagatgatgacaatgaaattagtgcctgttttcttgcaaatttagcacttggaacatttaaagaaaggtctatgctgtcatatggggtttattgggaactatcctcctggccccaccctgccccttctttttggttttgacatcattcatttccacctgggaatttctggtgccatgccagaaagaatgaggaacctgtattcctcttcttcgtgataatataatctctatttttttaggaaaacaaaaatgaaaaactactccatttgaggattgtaattcccacccctcttgcttcttccccacctcaccatctcccagaccctcttccctttgcccttctcctccaatacataaaggacacagacaaggaacttgctgaaaggccaaccatttcaggatcagtcaaaggcagcaagcagatagactcaaggtgtgtgaaagatgttatacaccaggagctgccactgcatgtcccaaccagactgtgtctgtctgtgtctgcatgtaagagtgagggagggaaggaaggaactacaagagagtcggagatgatgcagcacacacacaattccccagcccagtgatgcttgtgttgaccagatgttcctgagtctggagcaagcacccaggccagaataacagagctttcttagttggtgaagacttaaacatctgcctgaggtcaggaggcaatttgcctgccttgtacaaaagctcaggtgaaagactgagatgaatgtctttcctctccctgcctcccaccagacttcctcctggaaaacgctttggtagatttggccaggagctttcttttatgtaaattggataaatacacacaccatacactatccacagatatagccaagtagatttgggtagaggatactatttccagaatagtgtttagctcacctagggggatatgtttgtatacacatttgcatatacccacatggggacataagctaatttttttacaggacacagaattctgttcaatgctgttaaatatgccaatagtttaatctcttctattttgttgtcgttgcttgtttgaagaaaatcatgacattccaagttgacatttttttttcattttaattaaaatttgaaattctgaacaccgtcagcaccctctcttccctatcatgggtcatctgacccctgtccgtctccttgtccctgcttcatgtttgggggcctttctttaactgccttcctggcttagctcagatggcagatgagagtgtagtcaagggcctgggcacaggagggagagctgcagagtgtcctgcctgccttggctggagggacacctctcctgggtgtggagacagcttggttccctttccctagctccctggtgggtgaatgccacctcctgagatcctcacctcttggaattaaaattgttggtcactggggaaagcctgagtttgcaaccagttgtagggtttctgttgtgtttttttttttttttttgaaataaaactataatataaattctcctattaaataaaattattttaagttttagtgtcaaaagtgagatgctgagagtaggtgataatgtatattttacagagtgggggttggcaggatggtgacattgaacatgattgctctctgtctcttttttcagcttatgggtatttatcttctattagtatttgtatcttcagttcattccactttaggaaacagagctgccaattgaaacagaagaagaaaaaaaaaaaaagcagcagacaacacactgtagagtcttgcacacacacaagtgcccaggcaaggtgcttggcagaaccgcagagtgggaagagagtaccggcatcgggtttccttgggatcaatttcattaccgtgtacctttcccattgtggtcatgccatttggcagggggagaatgggaggcttggccttctttgtgaggcagtgtgagcagaagctgatgccagcatgtcactggttttgaagggatgagcccagacttgatgttttgggattgtccttattttaacctcaaggtctcgcatggtggggcccctgaccaacctacacaagttccctcccacaagtggacatcagtgtcttctctgtgaggcatctggccattcgcactccctggtgtggtcagcctctctcacacaaggaggaacttgggtgaaggctgagtgtgaggcacctgaagtttccctgcggagtcgataaattagcagaaccacatccccatctgttaggccttggtgaggaggccctgggcaaagaagggtctttcgcaaagcgatgtcagagggcggttttgagctttctataagctatagctttgtttatttcacccgttcacttactgtataatttaaaatcatttatgtagctgagacacttctgtatttcaatcatatcatgaacattttattttgctaaatcttgtgtcatgtgtaggctgtaatatgtgtacattgtgtttaagagaaaaatgaaacccacatgccgccattttcctgaatcaaattctgcagtggaatggagaggaaaatacttctaggcaagcagctagactggtgaattgggggaaatagaaggaactagtaactgagactcctccagcctcctccctattggaatcccaatggctcctggagtaggaaaaaagtttaaactacattcatgttcttgttctgtgtcactcggccctgggtagtctaccatttacttcaccccaagtcctgctgcccatccagttgggaagccatgattttcctaagaatccagggccatgggagatacaattccaagttctcgcttcctcctttgggcatctcttctgcctcccaatcaaggaagctccatgctcaggctctcagctctcgggccagtgctctgctctgtccagggtaggtaatactgggagactcctgtcttttaccctcccctcgttccagacctgcctcatggtggcaacatggttcttgaacaattaaagaaacaaatgactttttggaatagccctgtctagggcaaactgtggcccccaggagacactacccttccatgccccagacctctgtcttgcatgtgacaattgacaatctggactaccccaagatggcacccaagtgtttggcttctggctacctaaggttaacatgtcactagagtatttttatgagagacaaacattataaaaatctgatggcaaaagcaaaacaaaatggaaagtaggggaggtggatgtgacaacaacttccaaattggctctttggaggcgagaggaaggggagaacttggagaatagtttttgctttgggggtagaggcttcttagattctcccagcatccgcctttccctttagccagtctgctgtcctgaaacccagaagtgatggagagaaaccaacaagagatctcgaaccctgtctagaaggaatgtatttgttgctaaatttcgtagcactgtttacagttttcctccatgttatttatgaattttatattccgtgaatgtatattgtcttgtaatgttgcataatgttcactttttatagtgtgtcctttattctaaacagtaaagtggttttatttctatcacaca

SEQ ID NO: 4171 - DNA, 1446 bp, Homo sapiens
  source 1..1446: mol_type = genomic DNA
gggcagcaggcaggcggcgggcgctcagacggcttctcctcctcctcttgctcctccagctcctgctccttcgccgggaggccgcccgccgagccacccccaggacgccttctgcaactccgacatcgtgatccgggccaaggtggtggggaagaagctggtaaaggaggggcccttcggcacgctggtctacaccatcaagcagatgaagatgtaccgaggcttcaccaagatgccccatgtgcagtacatccatacggaagcttccgagagtctctgtggccttaagctggaggtcaacaagtaccagtacctgctgacaggtcgcgtctatgatggcaagatgtacacggggctgtgcaacttcgtggagaggtgggaccagctcaccctctcccagcgcaaggggctgaactatcggtatcacctgggttgtaactgcaagatcaagtcctgctactacctgccttgctttgtgacttccaagaacgagtgtctctggaccgacatgctctccaatttcggttaccctggctaccagtccaaacactacgcctgcatccggcagaagggcggctactgcagctggtaccgaggatgggcccccccggataaaagcatcatcaatgccacagacccctgagcgccagaccctgccccacctcacttccctcccttcccgctgagcttcccttggacactaactcttcccagatgatgacaatgaaattagtgcctgttttcttgcaaatttagcacttggaacatttaaagaaaggtctatgctgtcatatggggtttattgggaactatcctcctggccccaccctgccccttctttttggttttgacatcattcatttccacctgggaatttctggtgccatgccagaaagaatgaggaacctgtattcctcttcttcgtgataatataatctctatttttttaggaaaacaaaaatgaaaaactactccatttgaggattgtaattcccacccctcttgcttcttccccacctcaccatctcccagaccctcttccctttgcccttctcctccaatacataaaggacacagacaaggaacttgctgaaaggccaaccatttcaggatcagtcaaaggcagcaagcagatagactcaaggtgtgtgaaagatgttatacaccaggagctgccactgcatgtcccaaccagactgtgtctgtctgtgtctgcatgtaagagtgagggagggaaggaaggaactacaagagagtcggagatgatgcagcacacacacaattccccagcccagtgatgcttgtgttgaccagatgttcctgagtctggagcaagcacccaggccagaataacagagctttcttagttggtgaagacttaaacatctgcctgaggtcaggaggcaatttgcctgccttgtacaaaagctcaggtgaaagactgag

SEQ ID NO: 4172 - DNA, 1650 bp, Homo sapiens
  source 1..1650: mol_type = genomic DNA
gctcagcaaggggtccgtccttctctgtcactgtctcttttgcctgttgtaattctgtctgcctctctgggactctgcctgtctcactctttctgtctgtgcctctcctcactcttgttctttctgcctgaatcacagccctcagtttttctgtcctcatgcatttgtctttgtggctctttccgtctttctgcccttgacaccatcccctctcccagtgcttcccctctgcttccagatcgcttcatgacttaggcagggaaacagaggtcagggcctccttccaggcttccctctgcatcttactgagtatgcaggtcggaagagcctcgggtcctgcctccgcgggtggcctagagccaaaggaaggcggagcccgtcggggcgggattggcccttagggccacctcataaagcctggggcgaggggcacaacggccttgggaaggagccctgctggggccgtccagtcccccagacctcacaggctcagtcgcggatctgcagtgtcatgcctgggagccctcggcccgcgccaagctgggtgctgttgctgcggctgctggcgttgctgcggcccccggggctgggtgaggcatgcagctgcgccccggcgcaccctcagcagcacatctgccactcggcacttgtgattcgggccaaaatctccagtgagaaggtagttccggccagtgcagaccctgctgacactgaaaaaatgctccggtatgaaatcaaacagataaagatgttcaaagggtttgagaaagtcaaggatgttcagtatatctatacgccttttgactcttccctctgtggtgtgaaactagaagccaacagccagaagcagtatctcttgactggtcaggtcctcagtgatggaaaagtcttcatccatctgtgcaactacatcgagccctgggaggacctgtccttggtgcagagggaaagtctgaatcatcactaccatctgaactgtggctgccaaatcaccacctgctacacagtaccctgtaccatctcggcccctaacgagtgcctctggacagactggctgttggaacgaaagctctatggttaccaggctcagcattatgtctgtatgaagcatgttgacggcacctgcagctggtaccggggccacctgcctctcaggaaggagtttgttgacatcgttcagccctagtagggaccagtgaccatcacatcccttcaagagtcctgaagatcaagccagttctccttccctgcagagctttggccattaccacctgacctcttgctgccagctaataagaagtgccaagtggacagtctggccactgtcaaggcagggaaggggccatgacttttctgccctgccctcagcctgttgcccctgcctcccaaaccccattagtctagccttgtagctgttactgcaagtgtttcttctggcttagtctgttttctaaagccaggactattccctttcctccccaggaatatgtgttttcctttgtcttaatcgatctggtaggggagaaatggcgaatgtcatacacatgagatggtatatccttgcgatgtacagtatcagaaggtggtttgacagcatcataaacaggctgactggcaggaatgaaaacaagaacatactgtggctgtgta

SEQ ID NO: 4173 - DNA, 2444 bp, Homo sapiens
  source 1..2444: mol_type = genomic DNA
attactgacacaaacgctccctcagggcgtccccgtctggactacaggagaaagtttgggaggcaggttcaacttttcaacttggcggggaattcctctccctcttacacagtttgcagcgcgggggcggcggggtgacagtccccgtgcatgaatcagccacccctcaggctccgccccggcgggggtcggccggacgctcgccccgcataaagcgggcacccgggccgcctggagcagaaagccgcgcacctcctcccgccaggcgctttctcggacgccttgcccagcgggccgcccgaccccctgcaccatggaccccgctcgccccctggggctgtcgattctgctgcttttcctgacggaggctgcactgggcgatgctgctcaggagccaacaggaaataacgcggagatctgtctcctgcccctagactacggaccctgccgggccctacttctccgttactactacgacaggtacacgcagagctgccgccagttcctgtacgggggctgcgagggcaacgccaacaatttctacacctgggaggcttgcgacgatgcttgctggaggatagaaaaagttcccaaagtttgccggctgcaagtgagtgtggacgaccagtgtgaggggtccacagaaaagtatttctttaatctaagttccatgacatgtgaaaaattcttttccggtgggtgtcaccggaaccggattgagaacaggtttccagatgaagctacttgtatgggcttctgcgcaccaaagaaaattccatcattttgctacagtccaaaagatgagggactgtgctctgccaatgtgactcgctattattttaatccaagatacagaacctgtgatgctttcacctatactggctgtggagggaatgacaataactttgttagcagggaggattgcaaacgtgcatgtgcaaaagctttgaaaaagaaaaagaagatgccaaagcttcgctttgccagtagaatccggaaaattcggaagaagcaattttaaacattcttaatatgtcatcttgtttgtctttatggcttatttgcctttatggttgtatctgaagaataatatgacagcatgaggaaacaaatcattggtgatttattcaccagtttttattaatacaagtcactttttaaaaaatttggatttttttatatataactagctgctattcaaatgtgagtctaccatttttaatttatggttcaactgtttgtgagactgaattcttgcaatgcataagatataaaagcaaatatgactcactcatttcttggggtcgtattcctgatttcagaagaggatcataactgaaacaacataagacaatataatcatgtgcttttaacatatttgagaataaaaaggactagcaaataaaactcattttgcatttaaaagttggattatattttagtcccaagaagacaaagtcgcagattaacaacactttaaaaatattactcccattttattgtgttagattgcagtacaatgaatgaataaggggatttatttaaaagatcttaactttcttgactgatttaaaaagctaatcaatttattaaagccagaaatgttctcctctgggaaagcaatttctatctatttatctaccaatccccactcacatgtatatgtttgtgtttacatagagatagatggttttaagggttttcctattgttaaattatttcctaagacattgtgggttggagaccactaaacttataaaaaaccaaggaaagtaaagtttttcaaatgtttatactgtttaaggtgtttatttatataaaccatgcatgagaaaccatgcataaatttaataatttaaatttcaccagtaaattatcattgattaaatatggtcataccaatgaaataggttttttctttctctgtaataaaacaatttttctaaattcttatgttttcatagcaagattaacatatttaattacaaattaaatatgcaaaatgacaaatgcgtttaccttttgcttgaacaatctttcatttaaaaatttatcccagttattttgacaaataggtatatgcctgagaactttgaatgatgctgaaagctagaagcaaaccaggtactcttcagtcagggactggttgaagattttatggatgaggagttagcaaaatatctatatatgcatatcttctgactcccaggatacataagaaacacagggcctagaacagtatgaataaacacacatatacacaaacatcacagaagatactaaagatattaaaaatgtttacctatagaggtttggagagaacagaggggtggacagttgtggagataatatttgtgtaaatataactgtgatatagtttttatcttggaccatgtaaatatttgacataattaataatcaaaattaaataaaaaagaaaaagc

SEQ ID NO: 4174 - DNA, 1426 bp, Homo sapiens
  source 1..1426: mol_type = genomic DNA
gggaattcctctccctcttacacagtttgcagcgcgggggcggcggggtgacagtccccgtgcatgaatcagccacccctcaggctccgccccggcgggggtcggccggacgctcgccccgcataaagcgggcacccgggccgcctggagcagaaagccgcgcacctcctcccgccaggcgctttctcggacgccttgcccagcgggccgcccgaccccctgcaccatggaccccgctcgccccctggggctgtcgattctgctgcttttcctgacggaggctgcactgggcgatgctgctcaggagccaacaggaaataacgcggagatctgtctcctgcccctagactacggaccctgccgggccctacttctccgttactactacgacaggtacacgcagagctgccgccagttcctgtacgggggctgcgagggcaacgccaacaatttctacacctgggaggcttgcgacgatgcttgctggaggatagaaaaagttcccaaactaagttccatgacatctttgaaaaagaaaaagaagatgccaaagcttcgctttgccagtagaatccggaaaattcggaagaagcaattttaaacattcttaatatgtcatcttgtttgtctttatggcttatttgcctttatggttgtatctgaagaataatatgacagcatgaggaaacaaatcattggtgatttattcaccagtttttattaatacaagtcactttttaaaaaatttggatttttttatatataactagctgctattcaaatgtgagtctaccatttttaatttatggttcaactgtttgtgagactgaattcttgcaatgcataagatataaaagcaaatatgactcactcatttcttggggtcgtattcctgatttcagaagaggatcataactgaaacaacataagacaatataatcatgtgcttttaacatatttgagaataaaaaggactagcaaataaaactcattttgcatttaaaagttggattatattttagtcccaagaagacaaagtcgcagattaacaacactttaaaaatattactcccattttattgtgttagattgcagtacaatgaatgaataaggggatttatttaaaagatcttaactttcttgactgatttaaaaagctaatcaatttattaaagccagaaatgttctcctctgggaaagcaatttctatctatttatctaccaatccccactcacatgtatatgtttgtgtttacatagagatagatggttttaagggttttcctattgttaaattatttcctaagacattgtgggttggagaccactaaacttataaaaaaccaaggaaagtaaagtttttcaaatgtttatactgtttaaggtgtttatttatataaaccatgcatgagaaaccatgcataaa

SEQ ID NO: 4175 - DNA, 2264 bp, Homo sapiens
  source 1..2264: mol_type = genomic DNA
ttccgggcgcgctgcgaccgttggggctttgttcgcgggggtcacagctctcatggctgcagctagcgtgaccccccctggctccctggagttgctacagcccggcttctccaagaccctcctggggaccaagctggaagccaagtacctgtgctccgcctgcagaaacgtcctccgcaggcccttccaggcgcagtgtggccaccggtactgctccttctgcctggccagcatcctcagctctgggcctcagaactgtgctgcctgtgttcacgagggcatatatgaagaaggcatttctattttagaaagcagttcggccttcccagataatgctgcccgcagggaggtggagagcctgccggccgtctgtcccagtgatggatgcacctggaaggggaccctgaaagaatacgagagctgccacgaaggccgctgcccgctcatgctgaccgaatgtcccgcgtgcaaaggcctggtccgccttggtgaaaaggagcgccacctggagcacgagtgcccggagagaagcctgagctgccggcattgccgggcaccctgctgcggagcagacgtgaaggcgcaccacgaggtctgccccaagttccccttaacttgtgacggctgcggcaagaagaagatcccccgggagaagtttcaggaccacgtcaagacttgtggcaagtgtcgagtcccttgcagattccacgccatcggctgcctcgagacggtagagggtgagaaacagcaggagcacgaggtgcagtggctgcgggagcacctggccatgctactgagctcggtgctggaggcaaagcccctcttgggagaccagagccacgcggggtcagagctcctgcagaggtgcgagagcctggagaagaagacggccacttttgagaacattgtctgcgtcctgaaccgggaggtggagagggtggccatgactgccgaggcctgcagccggcagcaccggctggaccaagacaagattgaagccctgagtagcaaggtgcagcagctggagaggagcattggcctcaaggacctggcgatggctgacttggagcagaaggtcttggagatggaggcatccacctacgatggggtcttcatctggaagatctcagacttcgccaggaagcgccaggaagctgtggctggccgcatacccgccatcttctccccagccttctacaccagcaggtacggctacaagatgtgtctgcgtatctacctgaacggcgacggcaccgggcgaggaacacacctgtccctcttctttgtggtgatgaagggcccgaatgacgccctgctgcggtggcccttcaaccagaaggtgaccttaatgctgctcgaccagaataaccgggagcacgtgattgacgccttcaggcccgacgtgacttcatcctcttttcagaggccagtcaacgacatgaacatcgcaagcggctgccccctcttctgccccgtctccaagatggaggcaaagaattcctacgtgcgggacgatgccatcttcatcaaggccattgtggacctgacagggctctaactgccccctactggtgtctgggggttgggggcagccaggcacagccggctcacggaggggccaccacgctgggccagggtctcactgtacaagtgggcaggggccgcgcttgggcgcttgggagggtgtcggcctgcagccaagttcactgtcacgggggaaggagccaccagccagtcctcagatttcagagactgcggaggggcttggcagacggtcttagccaagggctgtggtggcattggccgagggtcttcgggtgcttcccagcacaagctgcccttgctgtcctgtgcagtgaagggagaggccctgggtgggggacactcagagtgggagcacatcccagcagtgcccatgtagcaggagcacagtggatggccttgtgtccctcgggcatgacaggcagaaacgagggctgctccaggagaagggcctcctgctggccagagcaaggaaggctgagcagcttggttctcccctctggcccctggagagaagggagcattcctagacccctgggtgcttgtctgcacagagctctggtctgtgccaccttggccaggctggctgtgggagagggtctggtcccacgccgcctctgctcagaccactgtgtgggaggtgcacagcacagcctgcgggtaaagtgtgagagcttgccatccagctcacgaagacagagttattaaaccattcaaatctc

SEQ ID NO: 4176 - DNA, 2413 bp, Homo sapiens
  source 1..2413: mol_type = genomic DNA
cgcgctgcgaccgttggggctttgttcgcgggggtcacagctctcatggctgcagctagcgtgaccccccctggctccctggagttgctacagcccggcttctccaagaccctcctggggaccaagctggaagccaagtacctgtgctccgcctgcagaaacgtcctccgcaggcccttccaggcgcagtgtggccaccggtactgctccttctgcctggccagcatcctcagctctgggcctcagaactgtgctgcctgtgttcacgagggcatatatgaagaaggcatttctattttagaaagcagttcggccttcccagataatgctgcccgcagggaggtggagagcctgccggccgtctgtcccagtgatggatgcacctggaaggggaccctgaaagaatacgaggtaaagatgcctgcgtgtggcatggtgacagaagctccagcagtcgggagtcgtccacgctccccaagcagttatgaccttgtcctgcacgttcctctcactggggctgaagcctgtctgatgtctgtggaggaagagacggagctgctccttagaagctgccacgaaggccgctgcccgctcatgctgaccgaatgtcccgcgtgcaaaggcctggtccgccttggtgaaaaggagcgccacctggagcacgagtgcccggagagaagcctgagctgccggcattgccgggcaccctgctgcggagcagacgtgaaggcgcaccacgaggtctgccccaagttccccttaacttgtgacggctgcggcaagaagaagatcccccgggagaagtttcaggaccacgtcaagacttgtggcaagtgtcgagtcccttgcagattccacgccatcggctgcctcgagacggtagagggtgagaaacagcaggagcacgaggtgcagtggctgcgggagcacctggccatgctactgagctcggtgctggaggcaaagcccctcttgggagaccagagccacgcggggtcagagctcctgcagaggtgcgagagcctggagaagaagacggccacttttgagaacattgtctgcgtcctgaaccgggaggtggagagggtggccatgactgccgaggcctgcagccggcagcaccggctggaccaagacaagattgaagccctgagtagcaaggtgcagcagctggagaggagcattggcctcaaggacctggcgatggctgacttggagcagaaggtcttggagatggaggcatccacctacgatggggtcttcatctggaagatctcagacttcgccaggaagcgccaggaagctgtggctggccgcatacccgccatcttctccccagccttctacaccagcaggtacggctacaagatgtgtctgcgtatctacctgaacggcgacggcaccgggcgaggaacacacctgtccctcttctttgtggtgatgaagggcccgaatgacgccctgctgcggtggcccttcaaccagaaggtgaccttaatgctgctcgaccagaataaccgggagcacgtgattgacgccttcaggcccgacgtgacttcatcctcttttcagaggccagtcaacgacatgaacatcgcaagcggctgccccctcttctgccccgtctccaagatggaggcaaagaattcctacgtgcgggacgatgccatcttcatcaaggccattgtggacctgacagggctctaactgccccctactggtgtctgggggttgggggcagccaggcacagccggctcacggaggggccaccacgctgggccagggtctcactgtacaagtgggcaggggccgcgcttgggcgcttgggagggtgtcggcctgcagccaagttcactgtcacgggggaaggagccaccagccagtcctcagatttcagagactgcggaggggcttggcagacggtcttagccaagggctgtggtggcattggccgagggtcttcgggtgcttcccagcacaagctgcccttgctgtcctgtgcagtgaagggagaggccctgggtgggggacactcagagtgggagcacatcccagcagtgcccatgtagcaggagcacagtggatggccttgtgtccctcgggcatgacaggcagaaacgagggctgctccaggagaagggcctcctgctggccagagcaaggaaggctgagcagcttggttctcccctctggcccctggagagaagggagcattcctagacccctgggtgcttgtctgcacagagctctggtctgtgccaccttggccaggctggctgtgggagagggtctggtcccacgccgcctctgctcagaccactgtgtgggaggtgcacagcacagcctgcgggtaaagtgtgagagcttgccatccagctcacgaagacagagttattaaaccattcaaatctc

SEQ ID NO: 4177 - DNA, 2019 bp, Homo sapiens
  source 1..2019: mol_type = genomic DNA
gcgctgcgaccgttggggctttgttcgcgggggtcacagctctcatggctgcagctagcgtgaccccccctggctccctggagttgctacagcccggcttctccaagaccctcctggggaccaagctggaagccaagtacctgtgctccgcctgcagaaacgtcctccgcaggcccttccaggcgcagtgtggccaccggtactgctccttctgcctggccagcatcctcagctctgggcctcagaactgtgctgcctgtgttcacgagggcatatatgaagaaggcatttctattttagaaagcagttcggccttcccagataatgctgcccgcagggaggtggagagcctgccggccgtctgtcccagtgatggatgcacctggaaggggaccctgaaagaatacgaggtaaagatgcctgcgtgtggcatggtgacagaagctccagcagtcgggagtcgtccacgctccccaagcagttatgaccttgtcctgcacgttcctctcactggggctgaagcctgtctgatgtctgtggaggaagagacggagctgctccttagaagctgccacgaaggccgctgcccgctcatgctgaccgaatgtcccgcgtgcaaaggcctggtccgccttggtgaaaaggagcgccacctggagcacgagtgcccggagagaagcctgagctgccggcattgccgggcaccctgctgcggagcagacgtgaagcggctggaccaagacaagattgaagccctgagtagcaaggtgcagcagctggagaggagcattggcctcaaggacctggcgatggctgacttggagcagaaggtcttggagatggaggcatccacctacgatggggtcttcatctggaagatctcagacttcgccaggaagcgccaggaagctgtggctggccgcatacccgccatcttctccccagccttctacaccagcaggtacggctacaagatgtgtctgcgtatctacctgaacggcgacggcaccgggcgaggaacacacctgtccctcttctttgtggtgatgaagggcccgaatgacgccctgctgcggtggcccttcaaccagaaggtgaccttaatgctgctcgaccagaataaccgggagcacgtgattgacgccttcaggcccgacgtgacttcatcctcttttcagaggccagtcaacgacatgaacatcgcaagcggctgccccctcttctgccccgtctccaagatggaggcaaagaattcctacgtgcgggacgatgccatcttcatcaaggccattgtggacctgacagggctctaactgccccctactggtgtctgggggttgggggcagccaggcacagccggctcacggaggggccaccacgctgggccagggtctcactgtacaagtgggcaggggccgcgcttgggcgcttgggagggtgtcggcctgcagccaagttcactgtcacgggggaaggagccaccagccagtcctcagatttcagagactgcggaggggcttggcagacggtcttagccaagggctgtggtggcattggccgagggtcttcgggtgcttcccagcacaagctgcccttgctgtcctgtgcagtgaagggagaggccctgggtgggggacactcagagtgggagcacatcccagcagtgcccatgtagcaggagcacagtggatggccttgtgtccctcgggcatgacaggcagaaacgagggctgctccaggagaagggcctcctgctggccagagcaaggaaggctgagcagcttggttctcccctctggcccctggagagaagggagcattcctagacccctgggtgcttgtctgcacagagctctggtctgtgccaccttggccaggctggctgtgggagagggtctggtcccacgccgcctctgctcagaccactgtgtgggaggtgcacagcacagcctgcgggtaaagtgtgagagcttgccatccagctcacgaagacagagttattaaaccattcaaatctc

SEQ ID NO: 4178 - DNA, 680 bp, Homo sapiens
  source 1..680: mol_type = genomic DNA
tggcactcccaaagtgctgggattacaggctggtctcgaactcctggcctgaagtgatcctccaacctcagcctcccaagtagctgggattacaggttgaatcgctcctagctgacccctcacgtctcttatgatacgtacagaaagcaagagcagcccatgccgtccggccgcgcaccaggtctcagtctgtgtgtctggttcaggtgaccatggtgttcagttcagttcctcctgcctcgtgtgtaggccactgagagctccctagtctaagccggaggaggttctgggctttgttcgcgggggtcacagctctcatggctgcagctagcgtgaccccccctggctccctggagttgctacagcccggcttctccaagaccctcctggggaccaagctggaagccaagtacctgtgctccgcctgcagaaacgtcctccgcaggcccttccaggcgcagtgtggccaccggtactgctccttctgcctggccagcatcctcagctctgggcctcagaactgtgctgcctgtgttcacgagggcatatatgaagaaggcatttctattttagaaagcagttcggccttcccagataatgctgcccgcagggaggtggagagcctgccggccgtctgtcccagtgatggatgcacctggaaggggaccctgaaagaatac

SEQ ID NO: 4179 - DNA, 709 bp, Homo sapiens
  source 1..709: mol_type = genomic DNA
agatgactgcagagtgagagtgaaaccagcttccctcggaggctgcagcacagggctgacatgcaaacgtctgaaaaagaggcaagctctcggtgtgagcaagtggactgcggctatttgaggaaggagcccacgtgggaatcccctgagctgcgccatggccagaggctttgttcgcgggggtcacagctctcatggctgcagctagcgtgaccccccctggctccctggagttgctacagcccggcttctccaagaccctcctggggaccaagctggaagccaagtacctgtgctccgcctgcagaaacgtcctccgcaggcccttccaggcgcagtgtggccaccggtactgctccttctgcctggccagcatcctcagctctgggcctcagaactgtgctgcctgtgttcacgagggcatatatgaagaaggcatttctattttagaaagcagttcggccttcccagataatgctgcccgcagggaggtggagagcctgccggccgtctgtcccagtgatggatgcacctggaaggggaccctgaaagaatacgagagctgccacgaaggccgctgcccgctcatgctgaccgaatgtcccgcgtgcaaaggcctggtccgccttggtgaaaaggagcgccacctggagcacgagtgcccggagagaagcctgagctgccggcattgccgggcaccctgctgcgg

SEQ ID NO: 4180 - DNA, 823 bp, Homo sapiens
  source 1..823: mol_type = genomic DNA
accggtgtcgcccggcttgggctcccggctcacctctcgggtgtgcggcaggggtctccgccccggggccacgggaggggaagcaagggcctcgctgtctcgccgcacctggggaagggacccaattagcgcggaccccacagcgcagcacctcaccagctccccgcaccaacgccccggcgcgctctttgaggaaaaagcagagggcgacttagggctttgttcgcgggggtcacagctctcatggctgcagctagcgtgaccccccctggctccctggagttgctacagcccggcttctccaagaccctcctggggaccaagctggaagccaagtacctgtgctccgcctgcagaaacgtcctccgcaggcccttccaggcgcagtgtggccaccggtactgctccttctgcctggccagcatcctcagctctgggcctcagaactgtgctgcctgtgttcacgagggcatatatgaagaaggcatttctattttagaaagcagttcggccttcccagataatgctgcccgcagggaggtggagagcctgccggccgtctgtcccagtgatggatgcacctggaaggggaccctgaaagaatacgagagctgccacgaaggccgctgcccgctcatgctgaccgaatgtcccgcgtgcaaaggcctggtccgccttggtgaaaaggagcgccacctggagcacgagtgcccggagagaagcctgagctgccggcattgccgggcaccctgctgcggagcagacgtgaaggcgcaccacgaggtctgccccaagttccccttaacttgtgacggctgcggca

SEQ ID NO: 4181 - DNA, 2209 bp, Homo sapiens
  source 1..2209: mol_type = genomic DNA
gtagctgggcgggcccttagttccgggcgcgctgcgaccgttggggctttgttcgcgggggtcacagctctcatggctgcagctagcgtgaccccccctggctccctggagttgctacagcccggcttctccaagaccctcctggggaccaagctggaagccaagtacctgtgctccgcctgcagaaacgtcctccgcaggcccttccaggcgcagtgtggccaccggtactgctccttctgcctggccagcatcctcagctctgggcctcagaactgtgctgcctgtgttcacgagggcatatatgaagaaggcatttctattttagaaagcagttcggccttcccagataatgctgcccgcagggaggtggagagcctgccggccgtctgtcccagtgatggatgcacctggaaggggaccctgaaagaatacgagagctgccacgaaggccgctgcccgctcatgctgaccgaatgtcccgcgtgcaaaggcctggtccgccttggtgaaaaggagcgccacctggagcacgagtgcccggagagaagcctgagctgccggcattgccgggcaccctgctgcggagcagacgtgaagtttcaggaccacgtcaagacttgtggcaagtgtcgagtcccttgcagattccacgccatcggctgcctcgagacggtagagggtgagaaacagcaggagcacgaggtgcagtggctgcgggagcacctggccatgctactgagctcggtgctggaggcaaagcccctcttgggagaccagagccacgcggggtcagagctcctgcagaggtgcgagagcctggagaagaagacggccacttttgagaacattgtctgcgtcctgaaccgggaggtggagagggtggccatgactgccgaggcctgcagccggcagcaccggctggaccaagacaagattgaagccctgagtagcaaggtgcagcagctggagaggagcattggcctcaaggacctggcgatggctgacttggagcagaaggtcttggagatggaggcatccacctacgatggggtcttcatctggaagatctcagacttcgccaggaagcgccaggaagctgtggctggccgcatacccgccatcttctccccagccttctacaccagcaggtacggctacaagatgtgtctgcgtatctacctgaacggcgacggcaccgggcgaggaacacacctgtccctcttctttgtggtgatgaagggcccgaatgacgccctgctgcggtggcccttcaaccagaaggtgaccttaatgctgctcgaccagaataaccgggagcacgtgattgacgccttcaggcccgacgtgacttcatcctcttttcagaggccagtcaacgacatgaacatcgcaagcggctgccccctcttctgccccgtctccaagatggaggcaaagaattcctacgtgcgggacgatgccatcttcatcaaggccattgtggacctgacagggctctaactgccccctactggtgtctgggggttgggggcagccaggcacagccggctcacggaggggccaccacgctgggccagggtctcactgtacaagtgggcaggggccgcgcttgggcgcttgggagggtgtcggcctgcagccaagttcactgtcacgggggaaggagccaccagccagtcctcagatttcagagactgcggaggggcttggcagacggtcttagccaagggctgtggtggcattggccgagggtcttcgggtgcttcccagcacaagctgcccttgctgtcctgtgcagtgaagggagaggccctgggtgggggacactcagagtgggagcacatcccagcagtgcccatgtagcaggagcacagtggatggccttgtgtccctcgggcatgacaggcagaaacgagggctgctccaggagaagggcctcctgctggccagagcaaggaaggctgagcagcttggttctcccctctggcccctggagagaagggagcattcctagacccctgggtgcttgtctgcacagagctctggtctgtgccaccttggccaggctggctgtgggagagggtctggtcccacgccgcctctgctcagaccactgtgtgggaggtgcacagcacagcctgcgggtaaagtgtgagagcttgccatccagctcacgaagacagagttattaaaccattcaaatctc

SEQ ID NO: 4182 - DNA, 1789 bp, Homo sapiens
  source 1..1789: mol_type = genomic DNA
gaaaccagcttccctcggaggctgcagcacagggctgacatgcaaacgtctgaaaaagaggcaagctctcggtgtgagcaagtggactgcggctatttgaggaaggagcccacgtgggaatcccctgagctgcgccatggccagaggctttgttcgcgggggtcacagctctcatggctgcagctagcgtgaccccccctggctccctggagttgctacagcccggcttctccaagaccctcctggggaccaagctggaagccaagtacctgtgctccgcctgcagaaacgtcctccgcaggcccttccaggcgcagtgtggccaccggtactgctccttctgcctggccagcatcctcagctctgggcctcagaactgtgctgcctgtgttcacgagggcatatatgaagaaggcatttctattttagaaagcagttcggccttcccagataatgctgcccgcagggaggtggagagcctgccggccgtctgtcccagtgatggatgcacctggaaggggaccctgaaagaatacgagagctgccacgaaggccgctgcccgctcatgctgaccgaatgtcccgcgtgcaaaggcctggtccgccttggtgaaaaggagcgccacctggagcacgagtgcccggagagaagcctgagctgccggcattgccgggcaccctgctgcggagcagacgtgaaggcgcaccacgaggtctgccccaagttccccttaacttgtgacggctgcggcaagaagaagatcccccgggagaagtttcaggaccacgtcaagacttgtggcaagtgtcgagtcccttgcagattccacgccatcggctgcctcgagacggtagagggtgagaaacagcaggagcacgaggtgcagtggctgcgggagcacctggccatgctactgagctcggtgctggaggcaaagcccctcttgggagaccagagccacgcggggtcagagctcctgcagaggtgcgagagcctggagaagaagacggccacttttgagaacattgtctgcgtcctgaaccgggaggtggagagggtggccatgactgccgaggcctgcagccggcagcaccggctggaccaagacaagattgaagccctgagtagcaaggtgcagcagctggagaggagcattggcctcaaggacctggcgatggctgacttggagcagaaggtcttggagatggaggcatccacctacgatggggtcttcatctggaagatctcagacttcgccaggaagcgccaggaagctgtggctggccgcatacccgccatcttctccccagccttctacaccagcaggtacggctacaagatgtgtctgcgtatctacctgaacggcgacggcaccgggcgaggaacacacctgtccctcttctttgtggtgatgaagggcccgaatgacgccctgctgcggtggcccttcaaccagaaggtgaccttaatgctgctcgaccagaataaccgggagcacgtgattgacgccttcaggcccgacgtgacttcatcctcttttcagaggccagtcaacgacatgaacatcgcaagcggctgccccctcttctgccccgtctccaagatggaggcaaagaattcctacgtgcgggacgatgccatcttcatcaaggccattgtggacctgacagggctctaactgccccctactggtgtctgggggttgggggcagccaggcacagccggctcacggaggggccaccacgctgggccagggtctcactgtacaagtgggcaggggccgcgct

SEQ ID NO: 4183 - DNA, 2492 bp, Homo sapiens
  source 1..2492: mol_type = genomic DNA
gggagcgcggcgcggccgccgcgtgcgcgagccggggttgcagcccagccgggactttccagccggcggcagccgcggcggccgccggctcttccccgccccccgccatggggcagcccggggagcagaacgctgcggaccgcggcggaggacgcgcccggcgcccctgagccggccgagcggcgacggaccgcgagatgaggaaaatgaggcccaaagaagtgatgccacttggttaaggtcccagagcaggtcagaatcagacctaggatcagaaacctggctcctggctcctggctccctactcttctaaggatcgctgtcctgacagaagagaactcctctttcctaaaatggagtcgagtaaaaagatggactctcctggcgcgctgcagactaacccgccgctaaagctgcacactgaccgcagtgctgggacgccagtttttgtccctgaacaaggaggttacaaggaaaagtttgtgaagaccgtggaggacaagtacaagtgtgagaagtgccacctggtgctgtgcagcccgaagcagaccgagtgtgggcaccgcttctgcgagagctgcatggcggccctgctgagctcttcaagtccaaaatgtacagcgtgtcaagagagcatcgttaaagataaggtgtttaaggataattgctgcaagagagaaattctggctcttcagatctattgtcggaatgaaagcagaggttgtgcagagcagttaatgctgggacatctgctggtgcatttaaaaaatgattgccattttgaagaacttccatgtgtgcgtcctgactgcaaagaaaaggtcttgaggaaagacctgcgagaccacgtggagaaggcgtgtaaataccgggaagccacatgcagccactgcaagagtcaggttccgatgatcgcgctgcagaaacacgaagacaccgactgtccctgcgtggtggtgtcctgccctcacaagtgcagcgtccagactctcctgaggagcgaggggacaaaccagcagatcaaggcccacgaggccagctccgccgtgcagcacgtcaacctgctgaaggagtggagcaactcgctcgaaaagaaggtttccttgttgcagaatgaaagtgtagaaaaaaacaagagcatacaaagtttgcacaatcagatatgtagctttgaaattgaaattgagagacaaaaggaaatgcttcgaaataatgaatccaaaatccttcatttacagcgagtgatagacagccaagcagagaaactgaaggagcttgacaaggagatccggcccttccggcagaactgggaggaagcagacagcatgaagagcagcgtggagtccctccagaaccgcgtgaccgagctggagagcgtggacaagagcgcggggcaagtggctcggaacacaggcctgctggagtcccagctgagccggcatgaccagatgctgagtgtgcacgacatccgcctagccgacatggacctgcgcttccaggtcctggagaccgccagctacaatggagtgctcatctggaagattcgcgactacaagcggcggaagcaggaggccgtcatggggaagaccctgtccctttacagccagcctttctacactggttactttggctataagatgtgtgccagggtctacctgaacggggacgggatggggaaggggacgcacttgtcgctgttttttgtcatcatgcgtggagaatatgatgccctgcttccttggccgtttaagcagaaagtgacactcatgctgatggatcaggggtcctctcgacgtcatttgggagatgcattcaagcccgaccccaacagcagcagcttcaagaagcccactggagagatgaatatcgcctctggctgcccagtctttgtggcccaaactgttctagaaaatgggacatatattaaagatgatacaatttttattaaagtcatagtggatacttcggatctgcccgatccctgataagtagctggggaggtggatttagcagaaggcaactcctctgggggatttgaaccggtctgtcttcactgaggtcctcgcgctcagaaaaggaccttgtgagacggaggaagcggcagaaggcggacgcgtgccggcgggaggagccacgcgtgagcacacctgacacgttttataatagactagccacacttcactctgaagaattatttatccttcaacaagataaatattgctgtcagagaaggttttcattttcatttttaaagatctagttaattaaggtggaaaacatatatgctaaacaaaagaaacatgatttttcttccttaaacttgaacaccaaaaaaacacacacacacacacacgtggggatagctggacatgtcagcatgttaagtaaaaggagaatttatgaaatagtaatgcaattctgatatcttctttctaaaattcaagagtgcaattttgtttcaaatacagtatattgtctatttttaaggcctc

SEQ ID NO: 4184 - DNA, 2239 bp, Homo sapiens
  source 1..2239: mol_type = genomic DNA
agaagtgatgccacttggttaaggtcccagagcaggtcagaatcagacctaggatcagaaacctggctcctggctcctggctccctactcttctaaggatcgctgtcctgacagaagagaactcctctttcctaaaatggagtcgagtaaaaagatggactctcctggcgcgctgcagactaacccgccgctaaagctgcacactgaccgcagtgctgggacgccagtttttgtccctgaacaaggaggttacaaggaaaagtttgtgaagaccgtggaggacaagtacaagtgtgagaagtgccacctggtgctgtgcagcccgaagcagaccgagtgtgggcaccgcttctgcgagagctgcatggcggccctgctgagctcttcaagtccaaaatgtacagcgtgtcaagagagcatcgttaaagataaggtgtttaaggataattgctgcaagagagaaattctggctcttcagatctattgtcggaatgaaagcagaggttgtgcagagcagttaatgctgggacatctgctggtgcatttaaaaaatgattgccattttgaagaacttccatgtgtgcgtcctgactgcaaagaaaaggtcttgaggaaagacctgcgagaccacgtggagaaggcgtgtaaataccgggaagccacatgcagccactgcaagagtcaggttccgatgatcgcgctgcagaaacacgaagacaccgactgtccctgcgtggtggtgtcctgccctcacaagtgcagcgtccagactctcctgaggagcgaggggacaaaccagcagatcaaggcccacgaggccagctccgccgtgcagcacgtcaacctgctgaaggagtggagcaactcgctcgaaaagaaggtttccttgttgcagaatgaaagtgtagaaaaaaacaagagcatacaaagtttgcacaatcagatatgtagctttgaaattgaaattgagagacaaaaggaaatgcttcgaaataatgaatccaaaatccttcatttacagcgagtgatagacagccaagcagagaaactgaaggagcttgacaaggagatccggcccttccggcagaactgggaggaagcagacagcatgaagagcagcgtggagtccctccagaaccgcgtgaccgagctggagagcgtggacaagagcgcggggcaagtggctcggaacacaggcctgctggagtcccagctgagccggcatgaccagatgctgagtgtgcacgacatccgcctagccgacatggacctgcgcttccaggtcctggagaccgccagctacaatggagtgctcatctggaagattcgcgactacaagcggcggaagcaggaggccgtcatggggaagaccctgtccctttacagccagcctttctacactggttactttggctataagatgtgtgccagggtctacctgaacggggacgggatggggaaggggacgcacttgtcgctgttttttgtcatcatgcgtggagaatatgatgccctgcttccttggccgtttaagcagaaagtgacactcatgctgatggatcaggggtcctctcgacgtcatttgggagatgcattcaagcccgaccccaacagcagcagcttcaagaagcccactggagagatgaatatcgcctctggctgcccagtctttgtggcccaaactgttctagaaaatgggacatatattaaagatgatacaatttttattaaagtcatagtggatacttcggatctgcccgatccctgataagtagctggggaggtggatttagcagaaggcaactcctctgggggatttgaaccggtctgtcttcactgaggtcctcgcgctcagaaaaggaccttgtgagacggaggaagcggcagaaggcggacgcgtgccggcgggaggagccacgcgtgagcacacctgacacgttttataatagactagccacacttcactctgaagaattatttatccttcaacaagataaatattgctgtcagagaaggttttcattttcatttttaaagatctagttaattaaggtggaaaacatatatgctaaacaaaagaaacatgatttttcttccttaaacttgaacaccaaaaaaacacacacacacacacacgtggggatagctggacatgtcagcatgttaagtaaaaggagaatttatgaaatagtaatgcaattctgatatcttctttctaaaattcaagagtgcaattttg

SEQ ID NO: 4185 - DNA, 2459 bp, Homo sapiens
  source 1..2459: mol_type = genomic DNA
cggccgccggctcttccccgccccccgccatggggcagcccggggagcagaacgctgcggaccgcggcggaggacgcgcccggcgcccctgagccggccgagcggcgacggaccgcgagatgaggaaaatgaggcccaaagaagtgatgccacttggttaaggtcccagagcaggtcagaatcagacctaggatcagaaacctggctcctggctcctggctccctactcttctaaggatcgctgtcctgacagaagagaactcctctttcctaaaatggagtcgagtaaaaagatggactctcctggcgcgctgcagactaacccgccgctaaagctgcacactgaccgcagtgctgggacgccagtttttgtccctgaacaaggaggttacaaggaaaagtttgtgaagaccgtggaggacaagtacaagtgtgagaagtgccacctggtgctgtgcagcccgaagcagaccgagtgtgggcaccgcttctgcgagagctgcatggcggccctgctgagctcttcaagtccaaaatgtacagcgtgtcaagagagcatcgttaaagataaggtgtttaaggataattgctgcaagagagaaattctggctcttcagatctattgtcggaatgaaagcagaggttgtgcagagcagttaatgctgggacatctgctggtgcatttaaaaaatgattgccattttgaagaacttccatgtgtgcgtcctgactgcaaagaaaaggtcttgaggaaagacctgcgagaccacgtggagaaggcgtgtaaataccgggaagccacatgcagccactgcaagagtcaggttccgatgatcgcgctgcagaaacacgaagacaccgactgtccctgcgtggtggtgtcctgccctcacaagtgcagcgtccagactctcctgaggagcgagttgagtgcacacttgtcagagtgtgtcaatgcccccagcacctgtagttttaagcgctatggctgcgtttttcaggggacaaaccagcagatcaaggcccacgaggccagctccgccgtgcagcacgtcaacctgctgaaggagtggagcaactcgctcgaaaagaaggtttccttgttgcagaatgaaagtgtagaaaaaaacaagagcatacaaagtttgcacaatcagatatgtagctttgaaattgaaattgagagacaaaaggaaatgcttcgaaataatgaatccaaaatccttcatttacagcgagtgatagacagccaagcagagaaactgaaggagcttgacaaggagatccggcccttccggcagaactgggaggaagcagacagcatgaagagcagcgtggagtccctccagaaccgcgtgaccgagctggagagcgtggacaagagcgcggggcaagtggctcggaacacaggcctgctggagtcccagctgagccggcatgaccagatgctgagtgtgcacgacatccgcctagccgacatggacctgcgcttccaggtcctggagaccgccagctacaatggagtgctcatctggaagattcgcgactacaagcggcggaagcaggaggccgtcatggggaagaccctgtccctttacagccagcctttctacactggttactttggctataagatgtgtgccagggtctacctgaacggggacgggatggggaaggggacgcacttgtcgctgttttttgtcatcatgcgtggagaatatgatgccctgcttccttggccgtttaagcagaaagtgacactcatgctgatggatcaggggtcctctcgacgtcatttgggagatgcattcaagcccgaccccaacagcagcagcttcaagaagcccactggagagatgaatatcgcctctggctgcccagtctttgtggcccaaactgttctagaaaatgggacatatattaaagatgatacaatttttattaaagtcatagtggatacttcggatctgcccgatccctgataagtagctggggaggtggatttagcagaaggcaactcctctgggggatttgaaccggtctgtcttcactgaggtcctcgcgctcagaaaaggaccttgtgagacggaggaagcggcagaaggcggacgcgtgccggcgggaggagccacgcgtgagcacacctgacacgttttataatagactagccacacttcactctgaagaattatttatccttcaacaagataaatattgctgtcagagaaggttttcattttcatttttaaagatctagttaattaaggtggaaaacatatatgctaaacaaaagaaacatgatttttcttccttaaacttgaacaccaaaaaaacacacacacacacacacgtggggatagctggacatgtcagcatgttaagtaaaaggagaatttatgaaatagtaatgcaattctgatatcttctttctaaaattcaagagtgcaattttgtttcaa

SEQ ID NO: 4186 - DNA, 1786 bp, Homo sapiens
  source 1..1786: mol_type = genomic DNA
agcagaacgctgcggaccgcggcggaggacgcgcccggcgcccctgagccggccgagcggcgacggaccgcgagaactcctctttcctaaaatggagtcgagtaaaaagatggactctcctggcgcgctgcagactaacccgccgctaaagctgcacactgaccgcagtgctgggacgccagtttttgtccctgaacaaggaggttacaaggaaaagtttgtgaagaccgtggaggacaagtacaagtgtgagaagtgccacctggtgctgtgcagcccgaagcagaccgagtgtgggcaccgcttctgcgagagctgcatggcggccctgctgagctcttcaagtccaaaatgtacagcgtgtcaagagagcatcgttaaagataaggtgtttaaggataattgctgcaagagagaaattctggctcttcagatctattgtcggaatgaaagcagaggttgtgcagagcagttaatgctgggacatctgctggtgcatttaaaaaatgattgccattttgaagaacttccatgtgtgcgtcctgactgcaaagaaaaggtcttgaggaaagacctgcgagaccacgtggagaaggcgtgtaaataccgggaagccacatgcagccactgcaagagtcaggttccgatgatcgcgctgcaggtttccttgttgcagaatgaaagtgtagaaaaaaacaagagcatacaaagtttgcacaatcagatatgtagctttgaaattgaaattgagagacaaaaggaaatgcttcgaaataatgaatccaaaatccttcatttacagcgagtgatagacagccaagcagagaaactgaaggagcttgacaaggagatccggcccttccggcagaactgggaggaagcagacagcatgaagagcagcgtggagtccctccagaaccgcgtgaccgagctggagagcgtggacaagagcgcggggcaagtggctcggaacacaggcctgctggagtcccagctgagccggcatgaccagatgctgagtgtgcacgacatccgcctagccgacatggacctgcgcttccaggtcctggagaccgccagctacaatggagtgctcatctggaagattcgcgactacaagcggcggaagcaggaggccgtcatggggaagaccctgtccctttacagccagcctttctacactggttactttggctataagatgtgtgccagggtctacctgaacggggacgggatggggaaggggacgcacttgtcgctgttttttgtcatcatgcgtggagaatatgatgccctgcttccttggccgtttaagcagaaagtgacactcatgctgatggatcaggggtcctctcgacgtcatttgggagatgcattcaagcccgaccccaacagcagcagcttcaagaagcccactggagagatgaatatcgcctctggctgcccagtctttgtggcccaaactgttctagaaaatgggacatatattaaagatgatacaatttttattaaagtcatagtggatacttcggatctgcccgatccctgataagtagctggggaggtggatttagcagaaggcaactcctctgggggatttgaaccggtctgtcttcactgaggtcctcgcgctcagaaaaggaccttgtgagacggaggaagcggcagaaggcggacgcgtgccggcgggaggagccacgcgtgagcacacctgacacgttttataatagactagccacacttcactctgaagaattatttatccttcaacaagataaatattgct

SEQ ID NO: 4187 - DNA, 7640 bp, Homo sapiens
  source 1..7640: mol_type = genomic DNA
cgagggagcgcggcgcggccgccgcgtgcgcgagccggggttgcagcccagccgggactttccagccggcggcagccgcggcggccgccggctcttccccgccccccgccatggggcagcccggggagcagaacgctgcggaccgcggcggaggacgcgcccggcgcccctgagccggccgagcggcgacggaccgcgagaactcctctttcctaaaatggagtcgagtaaaaagatggactctcctggcgcgctgcagactaacccgccgctaaagctgcacactgaccgcagtgctgggacgccagtttttgtccctgaacaaggaggttacaaggaaaagtttgtgaagaccgtggaggacaagtacaagtgtgagaagtgccacctggtgctgtgcagcccgaagcagaccgagtgtgggcaccgcttctgcgagagctgcatggcggccctgctgagctcttcaagtccaaaatgtacagcgtgtcaagagagcatcgttaaagataaggtgtttaaggataattgctgcaagagagaaattctggctcttcagatctattgtcggaatgaaagcagaggttgtgcagagcagttaatgctgggacatctgctggtgcatttaaaaaatgattgccattttgaagaacttccatgtgtgcgtcctgactgcaaagaaaaggtcttgaggaaagacctgcgagaccacgtggagaaggcgtgtaaataccgggaagccacatgcagccactgcaagagtcaggttccgatgatcgcgctgcagaaacacgaagacaccgactgtccctgcgtggtggtgtcctgccctcacaagtgcagcgtccagactctcctgaggagcgagttgagtgcacacttgtcagagtgtgtcaatgcccccagcacctgtagttttaagcgctatggctgcgtttttcaggggacaaaccagcagatcaaggcccacgaggccagctccgccgtgcagcacgtcaacctgctgaaggagtggagcaactcgctcgaaaagaaggtttccttgttgcagaatgaaagtgtagaaaaaaacaagagcatacaaagtttgcacaatcagatatgtagctttgaaattgaaattgagagacaaaaggaaatgcttcgaaataatgaatccaaaatccttcatttacagcgagtgatagacagccaagcagagaaactgaaggagcttgacaaggagatccggcccttccggcagaactgggaggaagcagacagcatgaagagcagcgtggagtccctccagaaccgcgtgaccgagctggagagcgtggacaagagcgcggggcaagtggctcggaacacaggcctgctggagtcccagctgagccggcatgaccagatgctgagtgtgcacgacatccgcctagccgacatggacctgcgcttccaggtcctggagaccgccagctacaatggagtgctcatctggaagattcgcgactacaagcggcggaagcaggaggccgtcatggggaagaccctgtccctttacagccagcctttctacactggttactttggctataagatgtgtgccagggtctacctgaacggggacgggatggggaaggggacgcacttgtcgctgttttttgtcatcatgcgtggagaatatgatgccctgcttccttggccgtttaagcagaaagtgacactcatgctgatggatcaggggtcctctcgacgtcatttgggagatgcattcaagcccgaccccaacagcagcagcttcaagaagcccactggagagatgaatatcgcctctggctgcccagtctttgtggcccaaactgttctagaaaatgggacatatattaaagatgatacaatttttattaaagtcatagtggatacttcggatctgcccgatccctgataagtagctggggaggtggatttagcagaaggcaactcctctgggggatttgaaccggtctgtcttcactgaggtcctcgcgctcagaaaaggaccttgtgagacggaggaagcggcagaaggcggacgcgtgccggcgggaggagccacgcgtgagcacacctgacacgttttataatagactagccacacttcactctgaagaattatttatccttcaacaagataaatattgctgtcagagaaggttttcattttcatttttaaagatctagttaattaaggtggaaaacatatatgctaaacaaaagaaacatgatttttcttccttaaacttgaacaccaaaaaaacacacacacacacacacgtggggatagctggacatgtcagcatgttaagtaaaaggagaatttatgaaatagtaatgcaattctgatatcttctttctaaaattcaagagtgcaattttgtttcaaatacagtatattgtctatttttaaggcctcatctggtctctgttttaataatttgtttgtcagaagaccctgaagtatatacctaggtcttttttttgaaagtctctaaattcagaatcattttttaatttaaagttctacaaataattgttactgcaaacattttattttaaaacgttgatagactgatatttcttggaagaaaatataaaatatcaaacactggttatcacttgtgataggaaagagaatattcaacctgttgttatttctcgttagaaatgtaaaccttcaaatatctgtcgtagttaatgacacgacttcacaattctgaacggagcctcgctcatggatgctgtgcatcattttcagatttataattgttttcaccctaaaatagggcatccgttgaactttggagttctaaacaaaatcctgtaggtgtttggattctgccccatgtgttcggacgagctctctgttgctgacagcaccggccttcggtctccatgtcaggggtgggcgggtgactgctgagggaggcccgcaggtgtgtttctccatcccgtcatcttgctgcatgccgtcaacggtctccgaaagcaacgttgtgcgtagagctggtggcatacggcccacgtgccttagatgggacatgctgcttctccaccctgggtttgcattgagcatcattctagaaagtgctagtttaaccagacttttctctccaccactagatctttgtctctacaagggccctcagacacctctgcacctgctgaggggaagccaggctccaccgtcggcttctggagcctccgctgcttaattaccacagattccaaatctctaggccccacgagtgagccgcctggtccaagtacggcctggtcccaccctgagggaggcaggtgtggaacagaagccgagcctctccgtgtccccaccggggccgtgggcacccccacagcccgaagcagaaccctctgagcattccagagaccgctgctcgggggcctgcccaggctgaccaacgggcgctcctgaccaccaccctggcgggaagggtggccacggggcccgtcgtcccagcctgtgcctgcccagatggcattttctcaactcactgtttactgtctctcagtgtccaactgtgattagaagcctggagcctgccccctgcaccccttttgctatgcaccacgcttcatggtgctcttaccactgatgggtgctacacgcgacgggtgcttcttaggcaaaaccaatgtgtgcgaactgtcacacctgtgccactcgcccacaagccgcgcccacaattggccagctgggccgtgcacgtcagactgcctgcctcggctctccccgtggccgcgcggggacagcttggtgggtgcccggtggcccacctgtctctggtgctgccatctgtcctgggtgtgccttcgccccagtgcctgctggaagtgccctccgtcgcacccctgtgccctgagctcccgtgaggggcccgccgcgccctttcgcggtcgaagcgttccgttgttcttatctgcctttcctttccccgctctcctgggattactttgggggaatgagtatccttggttctgccctgtgagggagtcgtgtgtccctgctcataaaggaaggacttcctgcagaagctgcggaaaactactgttccctcgaaggtgtcccccacctgaggcctgtcccctacctgccctcaggtagttttcctgaggccaggggttaacaacagggacatccctgcaacttccccttcacaaaatgtataatattagatgaaggatatgcaacatcttggtctagtaagaaccgtttcctcccctctgggttgaagtcctggtgtggcccccagaagcagcagtgcgtgtcactgggacgtctccagtagcccttcccaggcagacgctcctggcgggacgccatggggcccacctgagggtcccacagacgtaacctgagtgacaggagtccttgaggatgggatggcctatgtcacacactttgtccttgaacctgagtgatgggggtccttgaggatgggatggcctgtgtcacgcgctttgtctttgtgtttggttgtatcggggtctctgttctgagtgtgtcttcctctcatgtactcaacacagtgggcagcagcctgggacggcgtcccctctcccggcggcgggcaagccttgcgctgctccaccctcggcctgggcaccctcacttggcgctggccacctgggccagcctggggccatggtctctctgcagctgaggcccagtggccccttgggcagtgatcggccctccccgcatcacagggccctggcagcaagcgggaaatgggggcgcacactgtgtgcttgggggtgctgcttgtttaccacacatgaccagactcccagcaggacagagctgctcagtactttacagaaaccaactgagtcgtttgtgcatgaattaagccggtctgcttccccgtcaccttcgtaacaaaacaacgtcccctctcccctcgcctcgagcagtttcttcaggacaccgtggctcgggctgctccctgctgccaggcacgctggttggctggcctgggcccggctcacgtgaagggcactggctcttgtgaccacactgagccacgtgcaagccgcagccgggcctggaagcctgaccctctggttctagggcttgtcccgcggagcctgcagagctagacgttggggtgtgtccgtgatgatatgggggccaggctgggagtagggcctttctagcagggttgggtggctcagtgagggtgtggaagtgggggacccacggggcctggctttgggactagacatgccagccccagctgggctggagggagcctgagtgagccccgacatacgctgggcctttcagctcgccgtgctctggtgacacacaggcggccaggttgggatttgtgtcaattctaggagccatcaagcatgaatgtggttctgtctcctgagcgcaagcctcgccggacccctgggcgaaggcctggacttgcagatgtgtgttccctgtgcgggtggacagagggggcccttatgacccacattgcagccccattccaccaccccttcctccccagagcagtctctgccgagggacagcacctgtgtcccttcgatgccacaacagccagttgaacaggggagccctttgctcaggcagcttctcctgcctctccctcctttctccttccctgccccatccccgtgcccttcttggcctgtggcgctggggagccatggtgtggcatactggggctcctgctccttgggccacttcctcagcccgggccccacaggcccaccacctgccagggctcccactgcactggctgtggcaggaggcttccccatgaccccgtgtggcccagctcggtgaggatgcagttctaggcacagcccctgggacagccagctgcctcccagaccacgtcagcctgctccagggtcctcagtcaccctgggccaggggccacgtgtcccatggatgtcgaccatgccaacgtcacattccagcaccccttttgcttgatggcgtctggtggtagtcagcatggtggacccacatcctacagccagaggtgatgttggacaaaggaaggggagtctggatgggtccttaaacgaccattctgtccgcagcggggtcattccttgtcagcccaagggagggccggggagtacactgatcccaacagctgggctgacacctcctttctcccctgcacggggaggattggcctgaggaccgtcaccctgtgcacagccccagtagggtggcagtgccactgtctccttgggccgttgcaggattgggcgggtgcagactccccttgcgggccccttgctcaatccccggccctcccagactcctccctctactgggggtaatttgtgtgtcagaagggctctggcagagctgtaaaatactgttttttaaaaattttagtccagatctttacttattagactgcagaaggagagctagggagagtgggggaagcccccttgcttttgtatctgtgaggtgaatgagggtctgtcacccaaatctacttctcagcccatgaccatagttctgttttccgtttgcaaatctcagtagctctgttttctccaaagtagaatgtgcgcaccggggtcctagccaggcgaggtcagtgtcggcaggctacctggtcattattgctgcctcgtccaggctgatgctgatggtcacaggcacggtggcatcagggagccgggccagcaggcggcgtgaggcggggccagcagctcactgcaagggcattttccacctgatcctggtgtgccccacatgcggtggcagggcagacgtgtgaagcctcggccgtctcggggctggcaggtgtgcgggtgaggaggccccggtggccaagcagagcctgcgtttcatttctcctgctgcactgtgtctagtctgtcttgtgaactctcaccgtgaaaagaggctagaagtccaggatcgctgtaccgctcctgtaattaggtgatgactggatttgacaacttagtcccctcagacaagtaagataccctccaacagcaaattcaatgacttaattggaaaacacacaagctggcatgatgtccggtgatttctgtaagaaatgcctgtaggagaaggtctgtgaagtgtggagggcagtgtcgacgctgcacagcatctgcagattcgcagcctcttctctgccggtgcctctgttcggttctgttacccaaaaacaaagaccaaagaaggccaatctctcatttgaccctgtctttttaatctgcctgttttaaaagttgcgtctgtagtagccgcttgctgtgaagacacatcttgacagtccaagtgattttgtgaccagtgatttgggtcctgttttccgctcttctaagaaaaaacaaaaagaccgtgagttattgcccagcaataatcatgttgttactgtgagttagcaacatgcctgacttcctgatagcattactgttttctagttttgtttattgtatattatgtgtggttttatttggtatttatttgtgttttgaggtcttgcaatgtttttgtgtttctgatgctaataactaaagtttgtaagactgtagaatgcaaaactcggagatgctaaactgtcttattagaggaaaataaatctgattatggagtctca

SEQ ID NO: 4188 - DNA, 701 bp, Homo sapiens
  source 1..701: mol_type = genomic DNA
ccgcggcggaggacgcgcccggcgcccctgagccggccgagcggcgacggaccgcgagatggcgtctcgctctgtcacccaggctggagtgcagtggcgcgatccctgcttactgcagcttctgcctcccaggttcgagagattctcctgcctcagcctcccaagtagctgggactacagcagctgacatctgtgaagcctcagtgatcctataaattgaggaacctgagagaatcaagagaaagacaacaattcttgctgatatgaggaaaatgaggcccaaagaagtgatgccacttggttaaggtcccagagcaggtcagaatcagacctaggatcagaaacctggctcctggctcctggctccctactcttctaaggatcgctgtcctgacagaagagaactcctctttcctaaaatggagtcgagtaaaaagatggactctcctggcgcgctgcagactaacccgccgctaaagctgcacactgaccgcagtgctgggacgccagtttttgtccctgaacaaggaggttacaaggaaaagtttgtgaagaccgtggaggacaagtacaagtgtgagaagtgccacctggtgctgtgcagcccgaagcagaccgagtgtgggcaccgcttctgcgagagctgcatggcggccctgctgagctcttcaagtccaaaatgtacagcgtgtcaagagagc

SEQ ID NO: 4189 - DNA, 1465 bp, Homo sapiens
  source 1..1465: mol_type = genomic DNA
gagcggagcctggcgggcgtgggaacccaggccccgccgaggcggccaggaggtgagatggcagctgggcaaaatgggcacgaagagtgggtgggcagcgcatacctgtttgtggagtcctcgctggacaaggtggtcctgtcggatgcctacgcgcacccccagcagaaggtggcagtgtacagggctctgcaggctgccttggcagagagcggcgggagcccggacgtgctgcagatgctgaagatccaccgcagcgacccgcagctgatcgtgcagctgcgattctgcgggcggcagccctgtggccgcttcctccgcgcctaccgcgagggggcgctgcgcgccgcgctgcagaggagcctggcggccgcgctcgcccagcactcggtgccgctgcaactggagctgcgcgccggcgccgagcggctggacgctttgctggcggacgaggagcgctgtttgagttgcatcctagcccagcagcccgaccggctccgggatgaagaactggctgagctggaggatgcgctgcgaaatctgaagtgcggctcgggggcccggggtggcgacggggaggtcgcttcggcccccttgcagcccccggtgccctctctgtcggaggtgaagccgccgccgccgccgccacctgcccagacttttctgttccagggtcagcctgtagtgaatcggccgctgagcctgaaggaccaacagacgttcgcgcgctctgtgggtctcaaatggcgcaaggtggggcgctcactgcagcgaggctgccgggcgctgcgggacccggcgctggactcgctggcctacgagtacgagcgcgagggactgtacgagcaggccttccagctgctgcggcgcttcgtgcaggccgagggccgccgcgccacgctgcagcgcctggtggaggcactcgaggagaacgagctcaccagcctggcagaggacttgctgggcctgaccgatcccaatggcggcctggcctagaccaggggtgcagccagcttttggagaacctggatggccttagggttccttctgcggctattgctgaacccctgtccatccacgggaccctgaaactccacttggcctatctgctggacctgctggggcagagttgattgccttccccaggagccagaccactgggggtgcatcattggggattctgcctcaggtactttgatagagtgtggggtgggggggacctgctttggagatcagcctcaccttctcccatcccagaagcggggcttacagccagcccttacagtttcactcatgaagcaccttgatctttggtgtcctggacttcatcctgggtgctgcagatactgcagtgaagtaaaacaggaatcaatcttgcctgcccccagctcacactcagcgtgggaccccgaatgttaagcaatgataataaagtataacacggattttgatgtgagaaatacaa

SEQ ID NO: 4190 - DNA, 3617 bp, Homo sapiens
  source 1..3617: mol_type = genomic DNA
gctgactgtggcggcggcggcctcgaggtgacaactgtctccgtcgcaggctccggcgggggcgcaggaggtcgcccggcgcgtcactgtcgggtcggcgagccacgggggccgccgcagcaccatggcgaccaccgtcagcactcagcgcgggccggtgtacatcggtgagctcccgcaggacttcctccgcatcacgcccacacagcagcagcggcaggtccagctggacgcccaggcggcccagcagctgcagtacggaggcgcagtgggcaccgtgggccgactgaacatcacggtggtacaggcaaagttggccaagaattacggcatgacccgcatggacccctactgccgactgcgcctgggctacgcggtgtacgagacgcccacggcacacaatggcgccaagaatccccgctggaataaggtcatccactgcacggtgcccccaggcgtggactctttctatctcgagatcttcgatgagagagccttctccatggacgaccgcattgcctggacccacatcaccatcccggagtccctgaggcagggcaaggtggaggacaagtggtacagcctgagcgggaggcagggggacgacaaggagggcatgatcaacctcgtcatgtcctacgcgctgcttccagctgccatggtgatgccaccccagcccgtggtcctgatgccaacagtgtaccagcagggcgttggctatgtgcccatcacagggatgcccgctgtctgtagccccggcatggtgcccgtggccctgcccccggccgccgtgaacgcccagccccgctgtagcgaggaggacctgaaagccatccaggacatgttccccaacatggaccaggaggtgatccgctccgtgctggaagcccagcgagggaacaaggatgccgccatcaactccctgctgcagatgggggaggagccatagagcctctgcctcgatgccgttttgcccccgctctttggacacgccgacccggcgctccccaaggaatgctgtcccaacaagattcccgtgaaagagcacccgtgtcgccccctcccgtggacttctgtgccgccccgtccacacctgttcttgggtgcatgtgggttttcggttcctggcggtccaggacggggcgggggctcccctcccatctcgtgctgggaggtctcagcgcgctctcctgtccctgggacgtgcgtctctccttctcatgccgttctggaaaatgctcttgctgtagagagcagctgcttctgccagggtgttggaggtggtggagcgccttccgattccattcatggcattttgtgatgtgatgtaattggaatagagctgttgatttaaggcacacacaatccctcacactgtgggttttttttagaacttcccagacgaaaactcacgcccttgccctaacgcgctttgctgtgagcctggcccctgcccagggcttgggtctggtgagctgagcagcttcctgtggatggtgtggggccggcctctggcctggctcacctggccactgtccagccagccttgtgacagactccggcctgaaggcagaatgaacccacacctggagtgaggaagggggcctggcacggttggccaggctctgcctgattgccagccagcgggcatctgaagccgggtccttcgcccgccggaggctgccgtccgtctctcctgctgcgctcgtgccagctccgtgggtgtcctcccagggagcttctcttctcaacaggccttgcgaggctggggtgagaggtgatagaggcagcactgtgcatgattccgagagggtgtggtggcactgccagccgactgctgacagcttgggagctgctgtgcccaggacgtgggttcagcgtgggcgaggaaagcctggcgagcgtggccctgtaaaagctttctgaggcgggaggcgctcacttacctctgactgcctgggcgctgcgtgtagcatcttggcctacaggacagattttaggtgacacctggttatgacagtcagaaatttgagaagcttctcacaagtgatgcactttaaataatctgcatgccattgagacacctgcatgtctggtgtttgtggttcaagtgtcttgccgccggccttcggatgtaaacccactgataacggacagaaagagaatgcccacaagtgggtcttctgtggaagatgcagaaggaggaagttagtgcttacattttagtctttttctccctcaaaaaaataggttaagtttcagtgccagctagaaaatactgctttctgccatcgattgggggtggtttttgtcaaatatactgttgataaatatttatttttgtaaacttgaagtgtgtggtggccgtgggggagggacatgctggcagcaggcgccttcttcagctgtgggtcctaaaggcctttgatcctttgaagaagaaagacatggtatttgttcagcagacgccgaccactcagacggaggggcccctgggattccctgtctcagatggcctggtcttacgcctgtgtagatttcttctccattgggaatgaaggtgtcaggcgggactggaacgttctagatggtatgttccgtgatattaacaactctaacccaggacagaccacaagccacactcagaggcctcactgtgctgggggcttcggtgtccaggcgcccaggtgtggccaccagcaccggtttctgccttcgcgttgctggggtgcagtgagactgccacacgcgtgcacatgtggctctgtgggtgtctcctagagaggacgtggcccctgctgccagcccttgagcagcccgtgtgggggcccgagggacccacacagtgggggccagcctcgctggagggagagcaaccctttgccgatgaccacgcttgccgccatctcttagttttctttttcacaagcgctttatttttttaatagacaaatcacattttgcaaggcctttaattaaataagattcttctttccttcattttatgctttatttcctgtttgaaggcttactgtagaagtggcttactgtagaagcagcttgctgagcccctccgagcggtccccagaattagctggttcacaacccccaccctcccccgcccccgcctgtgtcaggtgtggatgaggtcgtcacactcagaaggacaggcttgtctgccagctcacaaggggaggctgcagtgggtttgggagctgggtttaggcccctggtgtctgagggcccaggccttgccagcctctgctgctcctgctcctgggtttgaagatgcaggccgatcgccagctccgtggcagcggtcactaaggacagcctgactgtgccatcttggagcctcaggcggggctccggagatagaagacaggtcgccggaggctccccctcctctcctctcccctctgcagatgctccctgggcgctaccctgcagggtgccaggcaggagtggtctcagaacgtgcgcttctgattattttactggggtccattgtccagatttttctttgattgtaaaatatatttttactttttagtcttctaatttaataaatgatccatataaaaatagagaaataaagtcctttaagggaaggttta

SEQ ID NO: 4191 - DNA, 1090 bp, Homo sapiens
  source 1..1090: mol_type = genomic DNA
gctgactgtggcggcggcggcctcgaggtgacaactgtctccgtcgcaggctccggcgggggcgcaggaggtcgcccggcgcgtcactgtcgggtcggcgagccacgggggccgccgcagcaccatggcgaccaccgtcagcactcagcgcgggccggtgtacatcggtgagctcccgcaggacttcctccgcatcacgcccacacagcagcagcggcaggtccagctggacgcccaggcggcccagcagctgcagtacggaggcgcagtgggcaccgtgggccgactgaacatcacggtggtacaggcaaagttggccaagaattacggcatgacccgcatggacccctactgccgactgcgcctgggctacgcggtgtacgagacgcccacggcacacaatggcgccaagaatccccgctggaataaggtcatccactgcacggtgcccccaggcgtggactctttctatctcgagatcttcgatgagagagccttctccatggacgaccgcattgcctggacccacatcaccatcccggagtccctgaggcagggcaaggtggaggacaagtggtacagcctgagcgggaggcagggggacgacaaggagggcatgatcaacctcgtcatgtcctacgcgctgcttccagctgccatggtgatgccaccccagcccgtggtcctgatgccaacagtgtaccagcagggcgttggctatgtgcccatcacagggatgcccgctgtctgtagccccggcatggtgcccgtggccctgcccccggccgccgtgaacgcccagccccgctgtagcgaggaggacctgaaagccatccaggacatgttccccaacatggaccaggaggtgatccgctccgtgctggaagcccagcgagggaacaaggatgccgccatcccctcccatctcgtgctgggaggtctcagcgcgctctcctgtccctgggacgtgcgtctctccttctcatgccgttctggaaaatgctcttgctgtagagagcagctgcttctgccagggtgttggaggtggtggagcgccttccgattccattcatggcattttgtgatgtga

SEQ ID NO: 4192 - DNA, 2183 bp, Homo sapiens
  source 1..2183: mol_type = genomic DNA
agctgactgtggcggcggcggcctcgaggtgacaactgtctccgtcgcaggctccggcgggggcgcaggaggtcgcccggcgcgtcactgtcgggtcggcgagccacgggggccgccgcagcaccatggcgaccaccgtcagcactcagcgcgggccggcaaagttggccaagaattacggcatgacccgcatggacccctactgccgactgcgcctgggctacgcggtgtacgagacgcccacggcacacaatggcgccaagaatccccgctggaataaggtcatccactgcacggtgcccccaggcgtggactctttctatctcgagatcttcgatgagagagccttctccatggacgaccgcattgcctggacccacatcaccatcccggagtccctgaggcagggcaaggtggaggacaagtggtacagcctgagcgggaggcagggggacgacaaggagggcatgatcaacctcgtcatgtcctacgcgctgcttccagctgccatggtgatgccaccccagcccgtggtcctgatgccaacagtgtaccagcagggcgttggctatgtgcccatcacagggatgcccgctgtctgtagccccggcatggtgcccgtggccctgcccccggccgccgtgaacgcccagccccgctgtagcgaggaggacctgaaagccatccaggacatgttccccaacatggaccaggaggtgatccgctccgtgctggaagcccagcgagggaacaaggatgccgccatcaactccctgctgcagatgggggaggagccatagagcctctgcctcgatgccgttttgcccccgctctttggacacgccgacccggcgctccccaaggaatgctgtcccaacaagattcccgtgaaagagcacccgtgtcgccccctcccgtggacttctgtgccgccccgtccacacctgttcttgggtgcatgtgggttttcggttcctggcggtccaggacggggcgggggctcccctcccatctcgtgctgggaggtctcagcgcgctctcctgtccctgggacgtgcgtctctccttctcatgccgttctggaaaatgctcttgctgtagagagcagctgcttctgccagggtgttggaggtggtggagcgccttccgattccattcatggcattttgtgatgtgatgtaattggaatagagctgttgatttaaggcacacacaatccctcacactgtgggttttttttagaacttcccagacgaaaactcacgcccttgccctaacgcgctttgctgtgagcctggcccctgcccagggcttgggtctggtgagctgagcagcttcctgtggatggtgtggggccggcctctggcctggctcacctggccactgtccagccagccttgtgacagactccggcctgaaggcagaatgaacccacacctggagtgaggaagggggcctggcacggttggccaggctctgcctgattgccagccagcgggcatctgaagccgggtccttcgcccgccggaggctgccgtccgtctctcctgctgcgctcgtgccagctccgtgggtgtcctcccagggagcttctcttctcaacaggccttgcgaggctggggtgagaggtgatagaggcagcactgtgcatgattccgagagggtgtggtggcactgccagccgactgctgacagcttgggagctgctgtgcccaggacgtgggttcagcgtgggcgaggaaagcctggcgagcgtggccctgtaaaagctttctgaggcgggaggcgctcacttacctctgactgcctgggcgctgcgtgtagcatcttggcctacaggacagattttaggtgacacctggttatgacagtcagaaatttgagaagcttctcacaagtgatgcactttaaataatctgcatgccattgagacacctgcatgtctggtgtttgtggttcaagtgtcttgccgccggccttcggatgtaaacccactgataacggacagaaagagaatgcccacaagtgggtcttctgtggaagatgcagaaggaggaagttagtgcttacattttagtctttttctccctcaaaaaaataggttaagtttcagtgccagctagaaaatactgctttctgccatcgattgggggtggtttttgtcaaatatactgttgataaat

SEQ ID NO: 4193 - DNA, 1204 bp, Homo sapiens
  source 1..1204: mol_type = genomic DNA
gcgctgctcttccccgcggagcccgcgcagtccgcgcagccctcatcgcaactgggcccgcgcgcagatccaccaaagagaaagcagccctgtgccagttgctctgccagcctttcacaggagaagtgtcactagaatactacagcccccacaggctctgctccacagaaacttaaggctgaaagagtgtccgccatcagggacatcctctgtcactacggccttacataggaagtccttctaaagagctgcctgccagctgcccttccccagatcccgaatatcctcctggccaggtggagcagagaacagttcctcagctggtcatgctgagctcataccctgatggctgctccatgaggtcaagactgggtctcctccctcctcccccttcaccaatgcctggtctcacggggctagttttgacccccacgctatggcatcatcgacctccctcccagctcctggctctcggcctaagaagcctctaggcaagatggctgactggttcaggcagaccctgctgaagaagcccaagaagaggcccaactccccagaaagcacctccagcgatgcttcacagcctacctcacaggacagcccactacccccaagcctcagctcagtcacgtctcccagcctgccacccacacatgcgagtgacagtggcagtagtcgctggagcaaagactatgacgtctgcgtgtgccacagtgaggaagacctggtggccgcccaggacctggtctcctacttggaaggcagcactgccagcctgcgctgcttcctgcaactccgggatgcaaccccaggcggcgctatagtgtccgagctgtgccaggcactgagcagtagtcactgccgggtgctgctcatcacgccgggcttccttcaggacccctggtgcaagtaccagatgctgcaggccctgaccgaggctccaggggccgagggctgcaccatccccctgctgtcgggcctcagcagagctgcctacccacctgagctccgattcatgtactacgtcgatggcaggggccctgatggtggctttcgtcaagtcaaagaagctgtcatgcgttcaaatcaggtcctcaaacacttgttatatcatgggaccccggaaattggagtgaagctagaaacagaaaacccatgcagggcctcggattcccacaaatgtgacaagaggtatagggagtga

SEQ ID NO: 4194 - DNA, 1264 bp, Homo sapiens
  source 1..1264: mol_type = genomic DNA
cgcgcagtccgcgcagccctcatcgcaactgggcccgcgcgcagatccaccaaagagaaagcagccctgtgccagttgctctgccagcctttcacaggagaagtgtcactagaatactacagcccccacaggctctgctccacagaaacttaaggctgaaagagtgtccgccatcagggacatcctctgtcactacggtgggaaaagaacatggccttacataggaagtccttctaaagagctgcctgccagctgcccttccccagatcccgaatatcctcctggccaggtggagcagagaacagttcctcagctggtcatgctgagctcataccctgatggctgctccatgaggtcaagactgggtctcctccctcctcccccttcaccaatgcctggtctcacggggctagttttgacccccacgctatggcatcatcgacctccctcccagctcctggctctcggcctaagaagcctctaggcaagatggctgactggttcaggcagaccctgctgaagaagcccaagaagaggcccaactccccagaaagcacctccagcgatgcttcacagcctacctcacaggacagcccactacccccaagcctcagctcagtcacgtctcccagcctgccacccacacatgcgagtgacagtggcagtagtcgctggagcaaagactatgacgtctgcgtgtgccacagtgaggaagacctggtggccgcccaggacctggtctcctacttggaaggcagcactgccagcctgcgctgcttcctgcaactccgggatgcaaccccaggcggcgctatagtgtccgagctgtgccaggcactgagcagtagtcactgccgggtgctgctcatcacgccgggcttccttcaggacccctggtgcaagtaccagatgctgcaggccctgaccgaggctccaggggccgagggctgcaccatccccctgctgtcgggcctcagcagagctgcctacccacctgagctccgattcatgtactacgtcgatggcaggggccctgatggtggctttcgtcaagtcaaagaagctgtcatgcgttgtaagctactacaggagggagaaggggaacgggattcagctacagtatctgatctactttgacttttaggagacagccctgtagcctagtagttcaaagcgcagcttctggaaaaggctgtcggggtttgtatcctggctcctgcacttattaacccataaaaagtaacttggccaagttactcacccg

SEQ ID NO: 4195 - DNA, 2195 bp, Homo sapiens
  source 1..2195: mol_type = genomic DNA
gcgctgctcttccccgcggagcccgcgcagtccgcgcagccctcatcgcaactgggcccgcgcgcaggccttacataggaagtccttctaaagagctgcctgccagctgcccttccccagatcccgaatatcctcctggccaggtggagcagagaacagttcctcagctggtcatgctgagctcataccctgatggctgctccatgaggtcaagactgggtctcctccctcctcccccttcaccaatgcctggtctcacggggctagttttgacccccacgctatggcatcatcgacctccctcccagctcctggctctcggcctaagaagcctctaggcaagatggctgactggttcaggcagaccctgctgaagaagcccaagaagaggcccaactccccagaaagcacctccagcgatgcttcacagcctacctcacaggacagcccactacccccaagcctcagctcagtcacgtctcccagcctgccacccacacatgcgagtgacagtggcagtagtcgctggagcaaagactatgacgtctgcgtgtgccacagtgaggaagacctggtggccgcccaggacctggtctcctacttggaaggcagcactgccagcctgcgctgcttcctgcaactccgggatgcaaccccaggcggcgctatagtgtccgagctgtgccaggcactgagcagtagtcactgccgggtgctgctcatcacgccgggcttccttcaggacccctggtgcaagtaccagatgctgcaggccctgaccgaggctccaggggccgagggctgcaccatccccctgctgtcgggcctcagcagagctgcctacccacctgagctccgattcatgtactacgtcgatggcaggggccctgatggtggctttcgtcaagtcaaagaagctgtcatgcgttatctgcagacactcagttgacacttgttatatcatgggaccccggaaattggagtgaagctagaaacagaaaacccatgcagggcctcggattcccacaaatgtgacaagaggtatagggagtgagtcacagcgctttgctcgtgaccctgggatcagagcacccatcaggcttccattactgtgggctccctaagaagaccatggagagcttggggactcccccaggaaggccgtgaagctggggattccccctaggaaagccatgaggaagctggggactccccaagaaggccatgaggaagccagaaattggaggtggtaggaagtggtactgatcaatgatggccagcaggactcatctcctgcctaactggacaggaagcctggcacccacttctgtcttcccctggaactgggcactggcgtacactggtatccctcctaaagaagtgactcacctgactgatcagcaagaagcctagattgcaggcctcaccatggatggtcttcctagttgcctggggaaaccctggaatgggcatcaggagaaagcaacaagaatccagtccttcacactcacactactctgttcctcttcccagagacatcgattcacttcaaagagctgtagggaagatgcagtcagcactgcactgtattttttatttattgcctaggtgccattaaagacacaaacctagaagcctagaggccattctgaatatgggggtggggtggtggagggagcaagtgaagagatgggaatccagggctcagggttcaatgccttcacctgagatcacaagcccatggatgctgtgacatctgggagcttcatcagtggtctggctaaagctgatactttcacagtcaccatcttcacctttggactgggaagaatcaccatttttcttctggcagatgactgtattccttataggacaggcaaggtttcattcatctgttctcagtaagtttgttgttgaactgaaatgaatttcattatttcctccaatgtgtacttttgtgcccccctctcacttctccctatcatgacccctcttttgctgaaaaaaatttttattattttttctatctctagttctagaaagagaaaatttattttttaaattataaactattttgccaggcgccatggctcacacctgtaatctcagcactttgggaggccgaggcaggtggatcacctgaggtcaggagttcaagactagcctggccaatatggtgaaaccctgtctctact

SEQ ID NO: 4196 - DNA, 2068 bp, Homo sapiens
  source 1..2068: mol_type = genomic DNA
ccgcgcagccctcatcgcaactgggcccgcgcgcagatccaccaaagagaaagcagccctgtgccagttgctctgccagcctttcacaggagaagtgtcactagaatactacagcccccacaggctctgctccacagaaacttaaggctgaaagagtgtccgccatcagggacatcctctgtcactacggccttacataggaagtccttctaaagagctgcctgccagctgcccttccccagatcccgaatatcctcctggccaggtggagcagagaacagttcctcagctggtcatgctgagctcataccctgatggctgctccatgaggtcaagactgggtctcctccctcctcccccttcaccaatgcctggtctcacggggctagttttgacccccacgctatggcatcatcgacctccctcccagctcctggctctcggcctaagaagcctctaggcaagatggctgactggttcaggcagaccctgctgaagaagcccaagaagaggcccaactccccagaaagcacctccagcgatgcttcacagcctacctcacaggacagcccactacccccaagcctcagctcagtcacgtctcccagcctgccacccacacatgcgagtgacagtggcagtagtcgctggagcaaagactatgacgtctgcgtgtgccacagtgaggaagacctggtggccgcccaggacctggtctcctacttggaaggcagcactgccagcctgcgctgcttcctgcaactccgggatgcaaccccaggcggcgctatagtgtccgagctgtgccaggcactgagcagtagtcactgccgggtgctgctcatcacgccgggcttccttcaggacccctggtgcaagtaccagatgctgcaggccctgaccgaggctccaggggccgagggctgcaccatccccctgctgtcgggcctcagcagagctgcctacccacctgagctccgattcatgtactacgtcgatggcaggggccctgatggtggctttcgtcaagtcaaagaagctgtcatgcgttatctgcagacactcagttgacacttgttatatcatgggaccccggaaattggagtgaagctagaaacagaaaacccatgcagggcctcggattcccacaaatgtgacaagaggtatagggagtgagtcacagcgctttgctcgtgaccctgggatcagagcacccatcaggcttccattactgtgggctccctaagaagaccatggagagcttggggactcccccaggaaggccgtgaagctggggattccccctaggaaagccatgaggaagctggggactccccaagaaggccatgaggaagccagaaattggaggtggtaggaagtggtactgatcaatgatggccagcaggactcatctcctgcctaactggacaggaagcctggcacccacttctgtcttcccctggaactgggcactggcgtacactggtatccctcctaaagaagtgactcacctgactgatcagcaagaagcctagattgcaggcctcaccatggatggtcttcctagttgcctggggaaaccctggaatgggcatcaggagaaagcaacaagaatccagtccttcacactcacactactctgttcctcttcccagagacatcgattcacttcaaagagctgtagggaagatgcagtcagcactgcactgtattttttatttattgcctaggtgccattaaagacacaaacctagaagcctagaggccattctgaatatgggggtggggtggtggagggagcaagtgaagagatgggaatccagggctcagggttcaatgccttcacctgagatcacaagcccatggatgctgtgacatctgggagcttcatcagtggtctggctaaagctgatactttcacagtcaccatcttcacctttggactgggaagaatcaccatttttcttctggcagatgactgtattccttataggacaggcaaggtttcattcatctgttctcagtaagtttgttgttgaactgaaatgaatttcattatttcctccaa

SEQ ID NO: 4197 - DNA, 2245 bp, Homo sapiens
  source 1..2245: mol_type = genomic DNA
aatgcctggtctcacggggctagttttgacccccacgctatggcatcatcgacctccctcccagctcctggctctcggcctaagaagcctctaggcaagatggctgactggttcaggcagaccctgctgaagaagcccaagaagaggcccaactccccagaaagcacctccagcgatgcttcacagcctacctcacaggacagcccactacccccaagcctcagctcagtcacgtctcccagcctgccacccacacatgcgagtgacagtggcagtagtcgctggagcaaagactatgacgtctgcgtgtgccacagtgaggaagacctggtggccgcccaggacctggtctcctacttggaaggcagcactgccagcctgcgctgcttcctgcaactccgggatgcaaccccaggcggcgctatagtgtccgagctgtgccaggcactgagcagtagtcactgccgggtgctgctcatcacgccgggcttccttcaggacccctggtgcaagtaccagatgctgcaggccctgaccgaggctccaggggccgagggctgcaccatccccctgctgtcgggcctcagcagagctgcctacccacctgagctccgattcatgtactacgtcgatggcaggggccctgatggtggctttcgtcaagtcaaagaagctgtcatgcgttatctgcagacactcagttgacacttgttatatcatgggaccccggaaattggagtgaagctagaaacagaaaacccatgcagggcctcggattcccacaaatgtgacaagaggtatagggagtgagtcacagcgctttgctcgtgaccctgggatcagagcacccatcaggcttccattactgtgggctccctaagaagaccatggagagcttggggactcccccaggaaggccgtgaagctggggattccccctaggaaagccatgaggaagctggggactccccaagaaggccatgaggaagccagaaattggaggtggtaggaagtggtactgatcaatgatggccagcaggactcatctcctgcctaactggacaggaagcctggcacccacttctgtcttcccctggaactgggcactggcgtacactggtatccctcctaaagaagtgactcacctgactgatcagcaagaagcctagattgcaggcctcaccatggatggtcttcctagttgcctggggaaaccctggaatgggcatcaggagaaagcaacaagaatccagtccttcacactcacactactctgttcctcttcccagagacatcgattcacttcaaagagctgtagggaagatgcagtcagcactgcactgtattttttatttattgcctaggtgccattaaagacacaaacctagaagcctagaggccattctgaatatgggggtggggtggtggagggagcaagtgaagagatgggaatccagggctcagggttcaatgccttcacctgagatcacaagcccatggatgctgtgacatctgggagcttcatcagtggtctggctaaagctgatactttcacagtcaccatcttcacctttggactgggaagaatcaccatttttcttctggcagatgactgtattccttataggacaggcaaggtttcattcatctgttctcatcttgctctgtcgcccaggctggagtgcagtggcgcaaccttggctcactgcaacctttgcctcccaggttcaagcgattctcctgcctcagcctcccaagtagctgggactacaggtgcgtgtcaccacacccagataattttttgtatttttagtagcgatagggtttcaccgtgttagccaggagggtctcgatctcctgacctcatgatccacccacctcgggctcccaaagtgctggaattacaggcatgagccactgcacccagcctttttttaattattatttgaagaatttaagattggaattaattgctccttgaatgtttggtagactcatctgtaataccatttgagcctagaatattctggtttttttgagacggagtcttgccctattgcccaggccggagtgcagtgggattacacgcgtgagccaccatgcctggccagaatattctttattgtaaaatttaaagctgtaatttcaatgtcttgaagagttatagatctaattagattttccatttctcctggagtcaatttggtacaaacagtcaataaagactacaagaccagtttaagta

SEQ ID NO: 4198 - DNA, 4844 bp, Homo sapiens
  source 1..4844: mol_type = genomic DNA
aagacaccagtgcctcagaaactgctcggtcagacggtgatagcgagccacgcattcacagggccactgctgctcacagaagcagtgaggatgatgccaggatgatgtctgcctcgcgcctggctgggactctgatcccagccatggccttcctctcctgcgtgagaccagaaagctgggagccctgcgtggaggtggttcctaatattacttatcaatgcatggagctgaatttctacaaaatccccgacaacctccccttctcaaccaagaacctggacctgagctttaatcccctgaggcatttaggcagctatagcttcttcagtttcccagaactgcaggtgctggatttatccaggtgtgaaatccagacaattgaagatggggcatatcagagcctaagccacctctctaccttaatattgacaggaaaccccatccagagtttagccctgggagccttttctggactatcaagtttacagaagctggtggctgtggagacaaatctagcatctctagagaacttccccattggacatctcaaaactttgaaagaacttaatgtggctcacaatcttatccaatctttcaaattacctgagtatttttctaatctgaccaatctagagcacttggacctttccagcaacaagattcaaagtatttattgcacagacttgcgggttctacatcaaatgcccctactcaatctctctttagacctgtccctgaaccctatgaactttatccaaccaggtgcatttaaagaaattaggcttcataagctgactttaagaaataattttgatagtttaaatgtaatgaaaacttgtattcaaggtctggctggtttagaagtccatcgtttggttctgggagaatttagaaatgaaggaaacttggaaaagtttgacaaatctgctctagagggcctgtgcaatttgaccattgaagaattccgattagcatacttagactactacctcgatgatattattgacttatttaattgtttgacaaatgtttcttcattttccctggtgagtgtgactattgaaagggtaaaagacttttcttataatttcggatggcaacatttagaattagttaactgtaaatttggacagtttcccacattgaaactcaaatctctcaaaaggcttactttcacttccaacaaaggtgggaatgctttttcagaagttgatctaccaagccttgagtttctagatctcagtagaaatggcttgagtttcaaaggttgctgttctcaaagtgattttgggacaaccagcctaaagtatttagatctgagcttcaatggtgttattaccatgagttcaaacttcttgggcttagaacaactagaacatctggatttccagcattccaatttgaaacaaatgagtgagttttcagtattcctatcactcagaaacctcatttaccttgacatttctcatactcacaccagagttgctttcaatggcatcttcaatggcttgtccagtctcgaagtcttgaaaatggctggcaattctttccaggaaaacttccttccagatatcttcacagagctgagaaacttgaccttcctggacctctctcagtgtcaactggagcagttgtctccaacagcatttaactcactctccagtcttcaggtactaaatatgagccacaacaacttcttttcattggatacgtttccttataagtgtctgaactccctccaggttcttgattacagtctcaatcacataatgacttccaaaaaacaggaactacagcattttccaagtagtctagctttcttaaatcttactcagaatgactttgcttgtacttgtgaacaccagagtttcctgcaatggatcaaggaccagaggcagctcttggtggaagttgaacgaatggaatgtgcaacaccttcagataagcagggcatgcctgtgctgagtttgaatatcacctgtcagatgaataagaccatcattggtgtgtcggtcctcagtgtgcttgtagtatctgttgtagcagttctggtctataagttctattttcacctgatgcttcttgctggctgcataaagtatggtagaggtgaaaacatctatgatgcctttgttatctactcaagccaggatgaggactgggtaaggaatgagctagtaaagaatttagaagaaggggtgcctccatttcagctctgccttcactacagagactttattcccggtgtggccattgctgccaacatcatccatgaaggtttccataaaagccgaaaggtgattgttgtggtgtcccagcacttcatccagagccgctggtgtatctttgaatatgagattgctcagacctggcagtttctgagcagtcgtgctggtatcatcttcattgtcctgcagaaggtggagaagaccctgctcaggcagcaggtggagctgtaccgccttctcagcaggaacacttacctggagtgggaggacagtgtcctggggcggcacatcttctggagacgactcagaaaagccctgctggatggtaaatcatggaatccagaaggaacagtgggtacaggatgcaattggcaggaagcaacatctatctgaagaggaaaaataaaaacctcctgaggcatttcttgcccagctgggtccaacacttgttcagttaataagtattaaatgctgccacatgtcaggccttatgctaagggtgagtaattccatggtgcactagatatgcagggctgctaatctcaaggagcttccagtgcagagggaataaatgctagactaaaatacagagtcttccaggtgggcatttcaaccaactcagtcaaggaacccatgacaaagaaagtcatttcaactcttacctcatcaagttgaataaagacagagaaaacagaaagagacattgttcttttcctgagtcttttgaatggaaattgtattatgttatagccatcataaaaccattttggtagttttgactgaactgggtgttcactttttcctttttgattgaatacaatttaaattctacttgatgactgcagtcgtcaaggggctcctgatgcaagatgccccttccattttaagtctgtctccttacagaggttaaagtctagtggctaattcctaaggaaacctgattaacacatgctcacaaccatcctggtcattctcgagcatgttctattttttaactaatcacccctgatatatttttatttttatatatccagttttcatttttttacgtcttgcctataagctaatatcataaataaggttgtttaagacgtgcttcaaatatccatattaaccactatttttcaaggaagtatggaaaagtacactctgtcactttgtcactcgatgtcattccaaagttattgcctactaagtaatgactgtcatgaaagcagcattgaaataatttgtttaaagggggcactcttttaaacgggaagaaaatttccgcttcctggtcttatcatggacaatttgggctagaggcaggaaggaagtgggatgacctcaggaggtcaccttttcttgattccagaaacatatgggctgataaacccggggtgacctcatgaaatgagttgcagcagaagtttatttttttcagaacaagtgatgtttgatggacctctgaatctctttagggagacacagatggctgggatccctcccctgtacccttctcactgccaggagaactacgtgtgaaggtattcaaggcagggagtatacattgctgtttcctgttgggcaatgctccttgaccacattttgggaagagtggatgttatcattgagaaaacaatgtgtctggaattaatggggttcttataaagaaggttcccagaaaagaatgttcatccagcctcctcagaaacagaacattcaagaaaaggacaatcaggatgtcatcagggaaatgaaaataaaaaccacaatgagatatcaccttataccaggtagaatggctactataaaaaaatgaagtgtcatcaaggatatagagaaattggaacccttcttcactgctggagggaatggaaaatggtgtagccgttatgaaaaacagtacggaggtttctcaaaaattaaaaatagaactgctatatgatccagcaatctcacttctgtatatatacccaaaataattgaaatcagaatttcaagaaaatatttacactcccatgttcattgtggcactcttcacaatcactgtttccaaagttatggaaacaacccaaatttccattgaaaaataaatggacaaagaaaatgtgcatatacgtacaatgggatattattcagcctaaaaaaagggggaatcctgttatttatgacaacatgaataaacccggaggccattatgctatgtaaaatgagcaagtaacagaaagacaaatactgcctgatttcatttatatgaggttctaaaatagtcaaactcatagaagcagagaatagaacagtggttcctagggaaaaggaggaagggagaaatgaggaaatagggagttgtctaattggtataaaattatagtatgcaagatgaattagctctaaagatcagctgtatagcagagttcgtataatgaacaatactgtattatgcacttaacattttgttaagagggtacctctcatgttaagtgttcttaccatatacatatacacaaggaagcttttggaggtgatggatatatttattaccttgattgtggtgatggtttgacaggtatgtgactatgtctaaactcatcaaattgtatacattaaatatatgcagttttataatatcaa

SEQ ID NO: 4199 - DNA, 3908 bp, Homo sapiens
  source 1..3908: mol_type = genomic DNA
tttgaatacaccaattgctgtggggcggctcgaggaagagaagacaccagtgcctcagaaactgctcggtcagacggtgatagcgagccacgcattcacagggccactgctgctcacagaagcagtgaggatgatgccaggatgatgtctgcctcgcgcctggctgggactctgatcccagccatggccttcctctcctgcgtgagaccagaaagctgggagccctgcgtggagacttggccctaaaccacacagaagagctggcatgaaacccagagctttcagactccggagcctcagcccttcaccccgattccattgcttcttgctaaatgctgccgttttatcacggaggtggttcctaatattacttatcaatgcatggagctgaatttctacaaaatccccgacaacctccccttctcaaccaagaacctggacctgagctttaatcccctgaggcatttaggcagctatagcttcttcagtttcccagaactgcaggtgctggatttatccaggtgtgaaatccagacaattgaagatggggcatatcagagcctaagccacctctctaccttaatattgacaggaaaccccatccagagtttagccctgggagccttttctggactatcaagtttacagaagctggtggctgtggagacaaatctagcatctctagagaacttccccattggacatctcaaaactttgaaagaacttaatgtggctcacaatcttatccaatctttcaaattacctgagtatttttctaatctgaccaatctagagcacttggacctttccagcaacaagattcaaagtatttattgcacagacttgcgggttctacatcaaatgcccctactcaatctctctttagacctgtccctgaaccctatgaactttatccaaccaggtgcatttaaagaaattaggcttcataagctgactttaagaaataattttgatagtttaaatgtaatgaaaacttgtattcaaggtctggctggtttagaagtccatcgtttggttctgggagaatttagaaatgaaggaaacttggaaaagtttgacaaatctgctctagagggcctgtgcaatttgaccattgaagaattccgattagcatacttagactactacctcgatgatattattgacttatttaattgtttgacaaatgtttcttcattttccctggtgagtgtgactattgaaagggtaaaagacttttcttataatttcggatggcaacatttagaattagttaactgtaaatttggacagtttcccacattgaaactcaaatctctcaaaaggcttactttcacttccaacaaaggtgggaatgctttttcagaagttgatctaccaagccttgagtttctagatctcagtagaaatggcttgagtttcaaaggttgctgttctcaaagtgattttgggacaaccagcctaaagtatttagatctgagcttcaatggtgttattaccatgagttcaaacttcttgggcttagaacaactagaacatctggatttccagcattccaatttgaaacaaatgagtgagttttcagtattcctatcactcagaaacctcatttaccttgacatttctcatactcacaccagagttgctttcaatggcatcttcaatggcttgtccagtctcgaagtcttgaaaatggctggcaattctttccaggaaaacttccttccagatatcttcacagagctgagaaacttgaccttcctggacctctctcagtgtcaactggagcagttgtctccaacagcatttaactcactctccagtcttcaggtactaaatatgagccacaacaacttcttttcattggatacgtttccttataagtgtctgaactccctccaggttcttgattacagtctcaatcacataatgacttccaaaaaacaggaactacagcattttccaagtagtctagctttcttaaatcttactcagaatgactttgcttgtacttgtgaacaccagagtttcctgcaatggatcaaggaccagaggcagctcttggtggaagttgaacgaatggaatgtgcaacaccttcagataagcagggcatgcctgtgctgagtttgaatatcacctgtcagatgaataagaccatcattggtgtgtcggtcctcagtgtgcttgtagtatctgttgtagcagttctggtctataagttctattttcacctgatgcttcttgctggctgcataaagtatggtagaggtgaaaacatctatgatgcctttgttatctactcaagccaggatgaggactgggtaaggaatgagctagtaaagaatttagaagaaggggtgcctccatttcagctctgccttcactacagagactttattcccggtgtggccattgctgccaacatcatccatgaaggtttccataaaagccgaaaggtgattgttgtggtgtcccagcacttcatccagagccgctggtgtatctttgaatatgagattgctcagacctggcagtttctgagcagtcgtgctggtatcatcttcattgtcctgcagaaggtggagaagaccctgctcaggcagcaggtggagctgtaccgccttctcagcaggaacacttacctggagtgggaggacagtgtcctggggcggcacatcttctggagacgactcagaaaagccctgctggatggtaaatcatggaatccagaaggaacagtgggtacaggatgcaattggcaggaagcaacatctatctgaagaggaaaaataaaaacctcctgaggcatttcttgcccagctgggtccaacacttgttcagttaataagtattaaatgctgccacatgtcaggccttatgctaagggtgagtaattccatggtgcactagatatgcagggctgctaatctcaaggagcttccagtgcagagggaataaatgctagactaaaatacagagtcttccaggtgggcatttcaaccaactcagtcaaggaacccatgacaaagaaagtcatttcaactcttacctcatcaagttgaataaagacagagaaaacagaaagagacattgttcttttcctgagtcttttgaatggaaattgtattatgttatagccatcataaaaccattttggtagttttgactgaactgggtgttcactttttcctttttgattgaatacaatttaaattctacttgatgactgcagtcgtcaaggggctcctgatgcaagatgccccttccattttaagtctgtctccttacagaggttaaagtctagtggctaattcctaaggaaacctgattaacacatgctcacaaccatcctggtcattctcgagcatgttctattttttaactaatcacccctgatatatttttatttttatatatccagttttcatttttttacgtcttgcctataagctaatatcataaataaggttgtttaagacgtgcttcaaatatccatattaaccactatttttcaaggaagtatggaaaagtacactctgtcactttgtcactcgatgtcattccaaagttattgcctactaagtaatgactgtcatgaaagcagcattgaaataatttgtttaaagggggcactcttttaaacgggaagaaaatttccgcttcctggtcttatcatggacaatttgggctagaggcaggaaggaagtgggatgacctcaggaggtcaccttttcttgattccagaaacatatgggctgataaacccggggtgacctcatgaaatgagttgcagcagaagtttatttttttcagaacaagtgatgtttgatggacctctgaatctctttagggagacacagatggctgggatccctcccctgtacccttctcactgccaggagaacta

SEQ ID NO: 4200 - DNA, 3005 bp, Homo sapiens
  source 1..3005: mol_type = genomic DNA
tccagggaagatgtcggagcctcagatgttaattttctaattgagaatgttggcgctgtccgaacctggagacagagtatcagcgcctttgcttgctgctgtttttgctgttttttgatgctgggaaccaccacctaaagatagtaaagaaaacacaggaagctttccggaaaacaaaaagtcctttctcctgattcaccaaaaaataaaatactgactaccatcactgtgatgagattcctatagtctcaggaactgaagtctttaaacaaccagggaccctctgcccctagaataagaacatactagaagtcccttctgctaggacaacgaggatcatgggagaccacctggaccttctcctaggagtggtgctcatggccggtcctgtgtttggaattccttcctgctcctttgatggccgaatagccttttatcgtttctgcaacctcacccaggtcccccaggtcctcaacaccactgagaggctcctgctgagcttcaactatatcaggacagtcactgcttcatccttcccctttctggaacagctgcagctgctggagctcgggagccagtatacccccttgactattgacaaggaggccttcagaaacctgcccaaccttagaatcttggacctgggaagtagtaagatatacttcttgcatccagatgcttttcagggactgttccatctgtttgaacttagactgtatttctgtggtctctctgatgctgtattgaaagatggttatttcagaaatttaaaggctttaactcgcttggatctatccaaaaatcagattcgtagcctttaccttcatccttcatttgggaagttgaattccttaaagtccatagatttttcctccaaccaaatattccttgtatgtgaacatgagctcgagcccctacaagggaaaacgctctccttttttagcctcgcagctaatagcttgtatagcagagtctcagtggactggggaaaatgtatgaacccattcagaaacatggtgctggagatactagatgtttctggaaatggctggacagtggacatcacaggaaactttagcaatgccatcagcaaaagccaggccttctctttgattcttgcccaccacatcatgggtgccgggtttggcttccataacatcaaagatcctgaccagaacacatttgctggcctggccagaagttcagtgagacacctggatctttcacatgggtttgtcttctccctgaactcacgagtctttgagacactcaaggatttgaaggttctgaaccttgcctacaacaagataaataagattgcagatgaagcattttacggacttgacaacctccaagttctcaatttgtcatataaccttctgggggaactttacagttcgaatttctatggactacctaaggtagcctacattgatttgcaaaagaatcacattgcaataattcaagaccaaacattcaaattcctggaaaaattacagaccttggatctccgagacaatgctcttacaaccattcattttattccaagcatacccgatatcttcttgagtggcaataaactagtgactttgccaaagatcaaccttacagcgaacctcatccacttatcagaaaacaggctagaaaatctagatattctctactttctcctacgggtacctcatctccagattctcattttaaatcaaaatcgcttctcctcctgtagtggagatcaaaccccttcagagaatcccagcttagaacagcttttccttggagaaaatatgttgcaacttgcctgggaaactgagctctgttgggatgtttttgagggactttctcatcttcaagttctgtatttgaatcataactatcttaattcccttccaccaggagtatttagccatctgactgcattaaggggactaagcctcaactccaacaggctgacagttctttctcacaatgatttacctgctaatttagagatcctggacatatccaggaaccagctcctagctcctaatcctgatgtatttgtatcacttagtgtcttggatataactcataacaagttcatttgtgaatgtgaacttagcacttttatcaattggcttaatcacaccaatgtcactatagctgggcctcctgcagacatatattgtgtgtaccctgactcgttctctggggtttccctcttctctctttccacggaaggttgtgatgaagaggaagtcttaaagtccctaaagttctcccttttcattgtatgcactgtcactctgactctgttcctcatgaccatcctcacagtcacaaagttccggggcttctgttttatctgttataagacagcccagagactggtgttcaaggaccatccccagggcacagaacctgatatgtacaaatatgatgcctatttgtgcttcagcagcaaagacttcacatgggtgcagaatgctttgctcaaacacctggacactcaatacagtgaccaaaacagattcaacctgtgctttgaagaaagagactttgtcccaggagaaaaccgcattgccaatatccaggatgccatctggaacagtagaaagatcgtttgtcttgtgagcagacacttccttagagatggctggtgccttgaagccttcagttatgcccagggcaggtgcttatctgaccttaacagtgctctcatcatggtggtggttgggtccttgtcccagtaccagttgatgaaacatcaatccatcagaggctttgtacagaaacagcagtatttgaggtggcctgaggatttccaggatgttggctggtttcttcataaactctctcaacagatactaaagaaagaaaaagaaaagaagaaagacaataacattccgttgcaaactgtagcaaccatctcctaatcaaaggagcaatttccaacttatctcaagccacaaataactcttcactttgtatttgcaccaagttatcattttggggtcctctctgga

SEQ ID NO: 4201 - DNA, 3368 bp, Homo sapiens
  source 1..3368: mol_type = genomic DNA
ggttttcaggagcccgagcgagggcgccgcttttgcgtccgggaggagccaaccgtggcgcaggcggcgcggggaggcgtcccagagtctcactctgccgcccaggctggactgcagtgacacaatctcggctgactgcaaccactgcctccagggttcaagcgattctcttgcctcagcctcccaagtagctgggattacagattgatgttcatgttcctgacactactacaagattcatactcctgatgctactgacaacgtggcttctccacagtcaccaaaccagggatgctatactggacttccctactctcatctgctccagccccctgaccttatagttgcccagctttcctggcaattgactttgcccatcaatacacaggatttagcatccagggaagatgtcggagcctcagatgttaattttctaattgagaatgttggcgctgtccgaacctggagacaggaaaacaaaaagtcctttctcctgattcaccaaaaaataaaatactgactaccatcactgtgatgagattcctatagtctcaggaactgaagtctttaaacaaccagggaccctctgcccctagaataagaacatactagaagtcccttctgctaggacaacgaggatcatgggagaccacctggaccttctcctaggagtggtgctcatggccggtcctgtgtttggaattccttcctgctcctttgatggccgaatagccttttatcgtttctgcaacctcacccaggtcccccaggtcctcaacaccactgagaggctcctgctgagcttcaactatatcaggacagtcactgcttcatccttcccctttctggaacagctgcagctgctggagctcgggagccagtatacccccttgactattgacaaggaggccttcagaaacctgcccaaccttagaatcttggacctgggaagtagtaagatatacttcttgcatccagatgcttttcagggactgttccatctgtttgaacttagactgtatttctgtggtctctctgatgctgtattgaaagatggttatttcagaaatttaaaggctttaactcgcttggatctatccaaaaatcagattcgtagcctttaccttcatccttcatttgggaagttgaattccttaaagtccatagatttttcctccaaccaaatattccttgtatgtgaacatgagctcgagcccctacaagggaaaacgctctccttttttagcctcgcagctaatagcttgtatagcagagtctcagtggactggggaaaatgtatgaacccattcagaaacatggtgctggagatactagatgtttctggaaatggctggacagtggacatcacaggaaactttagcaatgccatcagcaaaagccaggccttctctttgattcttgcccaccacatcatgggtgccgggtttggcttccataacatcaaagatcctgaccagaacacatttgctggcctggccagaagttcagtgagacacctggatctttcacatgggtttgtcttctccctgaactcacgagtctttgagacactcaaggatttgaaggttctgaaccttgcctacaacaagataaataagattgcagatgaagcattttacggacttgacaacctccaagttctcaatttgtcatataaccttctgggggaactttacagttcgaatttctatggactacctaaggtagcctacattgatttgcaaaagaatcacattgcaataattcaagaccaaacattcaaattcctggaaaaattacagaccttggatctccgagacaatgctcttacaaccattcattttattccaagcatacccgatatcttcttgagtggcaataaactagtgactttgccaaagatcaaccttacagcgaacctcatccacttatcagaaaacaggctagaaaatctagatattctctactttctcctacgggtacctcatctccagattctcattttaaatcaaaatcgcttctcctcctgtagtggagatcaaaccccttcagagaatcccagcttagaacagcttttccttggagaaaatatgttgcaacttgcctgggaaactgagctctgttgggatgtttttgagggactttctcatcttcaagttctgtatttgaatcataactatcttaattcccttccaccaggagtatttagccatctgactgcattaaggggactaagcctcaactccaacaggctgacagttctttctcacaatgatttacctgctaatttagagatcctggacatatccaggaaccagctcctagctcctaatcctgatgtatttgtatcacttagtgtcttggatataactcataacaagttcatttgtgaatgtgaacttagcacttttatcaattggcttaatcacaccaatgtcactatagctgggcctcctgcagacatatattgtgtgtaccctgactcgttctctggggtttccctcttctctctttccacggaaggttgtgatgaagaggaagtcttaaagtccctaaagttctcccttttcattgtatgcactgtcactctgactctgttcctcatgaccatcctcacagtcacaaagttccggggcttctgttttatctgttataagacagcccagagactggtgttcaaggaccatccccagggcacagaacctgatatgtacaaatatgatgcctatttgtgcttcagcagcaaagacttcacatgggtgcagaatgctttgctcaaacacctggacactcaatacagtgaccaaaacagattcaacctgtgctttgaagaaagagactttgtcccaggagaaaaccgcattgccaatatccaggatgccatctggaacagtagaaagatcgtttgtcttgtgagcagacacttccttagagatggctggtgccttgaagccttcagttatgcccagggcaggtgcttatctgaccttaacagtgctctcatcatggtggtggttgggtccttgtcccagtaccagttgatgaaacatcaatccatcagaggctttgtacagaaacagcagtatttgaggtggcctgaggatttccaggatgttggctggtttcttcataaactctctcaacagatactaaagaaagaaaaagaaaagaagaaagacaataacattccgttgcaaactgtagcaaccatctcctaatcaaaggagcaatttccaacttatctcaagccacaaataactcttcactttgtatttgcaccaagttatcattttggggtcctctctggaggttttttttttctttttgctactatgaaaacaacataaatctctcaattttcgtatcaa

SEQ ID NO: 4202 - DNA, 459 bp, Homo sapiens
  source 1..459: mol_type = genomic DNA
ggagccaaccgtggcgcaggcggcgcggggaggcgtcccagagggatgctatactggacttccctactctcatctgctccagccccctgaccttatagttgcccagctttcctggcaattgactttgcccatcaatacacaggatttagcatccagggaagatgtcggagcctcagatgttaattttctaattgagaatgttggcgctgtccgaacctggagacaggaaaacaaaaagtcctttctcctgattcaccaaaaaataaaatactgactaccatcactgtgatgagattcctatagtctcaggaactgaagtctttaaacaaccagggaccctctgcccctagaataagaacatactagaagtcccttctgctaggacaacgaggatcatgggagaccacctggaccttctcctaggagtggtgctcatggccggtcctgtgtttggaattc

SEQ ID NO: 4203 - DNA, 4088 bp, Homo sapiens
  source 1..4088: mol_type = genomic DNA
aagtaagtttgtattttaccatagattgatgttcatgttcctgacactactacaagattcatactcctgatgctactgacaacgtggcttctccacagtcaccaaaccagggatgctatactggacttccctactctcatctgctccagccccctgaccttatagttgcccagctttcctggcaattgactttgcccatcaatacacaggatttagcatccagggaagatgtcggagcctcagatgttaattttctaattgagaatgttggcgctgtccgaacctggagacaggaaaacaaaaagtcctttctcctgattcaccaaaaaataaaatactgactaccatcactgtgatgagattcctatagtctcaggaactgaagtctttaaacaaccagggaccctctgcccctagaataagaacatactagaagtcccttctgctaggacaacgaggatcatgggagaccacctggaccttctcctaggagtggtgctcatggccggtcctgtgtttggaattccttcctgctcctttgatggccgaatagccttttatcgtttctgcaacctcacccaggtcccccaggtcctcaacaccactgagaggctcctgctgagcttcaactatatcaggacagtcactgcttcatccttcccctttctggaacagctgcagctgctggagctcgggagccagtatacccccttgactattgacaaggaggccttcagaaacctgcccaaccttagaatcttggacctgggaagtagtaagatatacttcttgcatccagatgcttttcagggactgttccatctgtttgaacttagactgtatttctgtggtctctctgatgctgtattgaaagatggttatttcagaaatttaaaggctttaactcgcttggatctatccaaaaatcagattcgtagcctttaccttcatccttcatttgggaagttgaattccttaaagtccatagatttttcctccaaccaaatattccttgtatgtgaacatgagctcgagcccctacaagggaaaacgctctccttttttagcctcgcagctaatagcttgtatagcagagtctcagtggactggggaaaatgtatgaacccattcagaaacatggtgctggagatactagatgtttctggaaatggctggacagtggacatcacaggaaactttagcaatgccatcagcaaaagccaggccttctctttgattcttgcccaccacatcatgggtgccgggtttggcttccataacatcaaagatcctgaccagaacacatttgctggcctggccagaagttcagtgagacacctggatctttcacatgggtttgtcttctccctgaactcacgagtctttgagacactcaaggatttgaaggttctgaaccttgcctacaacaagataaataagattgcagatgaagcattttacggacttgacaacctccaagttctcaatttgtcatataaccttctgggggaactttacagttcgaatttctatggactacctaaggtagcctacattgatttgcaaaagaatcacattgcaataattcaagaccaaacattcaaattcctggaaaaattacagaccttggatctccgagacaatgctcttacaaccattcattttattccaagcatacccgatatcttcttgagtggcaataaactagtgactttgccaaagatcaaccttacagcgaacctcatccacttatcagaaaacaggctagaaaatctagatattctctactttctcctacgggtacctcatctccagattctcattttaaatcaaaatcgcttctcctcctgtagtggagatcaaaccccttcagagaatcccagcttagaacagcttttccttggagaaaatatgttgcaacttgcctgggaaactgagctctgttgggatgtttttgagggactttctcatcttcaagttctgtatttgaatcataactatcttaattcccttccaccaggagtatttagccatctgactgcattaaggggactaagcctcaactccaacaggctgacagttctttctcacaatgatttacctgctaatttagagatcctggacatatccaggaaccagctcctagctcctaatcctgatgtatttgtatcacttagtgtcttggatataactcataacaagttcatttgtgaatgtgaacttagcacttttatcaattggcttaatcacaccaatgtcactatagctgggcctcctgcagacatatattgtgtgtaccctgactcgttctctggggtttccctcttctctctttccacggaaggttgtgatgaagaggaagtcttaaagtccctaaagttctcccttttcattgtatgcactgtcactctgactctgttcctcatgaccatcctcacagtcacaaagttccggggcttctgttttatctgttataagacagcccagagactggtgttcaaggaccatccccagggcacagaacctgatatgtacaaatatgatgcctatttgtgcttcagcagcaaagacttcacatgggtgcagaatgctttgctcaaacacctggacactcaatacagtgaccaaaacagattcaacctgtgctttgaagaaagagactttgtcccaggagaaaaccgcattgccaatatccaggatgccatctggaacagtagaaagatcgtttgtcttgtgagcagacacttccttagagatggctggtgccttgaagccttcagttatgcccagggcaggtgcttatctgaccttaacagtgctctcatcatggtggtggttgggtccttgtcccagtaccagttgatgaaacatcaatccatcagaggctttgtacagaaacagcagtatttgaggtggcctgaggatttccaggatgttggctggtttcttcataaactctctcaacagatactaaagaaagaaaaagaaaagaagaaagacaataacattccgttgcaaactgtagcaaccatctcctaatcaaaggagcaatttccaacttatctcaagccacaaataactcttcactttgtatttgcaccaagttatcattttggggtcctctctggaggttttttttttctttttgctactatgaaaacaacataaatctctcaattttcgtatcaacaccatgttctgtctcactaacctccaaatggaaaataatagatctagaaaattgcaactgcccttagaggtttccagtctccattgattttctttcagatccaataataccgttctgtcctgctgtgttgattatggaatgtatcctaatcatgggaagggcaccttgggagaagttgcagatggctgacgtgctttctctagcattcagctaaaaaatgggatggtccatgattctgcgttctctgtgttctgcaaaacaacattaagtagaaaacaaacagaagcagaggcacatttccttcttttgccacagaaacaatgccactgttgagtgcaagtcacactttgtctcatagataagaggtggccccaaagaagctgggatgaatgagtcactacctgtcttgtgactgtactgcacttcatgttcttaccttcggcttctccaggtctcgccctagtgagccaagaactttctctcacatgctgcctttatttaagcctggccttcaagaccttccatgatttatcaccaacctaccttttcagctttgtttcctagcacacctcattgatcagctgctcaggctgttgcatgaagaacatggactttgcacacagatcctgggttgagttctgagtcagctgtgtattagccatgtaaccttggccttggtatgcccttgctggacctacattttctcacgtaacagcatctatgtcatagaattcctgtgaaaattaaattggccaaggatgtcagggcttctcagatcttttccttcgttgccctaatgaccacaagagaacacatacactgaaggcctcctggggggcagttgcaatttcactgaagttgtatttttttatcttaaatgaaatctatgtgtattttc

SEQ ID NO: 4204 - DNA, 5812 bp, Homo sapiens
  source 1..5812: mol_type = genomic DNA
caagtgagcccttctcatcctgtaaatgaaaatatgcaagtcaacaaaataaagaaaaatgaagatgctaagaaaagactgtctgttgaaagaatctatcaaaagaaaacacaattggaacatattttgctccgcccagacacctacattggttctgtggaattagtgacccagcaaatgtgggtttacgatgaagatgttggcattaactatagggaagtcacttttgttcctggtttgtacaaaatctttgatgagattctagttaatgctgcggacaacaaacaaagggacccaaaaatgtcttgtattagagtcacaattgatccggaaaacaatttaattagtatatggaataatggaaaaggtattcctgttgttgaacacaaagttgaaaagatgtatgtcccagctctcatatttggacagctcctaacttctagtaactatgatgatgatgaaaagaaagtgacaggtggtcgaaatggctatggagccaaattgtgtaacatattcagtaccaaatttactgtggaaacagccagtagagaatacaagaaaatgttcaaacagacatggatggataatatgggaagagctggtgagatggaactcaagcccttcaatggagaagattatacatgtatcacctttcagcctgatttgtctaagtttaaaatgcaaagcctggacaaagatattgttgcactaatggtcagaagagcatatgatattgctggatccaccaaagatgtcaaagtctttcttaatggaaataaactgccagtaaaaggatttcgtagttatgtggacatgtatttgaaggacaagttggatgaaactggtaactccttgaaagtaatacatgaacaagtaaaccacaggtgggaagtgtgtttaactatgagtgaaaaaggctttcagcaaattagctttgtcaacagcattgctacatccaagggtggcagacatgttgattatgtagctgatcagattgtgactaaacttgttgatgttgtgaagaagaagaacaagggtggtgttgcagtaaaagcacatcagaggctggaatgcagtggcacgatctcggctcactgcaacctccgcctcctaggtttcagtgattctcttgcctcagcctcccgagtagctgagattacagacatgcaccatcacatccagctaatttttgtatttttaatagagatggggttttaccatgttggccaggctggtcttgaactcctggcctcacttgatccaccatcctcggcctcctgcgtaagccactgcacccagctatttgtgtctaattttatttatttatttttaatttttttgagacggagtttcacttttgtcacccaggctggagtgcaatgcactatatctccaacaagtagctcagtgctagcacaattttttgaatcatttttatttgtagccattggctgtggtattgtagaaagcatactaaactgggtgaagtttaaggcccaagtccagttaaacaagaagtgttcagctgtaaaacataatagaatcaagggaattcccaaactcgatgatgccaatgatgcagggggccgaaactccactgagtgtacgcttatcctgactgagggagattcagccaaaactttggctgtttcaggccttggtgtggttgggagagacaaatatggggttttccctcttagaggaaaaatactcaatgttcgagaagcttctcataagcagatcatggaaaatgctgagattaacaatatcatcaagattgtgggtcttcagtacaagaaaaactatgaagatgaagattcattgaagacgcttcgttatgggaagataatgattatgacagatcaggaccaagatggttcccacatcaaaggcttgctgattaattttatccatcacaactggccctctcttctgcgacatcgttttctggaggaatttatcactcccattgtaaaggtatctaaaaacaagcaagaaatggcattttacagccttcctgaatttgaagagtggaagagttctactccaaatcataaaaaatggaaagtcaaatattacaaaggtttgggcaccagcacatcaaaggaagctaaagaatactttgcagatatgaaaagacatcgtatccagttcaaatattctggtcctgaagatgatgctgctatcagcctggcctttagcaaaaaacagatagatgatcgaaaggaatggttaactaatttcatggaggatagaagacaacgaaagttacttgggcttcctgaggattacttgtatggacaaactaccacatatctgacatataatgacttcatcaacaaggaacttatcttgttctcaaattctgataacgagagatctatcccttctatggtggatggtttgaaaccaggtcagagaaaggttttgtttacttgcttcaaacggaatgacaagcgagaagtaaaggttgcccaattagctggatcagtggctgaaatgtcttcttatcatcatggtgagatgtcactaatgatgaccattatcaatttggctcagaattttgtgggtagcaataatctaaacctcttgcagcccattggtcagtttggtaccaggctacatggtggcaaggattctgctagtccacgatacatctttacaatgctcagctctttggctcgattgttatttccaccaaaagatgatcacacgttgaagtttttatatgatgacaaccagcgtgttgagcctgaatggtacattcctattattcccatggtgctgataaatggtgctgaaggaatcggtactgggtggtcctgcaaaatccccaactttgatgtgcgtgaaattgtaaataacatcaggcgtttgatggatggagaagaacctttgccaatgcttccaagttacaagaacttcaagggtactattgaagaactggctccaaatcaatatgtgattagtggtgaagtagctattcttaattctacaaccattgaaatctcagagcttcccgtcagaacatggacccagacatacaaagaacaagttctagaacccatgttgaatggcaccgagaagacacctcctctcataacagactatagggaataccatacagataccactgtgaaatttgttgtgaagatgactgaagaaaaactggcagaggcagagagagttggactacacaaagtcttcaaactccaaactagtctcacatgcaactctatggtgctttttgaccacgtaggctgtttaaagaaatatgacacggtgttggatattctaagagacttttttgaactcagacttaaatattatggattaagaaaagaatggctcctaggaatgcttggtgctgaatctgctaaactgaataatcaggctcgctttatcttagagaaaatagatggcaaaataatcattgaaaataagcctaagaaagaattaattaaagttctgattcagaggggatatgattcggatcctgtgaaggcctggaaagaagcccagcaaaaggttccagatgaagaagaaaatgaagagagtgacaacgaaaaggaaactgaaaagagtgactccgtaacagattctggaccaaccttcaactatcttcttgatatgcccctttggtatttaaccaaggaaaagaaagatgaactctgcaggctaagaaatgaaaaagaacaagagctggacacattaaaaagaaagagtccatcagatttgtggaaagaagacttggctacatttattgaagaattggaggctgttgaagccaaggaaaaacaagatgaacaagtcggacttcctgggaaaggggggaaggccaaggggaaaaaaacacaaatggctgaagttttgccttctccgcgtggtcaaagagtcattccacgaataaccatagaaatgaaagcagaggcagaaaagaaaaataaaaagaaaattaagaatgaaaatactgaaggaagccctcaagaagatggtgtggaactagaaggcctaaaacaaagattagaaaagaaacagaaaagagaaccaggtacaaagacaaagaaacaaactacattggcatttaagccaatcaaaaaaggaaagaagagaaatccctggtctgattcagaatcagataggagcagtgacgaaagtaattttgatgtccctccacgagaaacagagccacggagagcagcaacaaaaacaaaattcacaatggatttggattcagatgaagatttctcagattttgatgaaaaaactgatgatgaagattttgtcccatcagatgctagtccacctaagaccaaaacttccccaaaacttagtaacaaagaactgaaaccacagaaaagtgtcgtgtcagaccttgaagctgatgatgttaagggcagtgtaccactgtcttcaagccctcctgctacacatttcccagatgaaactgaaattacaaacccagttcctaaaaagaatgtgacagtgaagaagacagcagcaaaaagtcagtcttccacctccactaccggtgccaaaaaaagggctgccccaaaaggaactaaaagggatccagctttgaattctggtgtctctcaaaagcctgatcctgccaaaaccaagaatcgccgcaaaaggaagccatccacttctgatgattctgactctaattttgagaaaattgtttcgaaagcagtcacaagcaagaaatccaagggggagagtgatgacttccatatggactttgactcagctgtggctcctcgggcaaaatctgtacgggcaaagaaacctataaagtacctggaagagtcagatgaagatgatctgttttaaaatgtgaggcgattattttaagtaattatcttaccaagcccaagactggttttaaagttacctgaagctcttaacttcctcccctctgaatttagtttggggaaggtgtttttagtacaagacatcaaagtgaagtaaagcccaagtgttctttagctttttataatactgtctaaatagtgaccatctcatgggcattgttttcttctctgctttgtctgtgttttgagtctgctttcttttgtctttaaaacctgatttttaagttcttctgaactgtagaaatagctatctgatcacttcagcgtaaagcagtgtgtttattaaccatccactaagctaaaactagagcagtttgatttaaaagtgtcactcttcctccttttctactttcagtagatatgagatagagcataattatctgttttatcttagttttatacataatttaccatcagatagaactttatggttctagtacagatactctactacactcagcctcttatgtgccaagtttttctttaagcaatgagaaattgctcatgttcttcatcttctcaaatcatcagaggccgaagaaaaacactttggctgtgtctataacttgacacagtcaatagaatgaagaaaattagagtagttatgtgattatttcagctcttgacctgtcccctctggctgcctctgagtctgaatctcccaaagagagaaaccaatttctaagaggactggattgcagaagactcggggacaacatttgatccaagatcttaaatgttatattgataaccatgctcagcaatgagctattagattcattttgggaaatctccataatttcaatttgtaaactttgttaagacctgtctacattgttatatgtgtgtgacttgagtaatgttatcaacgtttttgtaaatatttactatgtttttctattagctaaattccaacaattttgtactttaataaa

SEQ ID NO: 4205 - DNA, 5641 bp, Homo sapiens
  source 1..5641: mol_type = genomic DNA
caagtgagcccttctcatcctgtaaatgaaaatatgcaagtcaacaaaataaagaaaaatgaagatgctaagaaaagactgtctgttgaaagaatctatcaaaagaaaacacaattggaacatattttgctccgcccagacacctacattggttctgtggaattagtgacccagcaaatgtgggtttacgatgaagatgttggcattaactatagggaagtcacttttgttcctggtttgtacaaaatctttgatgagattctagttaatgctgcggacaacaaacaaagggacccaaaaatgtcttgtattagagtcacaattgatccggaaaacaatttaattagtatatggaataatggaaaaggtattcctgttgttgaacacaaagttgaaaagatgtatgtcccagctctcatatttggacagctcctaacttctagtaactatgatgatgatgaaaagaaagtgacaggtggtcgaaatggctatggagccaaattgtgtaacatattcagtaccaaatttactgtggaaacagccagtagagaatacaagaaaatgttcaaacagacatggatggataatatgggaagagctggtgagatggaactcaagcccttcaatggagaagattatacatgtatcacctttcagcctgatttgtctaagtttaaaatgcaaagcctggacaaagatattgttgcactaatggtcagaagagcatatgatattgctggatccaccaaagatgtcaaagtctttcttaatggaaataaactgccagtaaaaggatttcgtagttatgtggacatgtatttgaaggacaagttggatgaaactggtaactccttgaaagtaatacatgaacaagtaaaccacaggtgggaagtgtgtttaactatgagtgaaaaaggctttcagcaaattagctttgtcaacagcattgctacatccaagggtggcagacatgttgattatgtagctgatcagattgtgactaaacttgttgatgttgtgaagaagaagaacaagggtggtgttgcagtaaaagcacatcaggtgaaaaatcacatgtggatttttgtaaatgccttaattgaaaacccaacctttgactctcagacaaaagaaaacatgactttacaacccaagagctttggatcaacatgccaattgagtgaaaaatttatcaaagctgctcatttgtattctagatttctgatagatcccttcttccctaatatgatccctaatatgaatctttttcaggccattggctgtggtattgtagaaagcatactaaactgggtgaagtttaaggcccaagtccagttaaacaagaagtgttcagctgtaaaacataatagaatcaagggaattcccaaactcgatgatgccaatgatgcagggggccgaaactccactgagtgtacgcttatcctgactgagggagattcagccaaaactttggctgtttcaggccttggtgtggttgggagagacaaatatggggttttccctcttagaggaaaaatactcaatgttcgagaagcttctcataagcagatcatggaaaatgctgagattaacaatatcatcaagattgtgggtcttcagtacaagaaaaactatgaagatgaagattcattgaagacgcttcgttatgggaagataatgattatgacagatcaggaccaagatggttcccacatcaaaggcttgctgattaattttatccatcacaactggccctctcttctgcgacatcgttttctggaggaatttatcactcccattgtaaaggtatctaaaaacaagcaagaaatggcattttacagccttcctgaatttgaagagtggaagagttctactccaaatcataaaaaatggaaagtcaaatattacaaaggtttgggcaccagcacatcaaaggaagctaaagaatactttgcagatatgaaaagacatcgtatccagttcaaatattctggtcctgaagatgatgctgctatcagcctggcctttagcaaaaaacagatagatgatcgaaaggaatggttaactaatttcatggaggatagaagacaacgaaagttacttgggcttcctgaggattacttgtatggacaaactaccacatatctgacatataatgacttcatcaacaaggaacttatcttgttctcaaattctgataacgagagatctatcccttctatggtggatggtttgaaaccaggtcagagaaaggttttgtttacttgcttcaaacggaatgacaagcgagaagtaaaggttgcccaattagctggatcagtggctgaaatgtcttcttatcatcatggtgagatgtcactaatgatgaccattatcaatttggctcagaattttgtgggtagcaataatctaaacctcttgcagcccattggtcagtttggtaccaggctacatggtggcaaggattctgctagtccacgatacatctttacaatgctcagctctttggctcgattgttatttccaccaaaagatgatcacacgttgaagtttttatatgatgacaaccagcgtgttgagcctgaatggtacattcctattattcccatggtgctgataaatggtgctgaaggaatcggtactgggtggtcctgcaaaatccccaactttgatgtgcgtgaaattgtaaataacatcaggcgtttgatggatggagaagaacctttgccaatgcttccaagttacaagaacttcaagggtactattgaagaactggctccaaatcaatatgtgattagtggtgaagtagctattcttaattctacaaccattgaaatctcagagcttcccgtcagaacatggacccagacatacaaagaacaagttctagaacccatgttgaatggcaccgagaagacacctcctctcataacagactatagggaataccatacagataccactgtgaaatttgttgtgaagatgactgaagaaaaactggcagaggcagagagagttggactacacaaagtcttcaaactccaaactagtctcacatgcaactctatggtgctttttgaccacgtaggctgtttaaagaaatatgacacggtgttggatattctaagagacttttttgaactcagacttaaatattatggattaagaaaagaatggctcctaggaatgcttggtgctgaatctgctaaactgaataatcaggctcgctttatcttagagaaaatagatggcaaaataatcattgaaaataagcctaagaaagaattaattaaagttctgattcagaggggatatgattcggatcctgtgaaggcctggaaagaagcccagcaaaaggttccagatgaagaagaaaatgaagagagtgacaacgaaaaggaaactgaaaagagtgactccgtaacagattctggaccaaccttcaactatcttcttgatatgcccctttggtatttaaccaaggaaaagaaagatgaactctgcaggctaagaaatgaaaaagaacaagagctggacacattaaaaagaaagagtccatcagatttgtggaaagaagacttggctacatttattgaagaattggaggctgttgaagccaaggaaaaacaagatgaacaagtcggacttcctgggaaaggggggaaggccaaggggaaaaaaacacaaatggctgaagttttgccttctccgcgtggtcaaagagtcattccacgaataaccatagaaatgaaagcagaggcagaaaagaaaaataaaaagaaaattaagaatgaaaatactgaaggaagccctcaagaagatggtgtggaactagaaggcctaaaacaaagattagaaaagaaacagaaaagagaaccaggtacaaagacaaagaaacaaactacattggcatttaagccaatcaaaaaaggaaagaagagaaatccctggtctgattcagaatcagataggagcagtgacgaaagtaattttgatgtccctccacgagaaacagagccacggagagcagcaacaaaaacaaaattcacaatggatttggattcagatgaagatttctcagattttgatgaaaaaactgatgatgaagattttgtcccatcagatgctagtccacctaagaccaaaacttccccaaaacttagtaacaaagaactgaaaccacagaaaagtgtcgtgtcagaccttgaagctgatgatgttaagggcagtgtaccactgtcttcaagccctcctgctacacatttcccagatgaaactgaaattacaaacccagttcctaaaaagaatgtgacagtgaagaagacagcagcaaaaagtcagtcttccacctccactaccggtgccaaaaaaagggctgccccaaaaggaactaaaagggatccagctttgaattctggtgtctctcaaaagcctgatcctgccaaaaccaagaatcgccgcaaaaggaagccatccacttctgatgattctgactctaattttgagaaaattgtttcgaaagcagtcacaagcaagaaatccaagggggagagtgatgacttccatatggactttgactcagctgtggctcctcgggcaaaatctgtacgggcaaagaaacctataaagtacctggaagagtcagatgaagatgatctgttttaaaatgtgaggcgattattttaagtaattatcttaccaagcccaagactggttttaaagttacctgaagctcttaacttcctcccctctgaatttagtttggggaaggtgtttttagtacaagacatcaaagtgaagtaaagcccaagtgttctttagctttttataatactgtctaaatagtgaccatctcatgggcattgttttcttctctgctttgtctgtgttttgagtctgctttcttttgtctttaaaacctgatttttaagttcttctgaactgtagaaatagctatctgatcacttcagcgtaaagcagtgtgtttattaaccatccactaagctaaaactagagcagtttgatttaaaagtgtcactcttcctccttttctactttcagtagatatgagatagagcataattatctgttttatcttagttttatacataatttaccatcagatagaactttatggttctagtacagatactctactacactcagcctcttatgtgccaagtttttctttaagcaatgagaaattgctcatgttcttcatcttctcaaatcatcagaggccgaagaaaaacactttggctgtgtctataacttgacacagtcaatagaatgaagaaaattagagtagttatgtgattatttcagctcttgacctgtcccctctggctgcctctgagtctgaatctcccaaagagagaaaccaatttctaagaggactggattgcagaagactcggggacaacatttgatccaagatcttaaatgttatattgataaccatgctcagcaatgagctattagattcattttgggaaatctccataatttcaatttgtaaactttgttaagacctgtctacattgttatatgtgtgtgacttgagtaatgttatcaacgtttttgtaaatatttactatgtttttctattagctaaattccaacaattttgtactttaataaa

SEQ ID NO: 4206 - DNA, 5809 bp, Homo sapiens
  source 1..5809: mol_type = genomic DNA
aggttcaagtggagctctcctaaccgacgcgcgtctgtggagaagcggcttggtcgggggtggtctcgtggggtcctgcctgtttagtcgctttcagggttcttgagccccttcacgaccgtcaccatggaagtgtcaccattgcagcctgtaaatgaaaatatgcaagtcaacaaaataaagaaaaatgaagatgctaagaaaagactgtctgttgaaagaatctatcaaaagaaaacacaattggaacatattttgctccgcccagacacctacattggttctgtggaattagtgacccagcaaatgtgggtttacgatgaagatgttggcattaactatagggaagtcacttttgttcctggtttgtacaaaatctttgatgagattctagttaatgctgcggacaacaaacaaagggacccaaaaatgtcttgtattagagtcacaattgatccggaaaacaatttaattagtatatggaataatggaaaaggtattcctgttgttgaacacaaagttgaaaagatgtatgtcccagctctcatatttggacagctcctaacttctagtaactatgatgatgatgaaaagaaagtgacaggtggtcgaaatggctatggagccaaattgtgtaacatattcagtaccaaatttactgtggaaacagccagtagagaatacaagaaaatgttcaaacaggcaataacatggatggataatatgggaagagctggtgagatggaactcaagcccttcaatggagaagattatacatgtatcacctttcagcctgatttgtctaagtttaaaatgcaaagcctggacaaagatattgttgcactaatggtcagaagagcatatgatattgctggatccaccaaagatgtcaaagtctttcttaatggaaataaactgccagtaaaaggatttcgtagttatgtggacatgtatttgaaggacaagttggatgaaactggtaactccttgaaagtaatacatgaacaagtaaaccacaggtgggaagtgtgtttaactatgagtgaaaaaggctttcagcaaattagctttgtcaacagcattgctacatccaaggtaattttattcttaaattatatgatttatctttacatatatgtgttcttattgtttttaatatataaagtggacttgaatattgggctagcttattttacaggtggcagacatgttgattatgtagctgatcagattgtgactaaacttgttgatgttgtgaagaagaagaacaagggtggtgttgcagtaaaagcacatcaggtgaaaaatcacatgtggatttttgtaaatgccttaattgaaaacccaacctttgactctcagacaaaagaaaacatgactttacaacccaagagctttggatcaacatgccaattgagtgaaaaatttatcaaagctgccattggctgtggtattgtagaaagcatactaaactgggtgaagtttaaggcccaagtccagttaaacaagaagtgttcagctgtaaaacataatagaatcaagggaattcccaaactcgatgatgccaatgatgcagggggccgaaactccactgagtgtacgcttatcctgactgagggagattcagccaaaactttggctgtttcaggccttggtgtggttgggagagacaaatatggggttttccctcttagaggaaaaatactcaatgttcgagaagcttctcataagcagatcatggaaaatgctgagattaacaatatcatcaagattgtgggtcttcagtacaagaaaaactatgaagatgaagattcattgaagacgcttcgttatgggaagataatgattatgacagatcaggaccaagatggttcccacatcaaaggcttgctgattaattttatccatcacaactggccctctcttctgcgacatcgttttctggaggaatttatcactcccattgtaaaggtatctaaaaacaagcaagaaatggcattttacagccttcctgaatttgaagagtggaagagttctactccaaatcataaaaaatggaaagtcaaatattacaaaggtttgggcaccagcacatcaaaggaagctaaagaatactttgcagatatgaaaagacatcgtatccagttcaaatattctggtcctgaagatgatgctgctatcagcctggcctttagcaaaaaacagatagatgatcgaaaggaatggttaactaatttcatggaggatagaagacaacgaaagttacttgggcttcctgaggattacttgtatggacaaactaccacatatctgacatataatgacttcatcaacaaggaacttatcttgttctcaaattctgataacgagagatctatcccttctatggtggatggtttgaaaccaggtcagagaaaggttttgtttacttgcttcaaacggaatgacaagcgagaagtaaaggttgcccaattagctggatcagtggctgaaatgtcttcttatcatcatggtgagatgtcactaatgatgaccattatcaatttggctcagaattttgtgggtagcaataatctaaacctcttgcagcccattggtcagtttggtaccaggctacatggtggcaaggattctgctagtccacgatacatctttacaatgctcagctctttggctcgattgttatttccaccaaaagatgatcacacgttgaagtttttatatgatgacaaccagcgtgttgagcctgaatggtacattcctattattcccatggtgctgataaatggtgctgaaggaatcggtactgggtggtcctgcaaaatccccaactttgatgtgcgtgaaattgtaaataacatcaggcgtttgatggatggagaagaacctttgccaatgcttccaagttacaagaacttcaagggtactattgaagaactggctccaaatcaatatgtgattagtggtgaagtagctattcttaattctacaaccattgaaatctcagagcttcccgtcagaacatggacccagacatacaaagaacaagttctagaacccatgttgaatggcaccgagaagacacctcctctcataacagactatagggaataccatacagataccactgtgaaatttgttgtgaagatgactgaagaaaaactggcagaggcagagagagttggactacacaaagtcttcaaactccaaactagtctcacatgcaactctatggtgctttttgaccacgtaggctgtttaaagaaatatgacacggtgttggatattctaagagacttttttgaactcagacttaaatattatggattaagaaaagaatggctcctaggaatgcttggtgctgaatctgctaaactgaataatcaggctcgctttatcttagagaaaatagatggcaaaataatcattgaaaataagcctaagaaagaattaattaaagttctgattcagaggggatatgattcggatcctgtgaaggcctggaaagaagcccagcaaaaggttccagatgaagaagaaaatgaagagagtgacaacgaaaaggaaactgaaaagagtgactccgtaacagattctggaccaaccttcaactatcttcttgatatgcccctttggtatttaaccaaggaaaagaaagatgaactctgcaggctaagaaatgaaaaagaacaagagctggacacattaaaaagaaagagtccatcagatttgtggaaagaagacttggctacatttattgaagaattggaggctgttgaagccaaggaaaaacaagatgaacaagtcggacttcctgggaaaggggggaaggccaaggggaaaaaaacacaaatggctgaagttttgccttctccgcgtggtcaaagagtcattccacgaataaccatagaaatgaaagcagaggcagaaaagaaaaataaaaagaaaattaagaatgaaaatactgaaggaagccctcaagaagatggtgtggaactagaaggcctaaaacaaagattagaaaagaaacagaaaagagaaccaggtacaaagacaaagaaacaaactacattggcatttaagccaatcaaaaaaggaaagaagagaaatccctggtctgattcagaatcagataggagcagtgacgaaagtaattttgatgtccctccacgagaaacagagccacggagagcagcaacaaaaacaaaattcacaatggatttggattcagatgaagatttctcagattttgatgaaaaaactgatgatgaagattttgtcccatcagatgctagtccacctaagaccaaaacttccccaaagcaaaattgtaacaaagaactgaaaccacagaaaagtgtcgtgtcagaccttgaagctgatgatgttaagggcagtgtaccactgtcttcaagccctcctgctacacatttcccagatgaaactgaaattacaaacccagttcctaaaaagaatgtgacagtgaagaagacagcagcaaaaagtcagtcttccacctccactaccggtgccaaaaaaagggctgccccaaaaggaactaaaagggatccagctttgaattctggtgtctctcaaaagcctgatcctgccaaaaccaagaatcgccgcaaaaggaagccatccacttctgatgattctgactctaattttgagaaaattgtttcgaaagcagtcacaagcaagaaatccaagggggagagtgatgacttccatatggactttgactcagctgtggctcctcgggcaaaatctgtacgggcaaagaaacctataaagtacctggaagagtcagatgaagatgatctgttttaaaatgtgaggcgattattttaagtaattatcttaccaagcccaagactggttttaaagttacctgaagctcttaacttcctcccctctgaatttagtttggggaaggtgtttttagtacaagacatcaaagtgaagtaaagcccaagtgttctttagctttttataatactgtctaaatagtgaccatctcatgggcattgttttcttctctgctttgtctgtgttttgagtctgctttcttttgtctttaaaacctgatttttaagttcttctgaactgtagaaatagctatctgatcacttcagcgtaaagcagtgtgtttattaaccatccactaagctaaaactagagcagtttgatttaaaagtgtcactcttcctccttttctactttcagtagatatgagatagagcataattatctgttttatcttagttttatacataatttaccatcagatagaactttatggttctagtacagatactctactacactcagcctcttatgtgccaagtttttctttaagcaatgagaaattgctcatgttcttcatcttctcaaatcatcagaggccgaagaaaaacactttggctgtgtctataacttgacacagtcaatagaatgaagaaaattagagtagttatgtgattatttcagctcttgacctgtcccctctggctgcctctgagtctgaatctcccaaagagagaaaccaatttctaagaggactggattgcagaagactcggggacaacatttgatccaagatcttaaatgttatattgataaccatgctcagcaatgagctattagattcattttgggaaatctccataatttcaatttgtaaactttgttaagacctgtctacattgttatatgtgtgtgacttgagtaatgttatcaacgtttttgtaaatatttactatgtttttctattagctaaattccaacaattttgtactttaataaa

SEQ ID NO: 4207 - DNA, 5758 bp, Homo sapiens
  source 1..5758: mol_type = genomic DNA
gattggctggtctgcttcgggcgggctaaaggaaggttcaagtggagctctcctaaccgacgcgcgtctgtggagaagcggcttggtcgggggtggtctcgtggggtcctgcctgtttagtcgctttcagggttcttgagccccttcacgaccgtcaccatggaagtgtcaccattgcagcctgtaaatgaaaatatgcaagtcaacaaaataaagaaaaatgaagatgctaagaaaagactgtctgttgaaagaatctatcaaaagaaaacacaattggaacatattttgctccgcccagacacctacattggttctgtggaattagtgacccagcaaatgtgggtttacgatgaagatgttggcattaactatagggaagtcacttttgttcctggtttgtacaaaatctttgatgagattctagttaatgctgcggacaacaaacaaagggacccaaaaatgtcttgtattagagtcacaattgatccggaaaacaatttaattagtatatggaataatggaaaaggtattcctgttgttgaacacaaagttgaaaagatgtatgtcccagctctcatatttggacagctcctaacttctagtaactatgatgatgatgaaaagaaagtgacaggtggtcgaaatggctatggagccaaattgtgtaacatattcagtaccaaatttactgtggaaacagccagtagagaatacaagaaaatgttcaaacagacatggatggataatatgggaagagctggtgagatggaactcaagcccttcaatggagaagattatacatgtatcacctttcagcctgatttgtctaagtttaaaatgcaaagcctggacaaagatattgttgcactaatggtcagaagagcatatgatattgctggatccaccaaagatgtcaaagtctttcttaatggaaataaactgccagtaaaaggatttcgtagttatgtggacatgtatttgaaggacaagttggatgaaactggtaactccttgaaagtaatacatgaacaagtaaaccacaggtgggaagtgtgtttaactatgagtgaaaaaggctttcagcaaattagctttgtcaacagcattgctacatccaagggtggcagacatgttgattatgtagctgatcagattgtgactaaacttgttgatgttgtgaagaagaagaacaagggtggtgttgcagtaaaagcacatcaggtgaaaaatcacatgtggatttttgtaaatgccttaattgaaaacccaacctttgactctcagacaaaagaaaacatgactttacaacccaagagctttggatcaacatgccaattgagtgaaaaatttatcaaagctgccattggctgtggtattgtagaaagcatactaaactgggtgaagtttaaggcccaagtccagttaaacaagaagtgttcagctgtaaaacataatagaatcaagggaattcccaaactcgatgatgccaatgatgcagggggccgaaactccactgagtgtacgcttatcctgactgagggagattcagccaaaactttggctgtttcaggccttggtgtggttgggagagacaaatatggggttttccctcttagaggaaaaatactcaatgttcgagaagcttctcataagcagatcatggaaaatgctgagattaacaatatcatcaagattgtgggtcttcagtacaagaaaaactatgaagatgaagattcattgaagacgcttcgttatgggaagataatgattatgacagatcaggaccaagatggttcccacatcaaaggcttgctgattaattttatccatcacaactggccctctcttctgcgacatcgttttctggaggaatttatcactcccattgtaaaggtatctaaaaacaagcaagaaatggcattttacagccttcctgaatttgaagagtggaagagttctactccaaatcataaaaaatggaaagtcaaatattacaaaggtttgggcaccagcacatcaaaggaagctaaagaatactttgcagatatgaaaagacatcgtatccagttcaaatattctggtcctgaagatgatgctgctatcagcctggcctttagcaaaaaacagatagatgatcgaaaggaatggttaactaatttcatggaggatagaagacaacgaaagttacttgggcttcctgaggattacttgtatggacaaactaccacatatctgacatataatgacttcatcaacaaggaacttatcttgttctcaaattctgataacgagagatctatcccttctatggtggatggtttgaaaccaggtcagagaaaggttttgtttacttgcttcaaacggaatgacaagcgagaagtaaaggttgcccaattagctggatcagtggctgaaatgtcttcttatcatcatggtgagatgtcactaatgatgaccattatcaatttggctcagaattttgtgggtagcaataatctaaacctcttgcagcccattggtcagtttggtaccaggctacatggtggcaaggattctgctagtccacgatacatctttacaatgctcagctctttggctcgattgttatttccaccaaaagatgatcacacgttgaagtttttatatgatgacaaccagcgtgttgagcctgaatggtacattcctattattcccatggtgctgataaatggtgctgaaggaatcggtactgggtggtcctgcaaaatccccaactttgatgtgcgtgaaattgtaaataacatcaggcgtttgatggatggagaagaacctttgccaatgcttccaagttacaagaacttcaagggtactattgaagaactggctccaaatcaatatgtgattagtggtgaagtagctattcttaattctacaaccattgaaatctcagagcttcccgtcagaacatggacccagacatacaaagaacaagttctagaacccatgttgaatggcaccgagaagacacctcctctcataacagactatagggaataccatacagataccactgtgaaatttgttgtgaagatgactgaagaaaaactggcagaggcagagagagttggactacacaaagtcttcaaactccaaactagtctcacatgcaactctatggtgctttttgaccacgtaggctgtttaaagaaatatgacacggtgttggatattctaagagacttttttgaactcagacttaaatattatggattaagaaaagaatggctcctaggaatgcttggtgctgaatctgctaaactgaataatcaggctcgctttatcttagagaaaatagatggcaaaataatcattgaaaataagcctaagaaagaattaattaaagttctgattcagaggggatatgattcggatcctgtgaaggcctggaaagaagcccagcaaaaggttccagatgaagaagaaaatgaagagagtgacaacgaaaaggaaactgaaaagagtgactccgtaacagattctggaccaaccttcaactatcttcttgatatgcccctttggtatttaaccaaggaaaagaaagatgaactctgcaggctaagaaatgaaaaagaacaagagctggacacattaaaaagaaagagtccatcagatttgtggaaagaagacttggctacatttattgaagaattggaggctgttgaagccaaggaaaaacaagatgaacaagtcggacttcctgggaaaggggggaaggccaaggggaaaaaaacacaaatggctgaagttttgccttctccgcgtggtcaaagagtcattccacgaataaccatagaaatgaaagcagaggcagaaaagaaaaataaaaagaaaattaagaatgaaaatactgaaggaagccctcaagaagatggtgtggaactagaaggcctaaaacaaagattagaaaagaaacagaaaagagaaccaggtacaaagacaaagaaacaaactacattggcatttaagccaatcaaaaaaggaaagaagagaaatccctggtctgattcagaatcagataggagcagtgacgaaagtaattttgatgtccctccacgagaaacagagccacggagagcagcaacaaaaacaaaattcacaatggatttggattcagatgaagatttctcagattttgatgaaaaaactgatgatgaagattttgtcccatcagatgctagtccacctaagaccaaaacttccccaaaacttagtaacaaagaactgaaaccacagaaaagtgtcgtgtcagaccttgaagctgatgatgttaagggcagtgtaccactgtcttcaagccctcctgctacacatttcccagatgaaactgaaattacaaacccagttcctaaaaagaatgtgacagtgaagaagacagcagcaaaaagtcagtcttccacctccactaccggtgccaaaaaaagggctgccccaaaaggaactaaaagggatccagctttgaattctggtgtctctcaaaagcctgatcctgccaaaaccaagaatcgccgcaaaaggaagccatccacttctgatgattctgactctaattttgagaaaattgtttcgaaagcagtcacaagcaagaaatccaagggggagagtgatgacttccatatggactttgactcagctgtggctcctcgggcaaaatctgtacgggcaaagaaacctataaagtacctggaagagtcagatgaagatgatctgttttaaaatgtgaggcgattattttaagtaattatcttaccaagcccaagactggttttaaagttacctgaagctcttaacttcctcccctctgaatttagtttggggaaggtgtttttagtacaagacatcaaagtgaagtaaagcccaagtgttctttagctttttataatactgtctaaatagtgaccatctcatgggcattgttttcttctctgctttgtctgtgttttgagtctgctttcttttgtctttaaaacctgatttttaagttcttctgaactgtagaaatagctatctgatcacttcagcgtaaagcagtgtgtttattaaccatccactaagctaaaactagagcagtttgatttaaaagtgtcactcttcctccttttctactttcagtagatatgagatagagcataattatctgttttatcttagttttatacataatttaccatcagatagaactttatggttctagtacagatactctactacactcagcctcttatgtgccaagtttttctttaagcaatgagaaattgctcatgttcttcatcttctcaaatcatcagaggccgaagaaaaacactttggctgtgtctataacttgacacagtcaatagaatgaagaaaattagagtagttatgtgattatttcagctcttgacctgtcccctctggctgcctctgagtctgaatctcccaaagagagaaaccaatttctaagaggactggattgcagaagactcggggacaacatttgatccaagatcttaaatgttatattgataaccatgctcagcaatgagctattagattcattttgggaaatctccataatttcaatttgtaaactttgttaagacctgtctacattgttatatgtgtgtgacttgagtaatgttatcaacgtttttgtaaatatttactatgtttttctattagctaaattccaacaattttgtactttaataaaatgttctaaacattgcaacccatagaa

SEQ ID NO: 4208 - DNA, 5189 bp, Homo sapiens
  source 1..5189: mol_type = genomic DNA
atggccaagtcgggtggctgcggcgcgggagccggcgtgggcggcggcaacggggcactgacctgggtgactctttttgatcagaacaatgctgcaaaaaaagaagagtcagaaactgccaacaaaaatgattcttcaaagaagttgtctgttgagagagtgtatcagaagaagacacaacttgaacacattcttcttcgtcctgatacatatattgggtcagtggagccattgacgcagttcatgtgggtgtatgatgaagatgtaggaatgaattgcagggaggttacctttgtgccaggtttatacaagatctttgatgaaattttggttaatgctgctgacaataaacagagggataagaacatgacttgtattaaagtttctattgatcctgaatctaacattataagcatttggaataatgggaaaggcattccagtagtagaacacaaggtagagaaagtttatgttcctgctttaatttttggacagcttttaacatccagtaactatgatgatgatgagaaaaaagttacaggtggtcgtaatggttatggtgcaaaactttgtaatattttcagtacaaagtttacagtagaaacagcttgcaaagaatacaaacacagttttaagcagacatggatgaataatatgatgaagacttctgaagccaaaattaaacattttgatggtgaagattacacatgcataacattccaaccagatctgtccaaatttaagatggaaaaacttgacaaggatattgtggccctcatgactagaagggcatatgatttggctggttcgtgtagaggggtcaaggtcatgtttaatggaaagaaattgcctgtaaatggatttcgcagttatgtagatctttatgtgaaagacaaattggatgaaactggggtggccctgaaagttattcatgagcttgcaaatgaaagatgggatgtttgtctcacattgagtgaaaaaggattccagcaaatcagctttgtaaatagtattgcaactacaaaaggtggacggcacgtggattatgtggtagatcaagttgttggtaaactgattgaagtagttaagaaaaagaacaaagctggtgtatcagtgaaaccatttcaagtaaaaaaccatatatgggtttttattaattgccttattgaaaatccaacttttgattctcagactaaggaaaacatgactctgcagcccaaaagttttgggtctaaatgccagctgtcagaaaaattttttaaagcagcctctaattgtggcattgtagaaagtatcctgaactgggtgaaatttaaggctcagactcagctgaataagaagtgttcatcagtaaaatacagtaaaatcaaaggtattcccaaactggatgatgctaatgatgctggtggtaaacattccctggagtgtacactgatattaacagagggagactctgccaaatcactggctgtgtctggattaggtgtgattggacgagacagatacggagtttttccactcaggggcaaaattcttaatgtacgggaagcttctcataaacagatcatggaaaatgctgaaataaataatattattaaaatagttggtctacaatataagaaaagttacgatgatgcagaatctctgaaaaccttacgctatggaaagattatgattatgaccgatcaggatcaagatggttctcacataaaaggcctgcttattaatttcatccatcacaattggccatcacttttgaagcatggttttcttgaagagttcattactcctattgtaaaggcaagcaaaaataagcaggaactttccttctacagtattcctgaatttgacgaatggaaaaaacatatagaaaaccagaaagcctggaaaataaagtactataaaggattgggtactagtacagctaaagaagcaaaggaatattttgctgatatggaaaggcatcgcatcttgtttagatatgctggtcctgaagatgatgctgccattaccttggcatttagtaagaagaagattgatgacagaaaagaatggttaacaaattttatggaagaccggagacagcgtaggctacatggcttaccagagcaatttttatatggtactgcaacaaagcatttgacttataatgatttcatcaacaaggaattgattctcttctcaaactcagacaatgaaagatctataccatctcttgttgatggctttaaacctggccagcggaaagttttatttacctgtttcaagaggaatgataaacgtgaagtaaaagttgcccagttggctggctctgttgctgagatgtcggcttatcatcatggagaacaagcattgatgatgactattgtgaatttggctcagaactttgtgggaagtaacaacattaacttgcttcagcctattggtcagtttggaactcggcttcatggtggcaaagatgctgcaagccctcgttatattttcacaatgttaagcactttagcaaggctactttttcctgctgtggatgacaacctccttaagttcctttatgatgataatcaacgtgtagagcctgagtggtatattcctataattcccatggttttaataaatggtgctgagggcattggtactggatgggcttgtaaactacccaactatgatgctagggaaattgtgaacaatgtcagacgaatgctagatggcctggatcctcatcccatgcttccaaactacaaaaactttaaaggcacgattcaagaacttggtcaaaaccagtatgcagtcagtggtgaaatatttgtagtggacagaaacacagtagaaattacagagcttccagttagaacttggacacaggtatataaagaacaggttttagaacctatgctaaatggaacagataaaacaccagcattaatttctgattataaagaatatcatactgacacaactgtgaaatttgtggtgaaaatgactgaagagaaactagcacaagcagaagctgctggactgcataaagtttttaaacttcaaactactcttacttgtaattccatggtactttttgatcatatgggatgtctgaagaaatatgaaactgtgcaagacattctgaaagaattctttgatttacgattaagttattacggtttacgtaaggagtggcttgtgggaatgttgggagcagaatctacaaagcttaacaatcaagcccgtttcattttagagaagatacaagggaaaattactatagagaataggtcaaagaaagatttgattcaaatgttagtccagagaggttatgaatctgacccagtgaaagcctggaaagaagcacaagaaaaggcagcagaagaggatgaaacacaaaaccagcatgatgatagttcctccgattcaggaactccttcaggcccagattttaattatattttaaatatgtctctgtggtctcttactaaagaaaaagttgaagaactgattaaacagagagatgcaaaagggcgagaggtcaatgatcttaaaagaaaatctccttcagatctttggaaagaggatttagcggcatttgttgaagaactggataaagtggaatctcaagaacgagaagatgttctggctggaatgtctggaaaagcaattaaaggtaaagttggcaaacctaaggtgaagaaactccagttggaagagacaatgccctcaccttatggcagaagaataattcctgaaattacagctatgaaggcagatgccagcaaaaagttgctgaagaagaagaagggtgatcttgatactgcagcagtaaaagtggaatttgatgaagaattcagtggagcaccagtagaaggtgcaggagaagaggcattgactccatcagttcctataaataaaggtcccaaacctaagagggagaagaaggagcctggtaccagagtgagaaaaacacctacatcatctggtaaacctagtgcaaagaaagtgaagaaacggaatccttggtcagatgatgaatccaagtcagaaagtgatttggaagaaacagaacctgtggttattccaagagattctttgcttaggagagcagcagccgaaagacctaaatacacatttgatttctcagaagaagaggatgatgatgctgatgatgatgatgatgacaataatgatttagaggaattgaaagttaaagcatctcccataacaaatgatggggaagatgaatttgttccttcagatgggttagataaagatgaatatacattttcaccaggcaaatcaaaagccactccagaaaaatctttgcatgacaaaaaaagtcaggattttggaaatctcttctcatttccttcatattctcagaagtcagaagatgattcagctaaatttgacagtaatgaagaagattctgcttctgttttttcaccatcatttggtctgaaacagacagataaagttccaagtaaaacggtagctgctaaaaagggaaaaccgtcttcagatacagtccctaagcccaagagagccccaaaacagaagaaagtagtagaggctgtaaactctgactcggattcagaatttggcattccaaagaagactacaacaccaaaaggtaaaggccgaggggcaaagaaaaggaaagcatctggctctgaaaatgaaggcgattataaccctggcaggaaaacatccaaaacaacaagcaagaaaccgaagaagacatcttttgatcaggattcagatgtggacatcttcccctcagacttccctactgagccaccttctctgccacgaaccggtcgggctaggaaagaagtaaaatattttgcagagtctgatgaagaagaagatgatgttgattttgcaatgtttaattaagtgcccaaagagcacaaacatttttcaacaaatatcttgtgttgtccttttgtcttctctgtctcagacttttgtacatctggcttattttaatgtgatgatgtaattgacggttttttattattgtggtaggccttttaacattttgttcttacacatacagttttatgctcttttttactcattgaaatgtcacgtactgtctgattggcttgtagaattgttatagactgccgtgcattagcacagattttaattgtcatggttacaaactacagacctgctttttgaaatgaaatttaaacatt

SEQ ID NO: 4209 - DNA, 3525 bp, Homo sapiens
  source 1..3525: mol_type = genomic DNA
gtgtgtgcggtgttatgccggacaagagggagcggcggctgcggcctcagggcctgtgagctggaggcactcgccatggccaagtcgggtggctgcggcgcgggagccggcgtgggcggcggcaacggggcactgacctgggtgaacaatgctgcaaaaaaagaagagtcagaaactgccaacaaaaatgattcttcaaagaagttgtctgttgagagagtgtatcagaagaagacacaacttgaacacattcttcttcgtcctgatacatatattgggtcagtggagccattgacgcagttcatgtgggtgtatgatgaagatgtaggaatgaattgcagggaggttacctttgtgccaggtttatacaagatctttgatgaaattttggttaatgctgctgacaataaacagagggataagaacatgacttgtattaaagtttctattgatcctgaatctaacattataagcatttggaataatgggaaaggcattccagtagtagaacacaaggtagagaaagtttatgttcctgctttaatttttggacagcttttaacatccagtaactatgatgatgatgagaaaaaagttacaggtggtcgtaatggttatggtgcaaaactttgtaatattttcagtacaaagtttacagtagaaacagcttgcaaagaatacaaacacagttttaagcagacatggatgaataatatgatgaagacttctgaagccaaaattaaacattttgatggtgaagattacacatgcataacattccaaccagatctgtccaaatttaagatggaaaaacttgacaaggatattgtggccctcatgactagaagggcatatgatttggctggttcgtgtagaggggtcaaggtcatgtttaatggaaagaaattgcctgtaaatggatttcgcagttatgtagatctttatgtgaaagacaaattggatgaaactggggtggccctgaaagttattcatgagcttgcaaatgaaagatgggatgtttgtctcacattgagtgaaaaaggattccagcaaatcagctttgtaaatagtattgcaactacaaaaggtggacggcacgtggattatgtggtagatcaagttgttggtaaactgattgaagtagttaagaaaaagaacaaagctggtgtatcagtgaaaccatttcaagtaaaaaaccatatatgggtttttattaattgccttattgaaaatccaacttttgattctcagactaaggaaaacatgactctgcagcccaaaagttttgggtctaaatgccagctgtcagaaaaattttttaaagcagcctctaattgtggcattgtagaaagtatcctgaactgggtgaaatttaaggctcagactcagctgaataagaagtgttcatcagtaaaatacagtaaaatcaaaggtattcccaaactggatgatgctaatgatgctggtggtaaacattccctggagtgtacactgatattaacagagggagactctgccaaatcactggctgtgtctggattaggtgtgattggacgagacagatacggagtttttccactcaggggcaaaattcttaatgtacgggaagcttctcataaacagatcatggaaaatgctgaaataaataatattattaaaatagttggtctacaatataagaaaagttacgatgatgcagaatctctgaaaaccttacgctatggaaagattatgattatgaccgatcaggatcaagatggttctcacataaaaggcctgcttattaatttcatccatcacaattggccatcacttttgaagcatggttttcttgaagagttcattactcctattgtaaaggcaagcaaaaataagcaggaactttccttctacagtattcctgaatttgacgaatggaaaaaacatatagaaaaccagaaagcctggaaaataaagtactataaaggattgggtactagtacagctaaagaagcaaaggaatattttgctgatatggaaaggcatcgcatcttgtttagatatgctggtcctgaagatgatgctgccattaccttggcatttagtaagaagaagattgatgacagaaaagaatggttaacaaattttatggaagaccggagacagcgtaggctacatggcttaccagagcaatttttatatggtactgcaacaaagcatttgacttataatgatttcatcaacaaggaattgattctcttctcaaactcagacaatgaaagatctataccatctcttgttgatggctttaaacctggccagcggaaagttttatttacctgtttcaagaggaatgataaacgtgaagtaaaagttgcccagttggctggctctgttgctgagatgtcggcttatcatcatggagaacaagcattgatgatgactattgtgaatttggctcagaactttgtgggaagtaacaacattaacttgcttcagcctattggtcagtttggaactcggcttcatggtggcaaagatgctgcaagccctcgttatattttcacaatgttaagcactttagcaaggctactttttcctgctgtggatgacaacctccttaagttcctttatgatgataatcaacgtgtagagcctgagtggtatattcctataattcccatggttttaataaatggtgctgagggcattggtactggatgggcttgtaaactacccaactatgatgctagggaaattgtgaacaatgtcagacgaatgctagatggcctggatcctcatcccatgcttccaaactacaaaaactttaaaggcacgattcaagaacttggtcaaaaccagtatgcagtcagtggtgaaatatttgtagtggacagaaacacagtagaaattacagagcttccagttagaacttggacacaggtatataaagaacaggttttagaacctatgctaaatggaacagataaaacaccagcattaatttctgattataaagaatatcatactgacacaactgtgaaatttgtggtgaaaatgactgaagagaaactagcacaagcagaagctgctggactgcataaagtttttaaacttcaaactactcttacttgtaattccatggtactttttgatcatatgggatgtctgaagaaatatgaaactgtgcaagacattctgaaagaattctttgatttacgattaagttattacggtttacgtaaggagtggcttgtgggaatgttgggagcagaatctacaaagcttaacaatcaagcccgtttcattttagagaagatacaagggaaaattactatagagaataggtcaaagaaagatttgattcaaatgttagtccagagaggttatgaatctgacccagtgaaagcctggaaagaagcacaagaaaaggcagcagaagaggatgaaacacaaaaccagcatgatgatagttcctccgattcaggaactccttcaggcccagattttaattatattttaaatatgtctctgtggtctcttact

SEQ ID NO: 4210 - DNA, 5389 bp, Homo sapiens
  source 1..5389: mol_type = genomic DNA
tttgagggcagccggcggcgcggcctcctcagcgggctcggctggacgtccgctccggatcttcgcgatggggcgcgggggtcggcgcggctaggagtgcggcgagtggagcggtgggtgcggagcggcggggcccagcggcccgcagggaggcgggagcggcggctgcggcctcagggcctgtgagctggaggcactcgccatggccaagtcgggtggctgcggcgcgggagccggcgtgggcggcggcaacggggcactgacctgggtgaacaatgctgcaaaaaaagaagagtcagaaactgccaacaaaaatgattcttcaaagaagttgtctgttgagagagtgtatcagaagaagacacaacttgaacacattcttcttcgtcctgatacatatattgggtcagtggagccattgacgcagttcatgtgggtgtatgatgaagatgtaggaatgaattgcagggaggttacctttgtgccaggtttatacaagatctttgatgaaattttggttaatgctgctgacaataaacagagggataagaacatgacttgtattaaagtttctattgatcctgaatctaacattataagcatttggaataatgggaaaggcattccagtagtagaacacaaggtagagaaagtttatgttcctgctttaatttttggacagcttttaacatccagtaactatgatgatgatgagaaaaaagttacaggtggtcgtaatggttatggtgcaaaactttgtaatattttcagtacaaagtttacagtagaaacagcttgcaaagaatacaaacacagttttaagcagacatggatgaataatatgatgaagacttctgaagccaaaattaaacattttgatggtgaagattacacatgcataacattccaaccagatctgtccaaatttaagatggaaaaacttgacaaggatattgtggccctcatgactagaagggcatatgatttggctggttcgtgtagaggggtcaaggtcatgtttaatggaaagaaattgcctgtaaatggatttcgcagttatgtagatctttatgtgaaagacaaattggatgaaactggggtggccctgaaagttattcatgagcttgcaaatgaaagatgggatgtttgtctcacattgagtgaaaaaggattccagcaaatcagctttgtaaatagtattgcaactacaaaaggtggacggcacgtggattatgtggtagatcaagttgttggtaaactgattgaagtagttaagaaaaagaacaaagctggtgtatcagtgaaaccatttcaagtaaaaaaccatatatgggtttttattaattgccttattgaaaatccaacttttgattctcagactaaggaaaacatgactctgcagcccaaaagttttgggtctaaatgccagctgtcagaaaaattttttaaagcagcctctaattgtggcattgtagaaagtatcctgaactgggtgaaatttaaggctcagactcagctgaataagaagtgttcatcagtaaaatacagtaaaatcaaaggtattcccaaactggatgatgctaatgatgctggtggtaaacattccctggagtgtacactgatattaacagagggagactctgccaaatcactggctgtgtctggattaggtgtgattggacgagacagatacggagtttttccactcaggggcaaaattcttaatgtacgggaagcttctcataaacagatcatggaaaatgctgaaataaataatattattaaaatagttggtctacaatataagaaaagttacgatgatgcagaatctctgaaaaccttacgctatggaaagattatgattatgaccgatcaggatcaagatggttctcacataaaaggcctgcttattaatttcatccatcacaattggccatcacttttgaagcatggttttcttgaagagttcattactcctattgtaaaggcaagcaaaaataagcaggaactttccttctacagtattcctgaatttgacgaatggaaaaaacatatagaaaaccagaaagcctggaaaataaagtactataaaggattgggtactagtacagctaaagaagcaaaggaatattttgctgatatggaaaggcatcgcatcttgtttagatatgctggtcctgaagatgatgctgccattaccttggcatttagtaagaagaagattgatgacagaaaagaatggttaacaaattttatggaagaccggagacagcgtaggctacatggcttaccagagcaatttttatatggtactgcaacaaagcatttgacttataatgatttcatcaacaaggaattgattctcttctcaaactcagacaatgaaagatctataccatctcttgttgatggctttaaacctggccagcggaaagttttatttacctgtttcaagaggaatgataaacgtgaagtaaaagttgcccagttggctggctctgttgctgagatgtcggcttatcatcatggagaacaagcattgatgatgactattgtgaatttggctcagaactttgtgggaagtaacaacattaacttgcttcagcctattggtcagtttggaactcggcttcatggtggcaaagatgctgcaagccctcgttatattttcacaatgttaagcactttagcaaggctactttttcctgctgtggatgacaacctccttaagttcctttatgatgataatcaacgtgtagagcctgagtggtatattcctataattcccatggttttaataaatggtgctgagggcattggtactggatgggcttgtaaactacccaactatgatgctagggaaattgtgaacaatgtcagacgaatgctagatggcctggatcctcatcccatgcttccaaactacaaaaactttaaaggcacgattcaagaacttggtcaaaaccagtatgcagtcagtggtgaaatatttgtagtggacagaaacacagtagaaattacagagcttccagttagaacttggacacaggtatataaagaacaggttttagaacctatgctaaatggaacagataaaacaccagcattaatttctgattataaagaatatcatactgacacaactgtgaaatttgtggtgaaaatgactgaagagaaactagcacaagcagaagctgctggactgcataaagtttttaaacttcaaactactcttacttgtaattccatggtactttttgatcatatgggatgtctgaagaaatatgaaactgtgcaagacattctgaaagaattctttgatttacgattaagttattacggtttacgtaaggagtggcttgtgggaatgttgggagcagaatctacaaagcttaacaatcaagcccgtttcattttagagaagatacaagggaaaattactatagagaataggtcaaagaaagatttgattcaaatgttagtccagagaggttatgaatctgacccagtgaaagcctggaaagaagcacaagaaaaggcagcagaagaggatgaaacacaaaaccagcatgatgatagttcctccgattcaggaactccttcaggcccagattttaattatattttaaatatgtctctgtggtctcttactaaagaaaaagttgaagaactgattaaacagagagatgcaaaagggcgagaggtcaatgatcttaaaagaaaatctccttcagatctttggaaagaggatttagcggcatttgttgaagaactggataaagtggaatctcaagaacgagaagatgttctggctggaatgtctggaaaagcaattaaaggtaaagttggcaaacctaaggtgaagaaactccagttggaagagacaatgccctcaccttatggcagaagaataattcctgaaattacagctatgaaggcagatgccagcaaaaagttgctgaagaagaagaagggtgatcttgatactgcagcagtaaaagtggaatttgatgaagaattcagtggagcaccagtagaaggtgcaggagaagaggcattgactccatcagttcctataaataaaggtcccaaacctaagagggagaagaaggagcctggtaccagagtgagaaaaacacctacatcatctggtaaacctagtgcaaagaaagtgaagaaacggaatccttggtcagatgatgaatccaagtcagaaagtgatttggaagaaacagaacctgtggttattccaagagattctttgcttaggagagcagcagccgaaagacctaaatacacatttgatttctcagaagaagaggatgatgatgctgatgatgatgatgatgacaataatgatttagaggaattgaaagttaaagcatctcccataacaaatgatggggaagatgaatttgttccttcagatgggttagataaagatgaatatacattttcaccaggcaaatcaaaagccactccagaaaaatctttgcatgacaaaaaaagtcaggattttggaaatctcttctcatttccttcatattctcagaagtcagaagatgattcagctaaatttgacagtaatgaagaagattctgcttctgttttttcaccatcatttggtctgaaacagacagataaagttccaagtaaaacggtagctgctaaaaagggaaaaccgtcttcagatacagtccctaagcccaagagagccccaaaacagaagaaagtagtagaggctgtaaactctgactcggattcagaatttggcattccaaagaagactacaacaccaaaaggtaaaggccgaggggcaaagaaaaggaaagcatctggctctgaaaatgaaggcgattataaccctggcaggaaaacatccaaaacaacaagcaagaaaccgaagaagacatcttttgatcaggattcagatgtggacatcttcccctcagacttccctactgagccaccttctctgccacgaaccggtcgggctaggaaagaagtaaaatattttgcagagtctgatgaagaagaagatgatgttgattttgcaatgtttaattaagtgcccaaagagcacaaacatttttcaacaaatatcttgtgttgtccttttgtcttctctgtctcagacttttgtacatctggcttattttaatgtgatgatgtaattgacggttttttattattgtggtaggccttttaacattttgttcttacacatacagttttatgctcttttttactcattgaaatgtcacgtactgtctgattggcttgtagaattgttatagactgccgtgcattagcacagattttaattgtcatggttacaaactacagacctgctttttgaaatgaaatttaaacattaaaaatggaactg

SEQ ID NO: 4211 - DNA, 551 bp, Homo sapiens
  source 1..551: mol_type = genomic DNA
gtgtgtgcggtgttatgccggacaagagggaggtgaccgtggcggcggcggcggcggctctgtttattgtccctctcggtgtgtgtgtgtgaggaaatcggggctgcagcgaggctaaggctgcctttgaagcagcggcggcgaccgggacgactactctggcaacggggcactgacctgggtgactctttttgatcagaacaatgctgcaaaaaaagaagagtcagaaactgccaacaaaaatgattcttcaaagaagttgtctgttgagagagtgtatcagaagaagacacaacttgaacacattcttcttcgtcctgatacatatattgggtcagtggagccattgacgcagttcatgtgggtgtatgatgaagatgtaggaatgaattgcagggaggttacctttgtgccaggtttatacaagatctttgatgaaattttggttaatgctgctgacaataaacagagggataagaacatgacttgtattaaagtttctattgatcctgaatctaacattataagcatttggaataatgggaaaggca

SEQ ID NO: 4212 - DNA, 1897 bp, Homo sapiens
  source 1..1897: mol_type = genomic DNA
tctgacaagatgcagtgataaaacattaattctactctcttaactttaaaatgtggtatcctctcattttgttactgagtacctgaggaaatcagttaatttttcatcagattcctggataaatagggatagtgtataccattccttctgaagatcttattgcagcagaagaggatgaaacacaaaaccagcatgatgatagttcctccgattcaggaactccttcaggcccagattttaattatattttaaatatgtctctgtggtctcttactaaagaaaaagttgaagaactgattaaacagagagatgcaaaagggcgagaggtcaatgatcttaaaagaaaatctccttcagatctttggaaagaggatttagcggcatttgttgaagaactggataaagtggaatctcaagaacgagaagatgttctggctggaatgtctggaaaagcaattaaaggtaaagttggcaaacctaaggtgaagaaactccagttggaagagacaatgccctcaccttatggcagaagaataattcctgaaattacagctatgaaggcagatgccagcaaaaagttgctgaagaagaagaagggtgatcttgatactgcagcagtaaaagtggaatttgatgaagaattcagtggagcaccagtagaaggtgcaggagaagaggcattgactccatcagttcctataaataaaggtcccaaacctaagagggagaagaaggagcctggtaccagagtgagaaaaacacctacatcatctggtaaacctagtgcaaagaaagtgaagaaacggaatccttggtcagatgatgaatccaagtcagaaagtgatttggaagaaacagaacctgtggttattccaagagattctttgcttaggagagcagcagccgaaagacctaaatacacatttgatttctcagaagaagaggatgatgatgctgatgatgatgatgatgacaataatgatttagaggaattgaaagttaaagcatctcccataacaaatgatggggaagatgaatttgttccttcagatgggttagataaagatgaatatacattttcaccaggcaaatcaaaagccactccagaaaaatctttgcatgacaaaaaaagtcaggattttggaaatctcttctcatttccttcatattctcagaagtcagaagatgattcagctaaatttgacagtaatgaagaagattctgcttctgttttttcaccatcatttggtctgaaacagacagataaagttccaagtaaaacggtagctgctaaaaagggaaaaccgtcttcagatacagtccctaagcccaagagagccccaaaacagaagaaagtagtagaggctgtaaactctgactcggattcagaatttggcattccaaagaagactacaacaccaaaaggtaaaggccgaggggcaaagaaaaggaaagcatctggctctgaaaatgaaggcgattataaccctggcaggaaaacatccaaaacaacaagcaagaaaccgaagaagacatcttttgatcaggattcagatgtggacatcttcccctcagacttccctactgagccaccttctctgccacgaaccggtcgggctaggaaagaagtaaaatattttgcagagtctgatgaagaagaagatgatgttgattttgcaatgtttaattaagtgcccaaagagcacaaacatttttcaacaaatatcttgtgttgtccttttgtcttctctgtctcagacttttgtacatctggcttattttaatgtgatgatgtaattgacggttttttattattgtggtaggccttttaacattttgttcttacacatacagttttatgctcttttttactcattgaaatgtcacgtactgtctg

SEQ ID NO: 4213 - DNA, 2061 bp, Homo sapiens
  source 1..2061: mol_type = genomic DNA
tgtaattccatggtactttttgatcatatgggatgtctgaagaaatatgaaactgtgcaagacattctgaaagaattctttgatttacgattaagttattacggtttacgtaaggagtggcttgtgggaatgttgggagcagaatctacaaagcttaacaatcaagcccgtttcattttagagaagatacaagggaaaattactataggcagcagaagaggatgaaacacaaaaccagcatgatgatagttcctccgattcaggaactccttcaggcccagattttaattatattttaaatatgtctctgtggtctcttactaaagaaaaagttgaagaactgattaaacagagagatgcaaaagggcgagaggtcaatgatcttaaaagaaaatctccttcagatctttggaaagaggatttagcggcatttgttgaagaactggataaagtggaatctcaagaacgagaagatgttctggctggaatgtctggaaaagcaattaaaggtaaagttggcaaacctaaggtgaagaaactccagttggaagagacaatgccctcaccttatggcagaagaataattcctgaaattacagctatgaaggcagatgccagcaaaaagttgctgaagaagaagaagggtgatcttgatactgcagcagtaaaagtggaatttgatgaagaattcagtggagcaccagtagaaggtgcaggagaagaggcattgactccatcagttcctataaataaaggtcccaaacctaagagggagaagaaggagcctggtaccagagtgagaaaaacacctacatcatctggtaaacctagtgcaaagaaagtgaagaaacggaatccttggtcagatgatgaatccaagtcagaaagtgatttggaagaaacagaacctgtggttattccaagagattctttgcttaggagagcagcagccgaaagacctaaatacacatttgatttctcagaagaagaggatgatgatgctgatgatgatgatgatgacaataatgatttagaggaattgaaagttaaagcatctcccataacaaatgatggggaagatgaatttgttccttcagatgggttagataaagatgaatatacattttcaccaggcaaatcaaaagccactccagaaaaatctttgcatgacaaaaaaagtcaggattttggaaatctcttctcatttccttcatattctcagaagtcagaagatgattcagctaaatttgacagtaatgaagaagattctgcttctgttttttcaccatcatttggtctgaaacagacagataaagttccaagtaaaacggtagctgctaaaaagggaaaaccgtcttcagatacagtccctaagcccaagagagccccaaaacagaagaaagtagtagaggctgtaaactctgactcggattcagaatttggcattccaaagaagactacaacaccaaaaggtaaaggccgaggggcaaagaaaaggaaagcatctggctctgaaaatgaaggcgattataaccctggcaggaaaacatccaaaacaacaagcaagaaaccgaagaagacatcttttgatcaggattcagatgtggacatcttcccctcagacttccctactgagccaccttctctgccacgaaccggtcgggctaggaaagaagtaaaatattttgcagagtctgatgaagaagaagatgatgttgattttgcaatgtttaattaagtgcccaaagagcacaaacatttttcaacaaatatcttgtgttgtccttttgtcttctctgtctcagacttttgtacatctggcttattttaatgtgatgatgtaattgacggttttttattattgtggtaggccttttaacattttgttcttacacatacagttttatgctcttttttactcattgaaatgtcacgtactgtctgattggcttgtagaattgttatagactgccgtgcattagcacagattttaattgtcatggttacaaactacagacctgctttttgaaatgaaatttaaacattaaaaatggaactgtg

SEQ ID NO: 4214 - DNA, 3786 bp, Homo sapiens
  source 1..3786: mol_type = genomic DNA
ctggattcggtgctgaggcggcggctgcggcacgggaaaggctcagtgactgaagctccaaaggccagcaggctggtggggacgtgaccgaagcgaggctctggttccctttcggtgggcgccatttgagcctcatctctggcttccccaggatgcgccggcagccggggagcggctccgggcgcgaggtctgaggatgatctttcctgtcgcccgctacgcgctccggtggctgcgacggcccgaagaccgtgccttttcccgcgccgccatggagatggccctccgaggcgtgcggaaagtcctctgtgtggccgaaaaaaacgacgcggccaaggggatcgccgacctgctgtcaaacggtcgcatgaggcggagagaaggactttcaaaattcaacaagatctatgaatttgattatcatctgtatggccagaatgttaccatggtaatgacttcagtttctggacatttactggctcatgatttccagatgcagtttcgaaaatggcagagctgcaaccctcttgtcctctttgaagcagaaattgaaaagtactgcccagagaattttgtagacatcaagaaaactttggaacgagagactcgccagtgccaggctctggtgatctggactgactgtgatagagaaggcgaaaacatcgggtttgagattatccacgtgtgtaaggctgtaaagcccaatctgcaggtgttgcgagcccgattctctgagatcacaccccatgccgtcaggacagcttgtgaaaacctgaccgagcctgatcagagggtgagcgatgctgtggatgtgaggcaggagctggacctgaggattggagctgcctttactaggttccagaccctgcggcttcagaggatttttcctgaggtgctggcagagcagctcatcagttacggcagctgccagttccccacactgggctttgtggtggagcggttcaaagccattcaggcttttgtaccagaaatcttccacagaattaaagtaactcatgaccacaaagatggtatcgtagaattcaactggaaaaggcatcgactctttaaccacacggcttgcctagttctctatcagttgtgtgtggaggatcccatggcaactgtggtagaggtcagatctaagcccaagagcaagtggcggcctcaagccttggacactgtggagcttgagaagctggcttctcgaaagttgagaataaatgctaaagaaaccatgaggattgctgagaagctctacactcaagggtacatcagctatccccgaacagaaacaaacatttttcccagagacttaaacctgacggtgttggtggaacagcagacccccgatccacgctggggggcctttgcccagagcattctagagcggggtggtcccaccccacgcaatgggaacaagtctgaccaagctcaccctcccattcaccccaccaaatacaccaacaacttacagggagatgaacagcgactgtacgagtttattgttcgccatttcctggcttgctgctcccaggatgctcaggggcaggagaccacagtggagatcgacatcgctcaggaacgctttgtggcccatggcctcatgattctggcccgaaactatctggatgtgtatccatatgatcactggagtgacaagatcctccctgtctatgagcaaggatcccactttcagcccagcaccgtggagatggtggacggggagaccagcccacccaagctgctcaccgaggccgacctcattgccctcatggagaagcatggcattggtacggatgccactcatgcggagcacatcgagaccatcaaagcccggatgtacgtgggcctcaccccagacaagcggttcctccctgggcacctgggcatgggacttgtggaaggttatgattccatgggctatgaaatgtctaagcctgacctccgggctgaactggaagctgatctgaagctgatctgtgatggcaaaaaggacaaatttgtggttctaaggcagcaagtgcagaaatacaagcaggttttcattgaagcggtggctaaagcaaagaaattggacgaggccttggcccagtactttgggaatgggacagagttggcccagcaagaagatatctacccagccatgccagagcccatcaggaagtgcccacagtgcaacaaggacatggtccttaagaccaagaagaatggcgggttctacctcagctgcatgggtttcccagagtgtcgctcagctgtgtggcttcctgactcggtgctggaggccagcagggacagcagtgtgtgtccagtttgtcagccacaccctgtgtacaggttaaagttaaagtttaagcgcggtagccttcccccgaccatgcctctggagtttgtttgctgcatcggcggatgcgacgacaccctgagggagatcctggacctgagattttcagggggcccccccagggctagccagccctctggccgcctgcaggctaaccagtccctgaacaggatggacaacagccagcacccccagcctgctgacagcagacagactgggtcctcaaaggctctggcccagaccctcccaccacccacggctgctggtgaaagcaattctgtgacctgcaactgtggccaggaggctgtgctgctcactgtccgtaaggagggccccaaccggggccggcagttctttaagtgcaacggaggtagctgcaacttcttcctgtgggcagacagccccaatccgggagcaggagggcctcctgccttggcatatagacccctgggcgcctccctgggatgcccaccaggcccagggatccacctaggtgggtttggcaaccctggtgatggcagtggtagtggcacatcctgcctttgcagccagccctccgtcacacggactgtgcagaaggatggacccaacaaggggcgccagttccacacatgtgccaagccgagagagcagcagtgtggctttttccagtgggtcgatgagaacaccgctccagggacttctggagccccgtcctggacaggagacagaggaagaaccctggagtcggaagccagaagcaaaaggccccgggccagttcctcagacatggggtccacagcaaagaaaccccggaaatgcagcctttgccaccagcctggacacacccgtcccttttgtcctcagaacagatgagctcagggtagggtagagaacgccactttctcagacctgtcccctttgtgtttagaaatgagttaaccaggaccaagtggccatttagtgtcctggaaacttagaggacagtgttggcctttggagtcgggccttcttgtgttaaggggcacaaggtccagatcactctggagcaggccagctctgctggacagtgaccctcttcccaggcctcaggagtgaccatagccactgctgaaaagtcacgcagctgctccctcggaccccccaaggatggttgctgttagcagaggattggtgcagtcccagctgaagcccactgtgtgccaaaggaagaagctcccagggctgcttccttcacctgcagaaagccccaagtgagccaccagcactcatggggcagtccctgtccaggctgcccagggcttctcatagacgtcctgagaaggacggtgtaatgcaaggaaatggctgtggtaacactgatccttcagaagaagcttcattccctcttaatctagttaagccaggacatccagaattcattgctttaataaagaacccaggccgggtgcagtggctca

SEQ ID NO: 4215 - DNA, 1581 bp, Homo sapiens
  source 1..1581: mol_type = genomic DNA
ttcccgcgccgccatggagatggccctccgaggcgtgcggaaagtcctctgtgtggccgaaaaaaacgacgcggccaaggggatcgccgacctgctgtcaaacggtcgcatgaggcggagagaaggactttcaaaattcaacaagatctatgaatttgattatcatctgtatggccagaatgttaccatggtaatgacttcagtttctggacatttactggctcatgatttccagatgcagtttcgaaaatggcagagctgcaaccctcttgtcctctttgaagcagaaattgaaaagtactgcccagagaattttgtagacatcaagaaaactttggaacgagagactcgccagtgccaggctctggtgatctggactgactgtgatagagaaggcgaaaacatcgggtttgagattatccacgtgtgtaaggctgtaaagcccaatctgcaggtgttgcgagcccgattctctgagatcacaccccatgccgtcaggacagcttgtgaaaacctgaccgagcctgatcagagggtgagcgatgctgtggatgtgaggcaggagctggacctgaggattggagctgcctttactaggttccagaccctgcggcttcagaggatttttcctgaggtgctggcagagcagctcatcagttacggcagctgccagttccccacactgggctttgtggtggagcggttcaaagccattcaggcttttgtaccagaaatcttccacagaattaaagtaactcatgaccacaaagatggtatcgtagaattcaactggaaaaggcatcgactctttaaccacacggcttgcctagttctctatcagttgtgtgtggaggatcccatggcaactgtggtagaggtcagatctaagcccaagagcaagtggcggcctcaagccttggacactgtggagcttgagaagctggcttctcgaaagttgagaataaatgctaaagaaaccatgaggattgctgagaagctctacactcaagggtacatcagctatccccgaacagaaacaaacatttttcccagagacttaaacctgacggtgttggtggaacagcagacccccgatccacgctggggggcctttgcccagagcattctagagcggggtggtcccaccccacgcaatgggaacaagtgatctaccagcctcggcctcccaaagtgctaggattaacaggcaggagccatcacacctggtctcttcccccatttttaaattgtgttgtctgtctttgttgttgagttgtaggagttcttaatagtttctggatatcagatgcctttgtggttttcacatctctgcaggcaactgtgtgtctcaaaagcaaactgcaggattgggctgcaccatggactgggccaggcatctgagatcagacagacccaggctcagctcccacttcctggcctcttctgccaccctgggtgtgcagcctcatccttggagccccagttgcctcatccgtaatggggtgtccttgttcatattgaggctctctagtgaaggcttacggtcaggcacgactgcaaattaaagcttcacaaatcaaa

SEQ ID NO: 4216 - DNA, 1951 bp, Homo sapiens
  source 1..1951: mol_type = genomic DNA
cagatctaagcccaagagcaagtggcggcctcaagccttggacactgtggagcttgagaagctggcttctcgaaagttgagaataaatgctaaagaaaccatgaggattgctgagaagctctacactcaaggggagatgaacagcgactgtacgagtttattgttcgccatttcctggcttgctgctcccaggatgctcaggggcaggagaccacagtggagatcgacatcgctcaggaacgctttgtggcccatggcctcatgattctggcccgaaactatctggatgtgtatccatatgatcactggagtgacaagatcctccctgtctatgagcaaggatcccactttcagcccagcaccgtggagatggtggacggggagaccagcccacccaagctgctcaccgaggccgacctcattgccctcatggagaagcatggcattggtacggatgccactcatgcggagcacatcgagaccatcaaagcccggatgtacgtgggcctcaccccagacaagcggttcctccctgggcacctgggcatgggacttgtggaaggttatgattccatgggctatgaaatgtctaagcctgacctccgggctgaactggaagctgatctgaagctgatctgtgatggcaaaaaggacaaatttgtggttctaaggcagcaagtgcagaaatacaagcaggttttcattgaagcggtggctaaagcaaagaaattggacgaggccttggcccagtactttgggaatgggacagagttggcccagcaagaagatatctacccagccatgccagagcccatcaggaagtgcccacagtgcaacaaggacatggtccttaagaccaagaagaatggcgggttctacctcagctgcatgggtttcccagagtgtcgctcagctgtgtggcttcctgactcggtgctggaggccagcagggacagcagtgtgtgtccagtttgtcagccacaccctgtgtacaggttaaagttaaagtttaagcgcggtagccttcccccgaccatgcctctggagtttgtttgctgcatcggcggatgcgacgacaccctgagggagatcctggacctgagattttcagggggcccccccagggctagccagccctctggccgcctgcaggctaaccagtccctgaacaggatggacaacagccagcacccccagcctgctgacagcagacagactgggtcctcaaaggctctggcccagaccctcccaccacccacggctgctggtgaaagcaattctgtgacctgcaactgtggccaggaggctgtgctgctcactgtccgtaaggagggccccaaccggggccggcagttctttaagtgcaacggaggtagctgcaacttcttcctgtgggcagacagccccaatccgggagcaggagggcctcctgccttggcatatagacccctgggcgcctccctgggatgcccaccaggcccagggatccacctaggtgggtttggcaaccctggtgatggcagtggtagtggcacatcctgcctttgcagccagccctccgtcacacggactgtgcagaaggatggacccaacaaggggcgccagttccacacatgtgccaagccgagagagcagcagtgtggctttttccagtgggtcgatgagaacaccgctccagggacttctggagccccgtcctggacaggagacagaggaagaaccctggagtcggaagccagaagcaaaaggccccgggccagttcctcagacatggggtccacagcaaagaaaccccggaaatgcagcctttgccaccagcctggacacacccgtcccttttgtcctcagaacagatgagctcagggtagggtagagaacgccactttctcagacctgtcccctttgtgtttagaaatgagttaaccaggaccaagtggccatttagtgtcct

SEQ ID NO: 4217 - DNA, 3156 bp, Homo sapiens
  source 1..3156: mol_type = genomic DNA
tgaagctccaaaggccagcaggctggtggggacgtgaccgaagcgaggctctggttccctttcggtgggcgccatttgagcctcatctctggcttccccaggatgcgccggcagccggggagcggctccgggcgcgaggtctgaggatgatctttcctgtcgcccgctacgcgctccggtggctgcgacggcccgaagaccgtgccttttcccgcgccgccatggagatggccctccgaggcgtgcggaaagtcctctgtgtggccgaaaaaaacgacgcggccaaggggatcgccgacctgctgtcaaacggtcgcatgaggcggagagaaggactttcaaaattcaacaagatctatgaatttgattatcatctgtatggccaggcagagctgcaaccctcttgtcctctttgaagcagaaattgaaaagtactgcccagagaattttgtagacatcaagaaaactttggaacgagagactcgccagtgccaggctctggtgatctggactgactgtgatagagaaggcgaaaacatcgggtttgagattatccacgtgtgtaaggctgtaaagcccaatctgcaggtgttgcgagcccgattctctgagatcacaccccatgccgtcaggacagcttgtgaaaacctgaccgagcctgatcagagggtgagcgatgctgtggatgtgaggcaggagctggacctgaggattggagctgcctttactaggttccagaccctgcggcttcagaggatttttcctgaggtgctggcagagcagctcatcagttacggcagctgccagttccccacactgggctttgtggtggagcggttcaaagccattcaggcttttgtaccagaaatcttccacagaattaaagtaactcatgaccacaaagatggtatcgtagaattcaactggaaaaggcatcgactctttaaccacacggcttgcctagttctctatcagttgtgtgtggaggatcccatggcaactgtggtagaggtcagatctaagcccaagagcaagtggcggcctcaagccttggacactgtggagcttgagaagctggcttctcgaaagttgagaataaatgctaaagaaaccatgaggattgctgagaagctctacactcaagggtacatcagctatccccgaacagaaacaaacatttttcccagagacttaaacctgacggtgttggtggaacagcagacccccgatccacgctggggggcctttgcccagagcattctagagcggggtggtcccaccccacgcaatgggaacaagtctgaccaagctcaccctcccattcaccccaccaaatacaccaacaacttacagggagatgaacagcgactgtacgagtttattgttcgccatttcctggcttgctgctcccaggatgctcaggggcaggagaccacagtggagatcgacatcgctcaggaacgctttgtggcccatggcctcatgattctggcccgaaactatctggatgtgtatccatatgatcactggagtgacaagatcctccctgtctatgagcaaggatcccactttcagcccagcaccgtggagatggtggacggggagaccagcccacccaagctgctcaccgaggccgacctcattgccctcatggagaagcatggcattggtacggatgccactcatgcggagcacatcgagaccatcaaagcccggatgtacgtgggcctcaccccagacaagcggttcctccctgggcacctgggcatgggacttgtggaaggttatgattccatgggctatgaaatgtctaagcctgacctccgggctgaactggaagctgatctgaagctgatctgtgatggcaaaaaggacaaatttgtggttctaaggcagcaagtgcagaaatacaagcaggttttcattgaagcggtggctaaagcaaagaaattggacgaggccttggcccagtactttgggaatgggacagagttggcccagcaagaagatatctacccagccatgccagagcccatcaggaagtgcccacagtgcaacaaggacatggtccttaagaccaagaagaatggcgggttctacctcagctgcatgggtttcccagagtgtcgctcagctgtgtggcttcctgactcggtgctggaggccagcagggacagcagtgtgtgtccagtttgtcagccacaccctgtgtacaggttaaagttaaagtttaagcgcggtagccttcccccgaccatgcctctggagtttgtttgctgcatcggcggatgcgacgacaccctgagggagatcctggacctgagattttcagggggcccccccagggctagccagccctctggccgcctgcaggctaaccagtccctgaacaggatggacaacagccagcacccccagcctgctgacagcagacagactgggtcctcaaaggctctggcccagaccctcccaccacccacggctgctggtgaaagcaattctgtgacctgcaactgtggccaggaggctgtgctgctcactgtccgtaaggagggccccaaccggggccggcagttctttaagtgcaacggaggtagctgcaacttcttcctgtgggcagacagccccaatccgggagcaggagggcctcctgccttggcatatagacccctgggcgcctccctgggatgcccaccaggcccagggatccacctaggtgggtttggcaaccctggtgatggcagtggtagtggcacatcctgcctttgcagccagccctccgtcacacggactgtgcagaaggatggacccaacaaggggcgccagttccacacatgtgccaagccgagagagcagcagtgtggctttttccagtgggtcgatgagaacaccgctccagggacttctggagccccgtcctggacaggagacagaggaagaaccctggagtcggaagccagaagcaaaaggccccgggccagttcctcagacatggggtccacagcaaagaaaccccggaaatgcagcctttgccaccagcctggacacacccgtcccttttgtcctcagaacagatgagctcagggtagggtagagaacgccactttctcagacctgtcccctttgtgtttagaaatgagttaaccaggaccaagt

SEQ ID NO: 4218 - DNA, 2863 bp, Homo sapiens
  source 1..2863: mol_type = genomic DNA
gccagaagcggctggacccggaaataggggttgtcggtagccgccccgggaacaaggaccggagctggatccgcggtgcggctgtgggagtcagcattggtaatagtgctgtgctgcggaagagtggagtctaaactttttcattgccagtgccccgaaactggagtgtgaaggaccgagacaaaatgaagactgtgctcatggttgctgaaaagccgtccttggcacagtcaattgccaaaatcctctctagagggagcctgtcctcacacaaagggctgaacggggcctgctcagtccacgagtacactgggacctttgctggccagccagtgcgcttcaagatgacgtctgtctgtggtcacgtgatgaccctggatttcctgggaaaatacaacaaatgggacaaagtggaccccgcagaactgttcagccaagctcccacggagaagaaagaagctaaccccaagctgaacatggtgaagttcctgcaggtggagggcagaggctgcgactacatcgtgctgtggctggactgcgacaaggagggggagaacatctgctttgaggttcttgatgctgttctgcccgtcatgaacaaggcccatggtggcgagaagaccgtgttccgggccaggtttagctccatcacggacacagacatctgtaatgccatggcctgcctaggcgagcctgaccacaacgaggcgctctcagtggatgctcgccaggagctggacctgcgaatcggctgtgcattcaccaggtttcagactaaatatttccaggggaaatacggtgatttagacagctctctcatctcctttgggccgtgtcagactccaaccctgggattctgtgtggagagacatgataaaatccagtccttcaaaccagagacctactgggtgctgcaggccaaggttaacactgacaaagacagatctctccttttggactgggaccgagtaagagtgtttgaccgggagatcgcacagatgtttttaaacatgacaaagctggagaaggaagcccaggtggaggccacaagcaggaaagaaaaggccaagcagaggcccctggccctgaacactgtggagatgctgcgtgtggccagctcttctctgggcatggggccgcagcacgccatgcagacggctgagcggctctacacgcaaggctacatcagctacccacggacagagaccacccactaccctgagaactttgacctgaagggctctctgcggcagcaggccaaccacccctactgggccgacacggtgaagcggttgttagcagaaggtatcaaccgcccgcggaaaggccatgacgccggcgaccatccccccatcacccccatgaagtctgccacagaggccgaattagggggtgacgcgtggcggctctatgagtacatcaccagacacttcatcgccacggtcagccatgactgcaagtacctgcagagcaccatctccttcagaattgggcccgagctcttcacctgctccgggaagaccgtcctctcaccaggcttcacggaggtcatgccctggcagagcgtgcccctggaggagagcctgcccacttgccagcggggtgatgccttccctgtgggcgaggtgaagatgctggagaagcagacgaacccacccgactacctgacggaggccgagctcatcacgctcatggagaagcatggcatcggcacggatgccagcatccctgtgcatatcaacaacatctgccagcgcaactatgtcacggtggagagcgggcgccggctcaagcccaccaacctcggcatcgtcctggtgcacggctactataagattgatgcagagctggtgctccccaccatccgcagtgcagtggagaagcagctgaacctgatcgcccagggcaaggccgactaccgccaggtcctgggccacaccctggacgtgttcaagaggaagttccactactttgtcgactccattgctggcatggatgagttgatggaggtgtctttctcgcccctggcggccacaggcaagcccctctcacgctgtgggaagtgccaccgcttcatgaagtacatccaggccaagccaagccgcctgcactgctcccactgcgatgagacctacacgctcccccagaacggcaccatcaagctctacaaggagctccgctgccctctggatgacttcgagctggtcctgtggtcatcaggctctcggggcaagagctacccgctgtgcccctactgctacaaccacccacccttccgagacatgaagaaaggcatgggctgcaacgagtgtacgcacccctcctgccagcactcgctgagcatgctgggcatcggccagtgcgtggaatgtgagagcggggtgctggtgctggaccccacctcgggccccaagtggaaggtggcctgcaacaagtgcaacgtggtagcgcactgcttcgagaacgcccaccgcgtgcgggtgtccgccgacacctgcagtgtctgtgaggccgccttgcttgatgtggacttcaacaaggccaagtccccactcccgggcgatgagacgcagcacatgggctgcgtcttttgtgaccccgtcttccaggagctggtggagctgaagcatgcggcctcctgccaccccatgcaccgcggtggaccagggagaaggcagggtcgagggcggggccgggccaggaggccccctgggaagcccaaccccagacggcccaaggacaagatgtcagccctggccgcctactttgtatgatgaccctgtcctccctcacccaggctgcagtgccatgcagacacctcatggcacttcaaactattaaaatgcattttatcttatccaga

SEQ ID NO: 4219 - DNA, 3107 bp, Homo sapiens
  source 1..3107: mol_type = genomic DNA
ggatccgcggtgcggctgtgggtgagcggcgggctgcgggaccctcgcccggcggctcagaaaggcgggaagcgcacgcatttttctggcttgtttcctgaacgttggccggcggaggacccgcgagctcgggagagcgcccgggccgggctctgcattcttgttgcctcttccctggcgggggtgatactctcccgcggggcttgctgtgggggttcagggaggtggagatgggcccgccatgtgcctgcagggagcaggcgctgtggttaatacttttcttcttcgaaccctcccacagctctttagggtgagatctgctgtaccagtctcacaggagtcagcattggtaatagtgctgtgctgcggaagagtggagtctaaactttttcattgccagtgccccgaaactggagtgtgaaggaccgagacaaaatgaagactgtgctcatggttgctgaaaagccgtccttggcacagtcaattgccaaaatcctctctagagggagcctgtcctcacacaaagggctgaacggggcctgctcagtccacgagtacactgggacctttgctggccagccagtgcgcttcaagatgacgtctgtctgtggtcacgtgatgaccctggatttcctgggaaaatacaacaaatgggacaaagtggaccccgcagaactgttcagccaagctcccacggagaagaaagaagctaaccccaagctgaacatggtgaagttcctgcaggtggagggcagaggctgcgactacatcgtgctgtggctggactgcgacaaggagggggagaacatctgctttgaggttcttgatgctgttctgcccgtcatgaacaaggcccatggtggcgagaagaccgtgttccgggccaggtttagctccatcacggacacagacatctgtaatgccatggcctgcctaggcgagcctgaccacaacgaggcgctctcagtggatgctcgccaggagctggacctgcgaatcggctgtgcattcaccaggtttcagactaaatatttccaggggaaatacggtgatttagacagctctctcatctcctttgggccgtgtcagactccaaccctgggattctgtgtggagagacatgataaaatccagtccttcaaaccagagacctactgggtgctgcaggccaaggttaacactgacaaagacagatctctccttttggactgggaccgagtaagagtgtttgaccgggagatcgcacagatgtttttaaacatgacaaagctggagaaggaagcccaggtggaggccacaagcaggaaagaaaaggccaagcagaggcccctggccctgaacactgtggagatgctgcgtgtggccagctcttctctgggcatggggccgcagcacgccatgcagacggctgagcggctctacacgcaaggctacatcagctacccacggacagagaccacccactaccctgagaactttgacctgaagggctctctgcggcagcaggccaaccacccctactgggccgacacggtgaagcggttgttagcagaaggtatcaaccgcccgcggaaaggccatgacgccggcgaccatccccccatcacccccatgaagtctgccacagaggccgaattagggggtgacgcgtggcggctctatgagtacatcaccagacacttcatcgccacggtcagccatgactgcaagtacctgcagagcaccatctccttcagaattgggcccgagctcttcacctgctccgggaagaccgtcctctcaccaggcttcacggaggtcatgccctggcagagcgtgcccctggaggagagcctgcccacttgccagcggggtgatgccttccctgtgggcgaggtgaagatgctggagaagcagacgaacccacccgactacctgacggaggccgagctcatcacgctcatggagaagcatggcatcggcacggatgccagcatccctgtgcatatcaacaacatctgccagcgcaactatgtcacggtggagagcgggcgccggctcaagcccaccaacctcggcatcgtcctggtgcacggctactataagattgatgcagagctggtgctccccaccatccgcagtgcagtggagaagcagctgaacctgatcgcccagggcaaggccgactaccgccaggtcctgggccacaccctggacgtgttcaagaggaagttccactactttgtcgactccattgctggcatggatgagttgatggaggtgtctttctcgcccctggcggccacaggcaagcccctctcacgctgtgggaagtgccaccgcttcatgaagtacatccaggccaagccaagccgcctgcactgctcccactgcgatgagacctacacgctcccccagaacggcaccatcaagctctacaaggagctccgctgccctctggatgacttcgagctggtcctgtggtcatcaggctctcggggcaagagctacccgctgtgcccctactgctacaaccacccacccttccgagacatgaagaaaggcatgggctgcaacgagtgtacgcacccctcctgccagcactcgctgagcatgctgggcatcggccagtgcgtggaatgtgagagcggggtgctggtgctggaccccacctcgggccccaagtggaaggtggcctgcaacaagtgcaacgtggtagcgcactgcttcgagaacgcccaccgcgtgcgggtgtccgccgacacctgcagtgtctgtgaggccgccttgcttgatgtggacttcaacaaggccaagtccccactcccgggcgatgagacgcagcacatgggctgcgtcttttgtgaccccgtcttccaggagctggtggagctgaagcatgcggcctcctgccaccccatgcaccgcggtggaccagggagaaggcagggtcgagggcggggccgggccaggaggccccctgggaagcccaaccccagacggcccaaggacaagatgtcagccctggccgcctactttgtatgatgaccctgtcctccctcacccaggctgcagtgccatgcagacacctcatggcacttcaaactattaaaatgcattttatctta

SEQ ID NO: 4220 - DNA, 2033 bp, Homo sapiens
  source 1..2033: mol_type = genomic DNA
aacaaggaccggagctggatccgcggtgcggctgtgggagtcagcattggtaatagtgctgtgctgcggaagagtggagtctaaactttttcattgccagtgccccgaaactggagtgtgaaggaccgagacaaaatgaagactgtgctcatggttgctgaaaagccgtccttggcacagtcaattgccaaaatcctctctagagggagcctgtcctcacacaaagggctgaacggggcctgctcagtccacgagtacactgggacctttgctggccagccagtgcgcttcaagatgacgtctgtctgtggtcacgtgatgaccctggatttcctgggaaaatacaacaaatgggacaaagtggaccccgcagaactgttcagccaagctcccacggagaagaaagaagctaaccccaagctgaacatggtgaagttcctgcaggtttcagactaaatatttccaggggaaatacggtgatttagacagctctctcatctcctttgggccgtgtcagactccaaccctgggattctgtgtggagagacatgataaaatccagtccttcaaaccagagacctactgggtgctgcaggccaaggttaacactgacaaagacagatctctccttttggactgggaccgagtaagagtgtttgaccgggagatcgcacagatgtttttaaacatgacaaagctggagaaggaagcccaggtggaggccacaagcaggaaagaaaaggccaagcagaggcccctggccctgaacactgtggagatgctgcgtgtggccagctcttctctgggcatggggccgcagcacgccatgcagacggctgagcggctctacacgcaaggctacatcagctacccacggacagagaccacccactaccctgagaactttgacctgaagggctctctgcggcagcaggccaaccacccctactgggccgacacggtgaagcggttgttagcagaaggtatcaaccgcccgcggaaaggccatgacgccggcgaccatccccccatcacccccatgaagtctgccacagaggccgaattagggggtgacgcgtggcggctctatgagtacatcaccagacacttcatcgccacggtcagccatgactgcaagtacctgcagagcaccatctccttcagaattgggcccgagctcttcacctgctccgggaagaccgtcctctcaccaggcttcacggaggtcatgccctggcagagcgtgcccctggaggagagcctgcccacttgccagcggggtgatgccttccctgtgggcgaggtgaagatgctggagaagcagacgaacccacccgactacctgacggaggccgagctcatcacgctcatggagaagcatggcatcggtgggtgcgcctgcccaggccccagagccggctccgtctccagtactcaggcttcgagtctactcacaaagctgccccgccagccctgtgtgcccagcccagcacccctccatgggctggtatctggaaactggtgacccagtgtgtggccagccaggcaggtccacagcgggcatcccctcctgaggcctccattcaggacctggccttccctgtgaaggcccagatgtgccctcgtgcactgtggggtgtgcacacaccgactaacgcccacaaggctgaagattggcccagatgccaggcacggatgccagcatccctgtgcatatcaacaacatctgccagcgcaactatgtcacggtggagagcgggcgccggctcaagcccaccaacctcggcatcgtcctggtgcacggctactataagattgatgcagagctggtgctccccaccatccgcagtgcagtggagaagcagctgaacctgatcgcccagggcaaggccgactaccgccaggtcctgggccacaccctggacgtgttcaagaggaagttccactactttgtcgactccattgctggtagagtctgcctctggcctgcccctcaccagaggggtgtctctctgtcagcaaggccagtacct

SEQ ID NO: 4221 - DNA, 824 bp, Homo sapiens
  source 1..824: mol_type = genomic DNA
gtagccgccccgggaacaaggaccggagctggatccgcggtgcggctgtggtgccccgaaactggagtgtgaaggaccgagacaaaatgaagactgtgctcatggttgctgaaaagccgtccttggcacagtcaattgccaaaatcctctctagagggagcctgtcctcacacaaagggctgaacggggcctgctcagtccacgagtacactgggacctttgctggccagccagtgcgcttcaagatgacgtctgtctgtggtcacgtgatgaccctggatttcctgggaaaatacaacaaatgggacaaagtggaccccgcagaactgttcagccaagctcccacggagaagaaagaagctaaccccaagctgaacatggtgaagttcctgcaggtggagggcagaggctgcgactacatcgtgctgtggctggactgcgacaaggagggggagaacatctgctttgaggttcttgatgctgttctgcccgtcatgaacaaggcccatggtggcgagaagaccgtgttccgggccaggtttagctccatcacggacacagacatctgtaatgccatggcctgcctaggcgagcctgaccacaacgaggcgctctcagtggatgctcgccaggagctggacctgcgaatcggctgtgcattcaccaggtttcagactaaatatttccaggggaaatacggtgatttagacagctctctcatctcctttgggccgtgtcagactccaaccctgggattctgtgtggagagacatgataaaatccagtccttcaaaccagagacctactgggtgctgcaggccaag

SEQ ID NO: 4222 - DNA, 582 bp, Homo sapiens
  source 1..582: mol_type = genomic DNA
agaagcggctggacccggaaataggggttgtcggtagccgccccgggaacaaggaccggagctggatccgcggtgcggctgtggctctttagggtgagatctgctgtaccagtctcacaggagtcagcattggtaatagtgctgtgctgcggaagagtggagtctaaactttttcattgccagtgccccgaaactggagtgtgaaggaccgagacaaaatgaagactgtgctcatggttgctgaaaagccgtccttggcacagtcaattgccaaaatcctctctagagggagcctgtcctcacacaaagggctgaacggggcctgctcagtccacgagtacactgggacctttgctggccagccagtgcgcttcaagatgacgtctgtctgtggtcacgtgatgaccctggatttcctgggaaaatacaacaaatgggacaaagtggaccccgcagaactgttcagccaagctcccacggagaagaaagaagctaaccccaagctgaacatggtgaagttcctgcaggtggagggcagaggctgcgactacatcgtgctgtggctggactgcgacaaggagg

SEQ ID NO: 4223 - DNA, 736 bp, Homo sapiens
  source 1..736: mol_type = genomic DNA
ccccgggaacaaggaccggagctggatccgcggtgcggctgtgggtgagcggcgggctgcgggaccctcgcccggcggctcagaaaggcgggaagcgcacgcatttttctggcttgtttcctgaacgttggccggcggaggacccgcgagctcgggagagcgcccgggccgggctctgcattcttgttgcctcttccctggcgggggtgatactctcccgcggggcttgctgtgggggttcagggaggtggagatgggcccgccatgtgcctgcagggagcaggcgctgtggttaatacttttcttcttcgaaccctcccacagctctttagggtgagatctgctgtaccagtctcacaggtagggaaactgaggctcagggaagctgtgcagccaccggggcccagatcggtgcggtacacacccaggcagcttccactcgccgccccctaggccctggctgggttttgagggcacccaggttctctgacctgttatctgtaaatgaagtagggtacttttgtgaacaaattagctggaatccaggggcaataatttctcgcagaagtgaaaggagtcagcattggtaatagtgctgtgctgcggaagagtggagtctaaactttttcattgccagtgccccgaaactggagtgtgaaggaccgagacaaaatgaagactgtgctcatggttgctgaaaagccgtccttggcacagtcaattgccaaaatcctct

SEQ ID NO: 4224 - DNA, 571 bp, Homo sapiens
  source 1..571: mol_type = genomic DNA
ataggggttgtcggtagccgccccgggaacaaggaccggagctggatccgcggtgcggctgtgggtgagtccacctgtaggtggaagagccagtccagagaggagggccaggcatccacctggcctgacccatcactccagatccccaggccccagcatcttcctagcatggatttaggaataaaattgacctgagatcactggggccacttcaccttcccccaaatggagccacattcccaggatcatctcagccacttcagctgacctggtagttttttcttgtttttaatctcagatgtcttcaagtttccctaattccctaatttttcttcttcttgcctcaggagtcagcattggtaatagtgctgtgctgcggaagagtggagtctaaactttttcattgccagtgccccgaaactggagtgtgaaggaccgagacaaaatgaagactgtgctcatggttgctgaaaagccgtccttggcacagtcaattgccaaaatcctctctagagggagcctgtcctcacacaaagggctgaacggggcctgctcagtccacgagtacact

SEQ ID NO: 4225 - DNA, 550 bp, Homo sapiens
  source 1..550: mol_type = genomic DNA
aacaaggaccggagctggatccgcggtgcggctgtggatgtcttcaagtttccctaattccctaatttttcttcttcttgcctcaggagtcagcattggtaatagtgctgtgctgcggaagagtggagtctaaactttttcattgccagtgccccgaaactggagtgtgaaggaccgagacaaaatgaagactgtgctcatggttgctgaaaagccgtccttggcacagtcaattgccaaaatcctctctagagggagcctgtcctcacacaaagggctgaacggggcctgctcagtccacgagtacactgggacctttgctggccagccagtgcgcttcaagatgacgtctgtctgtggtcacgtgatgaccctggatttcctgggaaaatacaacaaatgggacaaagtggaccccgcagaactgttcagccaagctcccacggagaagaaagaagctaaccccaagctgaacatggtgaagttcctgcaggtggagggcagaggctgcgactacatcgtgctgtggctggactgcgacaaggagggg

SEQ ID NO: 4226 - DNA, 400 bp, Homo sapiens
  source 1..400: mol_type = genomic DNA
ttgtttttaatctcagatgtcttcaagtttccctaattccctaatttttcttcttcttgcctcaggttggtcttgttttttctttgttaaagtgattttccttgtagtggtgtaggttctattgacagcattgctatcctgagtgtcttttcttctctttaggagtcagcattggtaatagtgctgtgctgcggaagagtggagtctaaactttttcattgccagtgccccgaaactggagtgtgaaggaccgagacaaaatgaagactgtgctcatggttgctgaaaagccgtccttggcacagtcaattgccaaaatcctctctagagggagcctgtcctcacacaaagggctgaacggggcctgctcagtccacgagtacactgggacctttgctgg

SEQ ID NO: 4227 - DNA, 557 bp, Homo sapiens
  source 1..557: mol_type = genomic DNA
gaaataggggttgtcggtagccgccccgggaacaaggaccggagctggatccgcggtgcggctgtggcattggtaatagtgctgtgctgcggaagagtggagtctaaactttttcattgccagtgccccgaaactggagtgtgaaggaccgagacaaaatgaagactgtgctcatggttgctgaaaagccgtccttggcacagtcaattgccaaaatcctctctagagggagcctgtcctcacacaaagggctgaacggggcctgctcagtccacgagtacactgggacctttgctggccagccagtgcgcttcaagatgacgtctgtctgtggtcacgtgatgaccctggatttcctgggaaaatacaacaaatgggacaaagtggaccccgcagaactgttcagccaagctcccacggagaagaaagaagctaaccccaagctccctcaggcctcagtctgcacccaggctgccccgggagtgagaccccatccctgccctcctgctgccgccagagtagctgacagggtggttccatgtggcccagtgacatga

SEQ ID NO: 4228 - DNA, 543 bp, Homo sapiens
  source 1..543: mol_type = genomic DNA
gttgtcggtagccgccccgggaacaaggaccggagctggatccgcggtgcggctgtgggtgagtccacctgtaggtggaagagccagtccagagaggagggccaggcatccacctggcctgacccatcactccagatccccaggccccagcatcttcctagcatggatttaggaataaaattgacctgagatcactggggccacttcaccttcccccaaatggagccacattcccaggatcatctcagccacttcagctgacctggagtcagcattggtaatagtgctgtgctgcggaagagtggagtctaaactttttcattgccagtgccccgaaactggagtgtgaaggaccgagacaaaatgaagactgtgctcatggttgctgaaaagccgtccttggcacagtcaattgccaaaatcctctctagagggagcctgtcctcacacaaagggctgaacggggcctgctcagtccacgagtacactgggacctttgctggccagccagtgcgcttcaagatgacgtctgtctgtggtcac

SEQ ID NO: 4229 - DNA, 561 bp, Homo sapiens
  source 1..561: mol_type = genomic DNA
aacaaggaccggagctggatccgcggtgcggctgtggctctttagggtgagatctgctgtaccagtctcacaggtgagtccacctgtaggtggaagagccagtccagagaggagggccaggcatccacctggcctgacccatcactccagatccccaggccccagcatcttcctagcatggatttaggaataaaattgacctgagatcactggggccacttcaccttcccccaaatggagccacattcccaggatcatctcagccacttcagctgacctggagtcagcattggtaatagtgctgtgctgcggaagagtggagtctaaactttttcattgccagtgccccgaaactggagtgtgaaggaccgagacaaaatgaagactgtgctcatggttgctgaaaagccgtccttggcacagtcaattgccaaaatcctctctagagggagcctgtcctcacacaaagggctgaacggggcctgctcagtccacgagtacactgggacctttgctggccagccagtgcgcttcaagatgacgtctgtctgtggtcacgtg

SEQ ID NO: 4230 - DNA, 2956 bp, Homo sapiens
  source 1..2956: mol_type = genomic DNA
atttagacagctctctcatctcctttgggccgtgtcagactccaaccctgggattctgtgtggagagacatgataaaatccagtccttcaaaccagagacctactgggtgctgcaggccaaggttaacactgacaaagacagatctctccttttggactgggaccgagtaagagtgtttgaccgggagatcgcacagatgtttttaaacatgacaaagctggagaaggaagcccaggtggaggccacaagcaggaaagaaaaggccaagcagaggcccctggccctgaacactgtggagatgctgcgtgtggccagctcttctctgggcatggggccgcagcacgccatgcagacggctgagcggctctacacgcaaggctacatcagctacccacggacagagaccacccactaccctgagaactttgacctgaagggctctctgcggcagcaggccaaccacccctactgggccgacacggtgaagcggttgttagcagaaggtatcaaccgcccgcggaaaggccatgacgccggcgaccatccccccatcacccccatgaagtctgccacagaggccgaattagggggtgacgcgtggcggctctatgagtacatcaccagacacttcatcgccacggtcagccatgactgcaagtacctgcagagcaccatctccttcagaattgggcccgagctcttcacctgctccgggaagaccgtcctctcaccaggcttcacggaggtcatgccctggcagagcgtgcccctggaggagagcctgcccacttgccagcggggtgatgccttccctgtgggcgaggtgaagatgctggagaagcagacgaacccacccgactacctgacggaggccgagctcatcacgctcatggagaagcatggcatcggcacggatgccagcatccctgtgcatatcaacaacatctgccagcgcaactatgtcacggtggagagcgggcgccggctcaagcccaccaacctcggcatcgtcctggtgcacggctactataagattgatgcagagctggtgctccccaccatccgcagtgcagtggagaagcagctgaacctgatcgcccagggcaaggccgactaccgccaggtcctgggccacaccctggacgtgttcaagaggaagttccactactttgtcgactccattgctggcatggatgagttgatggaggtgtctttctcgcccctggcggccacaggcaagcccctctcacgctgtgggaagtgccaccgcttcatgaagtacatccaggccaagccaagccgcctgcactgctcccactgcgatgagacctacacgctcccccagaacggcaccatcaagctctacaaggagctccgctgccctctggatgacttcgagctggtcctgtggtcatcaggctctcggggcaagagctacccgctgtgcccctactgctacaaccacccacccttccgagacatgaagaaaggtgagtgcagccactccctcctgtccacaggtagctgcagtctcttttcagtgccaacccctgccttgcaccaggctggactctgaggggacccctcaccctggcctttcctgcactcattggcactgagacgagagaccctggatgtagctggggcactgcttaggcctcagccagtggtgccaccctctctctgtgtcagaatcgagcaggcaaccctagtccaccctcaggacctgggcacaggtgtgcagtgctccctctggagctgagtgagcaagaggatgcagcagtcgggggacccacccggtgagcgggcacccccagtcagcgtccaccaccgtcctccatcctcatcctcgtcctcattactggaggagggagcgcatgtccaggcaggcaggacagagcaccgagccagaccaggaatcagcgggagtgaggcatctgcccacattcaccgtgtgctctgcagaaagctccctcaggcctcagtctgcacccaggctgccccgggagtgagaccccatccctgccctcctgctgccgccagagtagctgacagggtggttccatgtggcccagtgacatgagggtcatgtggcattaccagtaacaagctggcagcaaagcaaaggggggatggagtcagctgaaacccactgggatggtgccagcgaggggccttgaaagttgaggaggtttcaggtaagcagaaaacaggggtaatggcagccaggagccgaaacatgagcaaggctgtccccaagagcaaggccaagaagagttccttctgctgggacgagggatccaggagcttgaggcattgggagcaggcagcagagggcaggtgggcacagtgggcgtgcctttacagggctcccttctcccgccaggcatgggctgcaacgagtgtacgcacccctcctgccagcactcgctgagcatgctgggcatcggccagtgcgtggaatgtgagagcggggtgctggtgctggaccccacctcgggccccaagtggaaggtggcctgcaacaagtgcaacgtggtagcgcactgcttcgagaacgcccaccgcgtgcgggtgtccgccgacacctgcagtgtctgtgaggccgccttgcttgatgtggacttcaacaaggccaagtccccactcccgggcgatgagacgcagcacatgggctgcgtcttttgtgaccccgtcttccaggagctggtggagctgaagcatgcggcctcctgccaccccatgcaccgcggtggaccagggagaaggcagggtcgagggcggggccgggccaggaggccccctgggaagcccaaccccagacggcccaaggacaagatgtcagccctggccgcctactttgtatgatgaccctgtcctccctcacccaggctgcagtgccatgcagacacctcatggcacttcaaactattaaaatgcattttatcttatcca

SEQ ID NO: 4231 - DNA, 3121 bp, Homo sapiens
  source 1..3121: mol_type = genomic DNA
gcggccgcggctcccgagctcctcgggctctgggtcccggcgcccctccggccgcgagtcccacgcgccacccccgggcgccctcgacggtggatctagcggcggcgaggaggcgggtcccggccccggcgaaccccagtcccggcccccggccccgggcccagcttcggcatggatgtgaggttctaccccgcggcggccggggaccctgccagcctggacttcgcgcagtgcctggggtactacggctacagcaagtttggaaataataataactatatgaatatggctgaggcgaacaatgcgttcttcgctgccagtgagcagacattccacacaccaagccttggggacgaggaattcgaaattccaccaatcacgcctcctccagagtcagaccctgccctaggcatgccggatgtactgctaccctttcaagccctcagcgatccattgccttcccagggaagtgaattcacaccccagtttccccctcaaagcctggacctcccttccattacaatctcaagaaatctcgtggaacaagatggcgtgcttcatagcagtgggttgcatatggatcagagccacacacaagtgtcccagtaccggcaggatccctccctgatcatgcggtccatcgtccacatgaccgatgctgcgcgttctggggtcatgcctcctgcccagctcaccaccatcaaccagtctcagctcagcgcccagttggggttgaatttgggaggtgccagtatgcctcacacatctccttcacctccagcaagcaaatcagccactccctccccttccagctccatcaatgaagaggatgctgatgaagccaacagagccattggagagaaaagagctgctccagactctggcaagaagcccaagactccaaagaaaaagaaaaagaaagatcccaatgagccacagaagccagtgtcagcatatgccctgtttttcagagacacacaggctgcaattaaaggtcaaaaccccaatgcaacctttggagaggtctcaaaaattgtagcatctatgtgggacagccttggagaagaacaaaagcaggtatataaaaggaaaacagaagctgccaaaaaagaatacctgaaggccctggcggcatacagggccagcctcgtttctaaggctgctgctgagtcagcagaagcccagaccatccgttctgttcagcagaccctggcgtcgaccaatctaacatcctctctccttctcaacactccactgtctcaacatggaacagtgtcagcatcacctcagactctccagcaatccctccctaggtcaatcgctcccaaacccttaaccatgagactccccatgaaccagattgtcacatcagtcaccattgcagccaacatgccctcgaacattggggctccactgataagctccatgggaacgaccatggttggctcagcaccctccacccaagtgagtccttcggtgcaaacccagcagcatcagatgcaattgcagcagcagcagcagcagcaacaacaacagatgcaacagatgcagcagcagcaactccagcagcaccaaatgcatcagcaaatccagcagcagatgcagcagcagcatttccagcaccacatgcagcagcacctgcagcagcagcagcagcatctccagcagcaaattaatcaacagcagctgcagcagcagctgcagcagcgcctccagctgcagcagctgcaacacatgcagcaccagtctcagccttctcctcggcagcactcccctgtcgcctctcagataacatcccccatccctgccatcgggagcccccagccagcctctcagcagcaccagtcgcaaatacagtctcagacacagactcaagtattatcgcaggtcagtattttctgaagacgcatatggcagacggatttgcgtataccaaggagagtggcataggagggaaaagcatatgtggctgaaacctgtaagttggtgttggttatgcagaaatgtgtaacagatcaaacggtcctctcaagtgtctattagataggcaataagaactgcagtgtagctgagtaacatcttttagctgactataaatcactttgtttttaaacaagaaaagctgtgctcttttatgtgatgccttttttatttattcaggctatacctacaatatgtgaatcaaactgtttaatgaatcctgggacatactgatgactataaactggcctctctgagtcatagaaaaatggccttatttctccagaagtgagtaaaccacacttccaggctatctgaactcctgaagccctaaaaataaaaagcacagttgtaactacctgaaatatgaagatccagtttcatacaaacatttgtatgacgtgaatagttgatggcatttttttgtcatgaaaaaaataatgtaaatcacagacttttgccaaagctcttattttttttcctaaatctctccagaaaaaaaatgcaagtgactaaattcaattattgactaatttccactttttatccatgacttctccaaatcaaaccacagtatatgttgtaacaatatctatgaccactgttagcccattatattcattccaattagaagaaatgtgaatactatattccgtgttttgagtgacaagtttcgaaaaataaaaacactgtatttttaaaagggaaatgcacttaaatgaaaacagttattacaaaagttaagatttaaaaagaaaaagcaagagtttttattatgatgtaataccagtagaatatttaaaaggcacaccacatctgaataatcaatgtaaatattttctttcaaagttgtaagttttcatatcatgtgctgtaaagttttcctaaatgaggctttaacgtaaacactggtgacataaaccattcattgctacgttgcttattgtgtttttatgctgttttatacttttttatgagttatgatagcagcaattaagttgtttgtattttgcttaactaaaacaaaaatgcttttatcttgctatagaataaacacatttcagtaaaaactgtggactgtattttgatgcaacaacaaagaaactgttcacttttcaaataaaatgatatgtcagatttc

SEQ ID NO: 4232 - DNA, 3123 bp, Homo sapiens
  source 1..3123: mol_type = genomic DNA
gaaccgacacgaggcttcacctgggaagcttcaagtctgcctacctgtgaaaggtcaggccccaacaccccttctgggaaatcctacagctaggatgcatttctctcactgaaccccatccagcagaggacagaagagtcagaagagggtagagaggatttagatactcatagaagatgtagtggaggatgaagtgccaacctcgctcgggagccaggcgcattgaggagagacttcattacctgataactacctatctgaaatttggaaataataataactatatgaatatggctgaggcgaacaatgcgttcttcgctgccagtgagacattccacacaccaagccttggggacgaggaattcgaaattccaccaatcacgcctcctccagagtcagaccctgccctaggcatgccggatgtactgctaccctttcaagccctcagcgatccattgccttcccagggaagtgaattcacaccccagtttccccctcaaagcctggacctcccttccattacaatctcaagaaatctcgtggaacaagatggcgtgcttcatagcagtgggttgcatatggatcagagccacacacaagtgtcccagtaccggcaggatccctccctgatcatgcggtccatcgtccacatgaccgatgctgcgcgttctggggtcatgcctcctgcccagctcaccaccatcaaccagtctcagctcagcgcccagttggggttgaatttgggaggtgccagtatgcctcacacatctccttcacctccagcaagcaaatcagccactccctccccttccagctccatcaatgaagaggatgctgatgaagccaacagagccattggagagaaaagagctgctccagactctggcaagaagcccaagactccaaagaaaaagaaaaagaaagatcccaatgagccacagaagccagtgtcagcatatgccctgtttttcagagacacacaggctgcaattaaaggtcaaaaccccaatgcaacctttggagaggtctcaaaaattgtagcatctatgtgggacagccttggagaagaacaaaagcaggtatataaaaggaaaacagaagctgccaaaaaagaatacctgaaggccctggcggcatacagggccagcctcgtttctaaggctgctgctgagtcagcagaagcccagaccatccgttctgttcagcagaccctggcgtcgaccaatctaacatcctctctccttctcaacactccactgtctcaacatggaacagtgtcagcatcacctcagactctccagcaatccctccctaggtcaatcgctcccaaacccttaaccatgagactccccatgaaccagattgtcacatcagtcaccattgcagccaacatgccctcgaacattggggctccactgataagctccatgggaacgaccatggttggctcagcaccctccacccaagtgagtccttcggtgcaaacccagcagcatcagatgcaattgcagcagcagcagcagcagcaacaacaacagatgcaacagatgcagcagcagcaactccagcagcaccaaatgcatcagcaaatccagcagcagatgcagcagcagcatttccagcaccacatgcagcagcacctgcagcagcagcagcagcatctccagcagcaaattaatcaacagcagctgcagcagcagctgcagcagcgcctccagctgcagcagctgcaacacatgcagcaccagtctcagccttctcctcggcagcactcccctgtcgcctctcagataacatcccccatccctgccatcgggagcccccagccagcctctcagcagcaccagtcgcaaatacagtctcagacacagactcaagtattatcgcaggtcagtattttctgaagacgcatatggcagacggatttgcgtataccaaggagagtggcataggagggaaaagcatatgtggctgaaacctgtaagttggtgttggttatgcagaaatgtgtaacagatcaaacggtcctctcaagtgtctattagataggcaataagaactgcagtgtagctgagtaacatcttttagctgactataaatcactttgtttttaaacaagaaaagctgtgctcttttatgtgatgccttttttatttattcaggctatacctacaatatgtgaatcaaactgtttaatgaatcctgggacatactgatgactataaactggcctctctgagtcatagaaaaatggccttatttctccagaagtgagtaaaccacacttccaggctatctgaactcctgaagccctaaaaataaaaagcacagttgtaactacctgaaatatgaagatccagtttcatacaaacatttgtatgacgtgaatagttgatggcatttttttgtcatgaaaaaaataatgtaaatcacagacttttgccaaagctcttattttttttcctaaatctctccagaaaaaaaatgcaagtgactaaattcaattattgactaatttccactttttatccatgacttctccaaatcaaaccacagtatatgttgtaacaatatctatgaccactgttagcccattatattcattccaattagaagaaatgtgaatactatattccgtgttttgagtgacaagtttcgaaaaataaaaacactgtatttttaaaagggaaatgcacttaaatgaaaacagttattacaaaagttaagatttaaaaagaaaaagcaagagtttttattatgatgtaataccagtagaatatttaaaaggcacaccacatctgaataatcaatgtaaatattttctttcaaagttgtaagttttcatatcatgtgctgtaaagttttcctaaatgaggctttaacgtaaacactggtgacataaaccattcattgctacgttgcttattgtgtttttatgctgttttatacttttttatgagttatgatagcagcaattaagttgtttgtattttgcttaactaaaacaaaaatgcttttatcttgctatagaataaacacatttcagtaaaaactgtggactgtattttgatgcaacaacaaagaaactgttcacttttcaaataaaatgatatgtcagatttc

SEQ ID NO: 4233 - DNA, 6237 bp, Homo sapiens
  source 1..6237: mol_type = genomic DNA
tgggcctctgattcatctttattccctccatcatctagacttgattttatttgtaccaaggagatgcgtgtctaatgtttttctttcttctatttctaggagggctgttggcctgctgctgtgctgctgaacagtatgcagtcctttcgggagcaaagcagttaccacggaaaccagcaaagctacccacaggaggtacacggctcatcccggctagaagagttcagccctcgtcaggcccagatgttccagaattttggaggtacaggtggcagtagtggcagcagtggcagtggcagtggtggtggacgacgaggagcagcagctgctgcggcagcgatggctagcgagacctctggccatcaaggttaccagggtttcaggaaagaggctggagatttttactacatggcaggcaacaaagaccccgtgactacaggaaccccacagcctcctcagcgaaggccttctgggcctgtgcagagctatggacccccccaggggagcagctttggcaatcagtatgggagtgagggtcatgtgggccagtttcaagcacagcactctggccttggcggtgtgtcacattatcagcaggattacactgggcctttctctccagggagtgctcagtaccaacagcaggcttccagccagcagcagcagcagcaagtccagcagttgagacaacagctttaccagtcccatcagcccctgccacaggccactggccaaccagcatccagctcatcccatctacagccaatgcagcggccctcaactctgccatcctctgctgctggttaccagttaagagtgggtcagtttggccaacactatcagtcttctgcttcctcctcctcctcctcctccttcccttcaccacagcgttttagccagtctggacagagctatgatggcagttacaatgtgaatgctggatctcagtatgaaggacacaatgtgggttctaatgcacaggcttatggaacacaatccaattacagctatcagcctcaatctatgaagaattttgaacaggcaaagattccacaagggacccaacaggggcagcagcagcagcaaccgcagcaacaacaacacccttctcagcatgtgatgcagtatactaacgctgccaccaagctgcccctgcaaagccaagtggggcagtacaaccagcctgaggttcctgtgaggtcccccatgcagtttcaccagaacttcagccccatttctaacccttctccagctgcctctgtggttcagtctccaagctgtagttctaccccatctcctctcatgcagactggggagaatctccagtgtgggcaaggcagtgtgcctatgggttccagaaacagaattttacagttaatgcctcaactcagtccaaccccatcaatgatgcccagtcctaattctcatgctgcaggcttcaaagggtttggactagaaggggtaccagaaaagcgactgacagatcctgggttgagtagtttgagtgctctgagtactcaagtggccaatcttcctaacactgtccagcacatgttactttctgatgccctgactcctcagaagaagacctccaagaggccctcatcttccaagaaagcagatagctgcacaaattctgaaggctcctcacaacctgaagaacagctgaagtcccctatggcagagtcattagatggaggctgctccagcagttcagaggatcaaggcgagagagtgcggcaactaagtggccagagcaccagctctgacaccacctacaagggtggagcctctgagaaagctggctcctcaccggcacaaggtgctcagaatgaaccccccagactcaatgctagtcctgccgcaagagaagaggccacctcaccaggcgctaaggacatgccattgtcatccgacgggaacccaaaggttaatgagaagactgttggggtgattgtctcccgggaagccatgacaggtcgggtagaaaagcctggtggacaagataaaggctcccaagaggatgatcctgcagccactcaaaggccacctagcaatggtggggcaaaggaaaccagtcatgcatcacttccccagccagagcctccaggaggaggagggagcaaaggaaacaagaatggcgataacaactccaaccataatggagaaggaaatggccagagtggccactctgcagcgggccctggttttacgagcagaactgagcctagcaaatctcctggaagtctgcgctatagttacaaagatagtttcgggtcagccgtgccacgaaatgtcagtggctttcctcagtatcctacagggcaagaaaagggagatttcactggccatggggaacgaaagggtagaaatgaaaaattcccaagcctcctgcaggaagtgcttcagggttaccaccaccaccctgacaggagatattctaggagtactcaagagcatcaggggatggctggtagcctagaaggaaccacaaggcccaatgtcttggttagtcaaaccaatgaattagctagcaggggccttctgaacaaaagcattgggtctctattagaaaatccccactggggcccctgggaaaggaaatcaagcagcacagctcctgaaatgaaacagatcaatttgactgactatccaattcccagaaagtttgaaatagagcctcagtcatcagcacatgagcctgggggttccctctctgaaagaagatcagtgatctgtgatatttctccactaagacagattgtcagggacccaggggctcactcactgggacacatgagtgccgacaccagaattgggaggaatgaccgtctcaatccaactttaagtcagtcggtcattcttcctggtggtttggtgtccatggaaaccaagctgaaatcccagagcgggcagataaaagaggaagactttgaacagtctaaatctcaagctagtttcaacaacaagaaatctggagaccactgccatcctcctagcatcaagcatgagtcttaccgcggcaatgccagccctggagcagcaacccatgattccctttcagactatggcccgcaagacagcagacccacgccaatgcggcgggtccctggcagagttggtggtcgggagggcatgaggggtcggtccccttctcaatatcatgactttgcagaaaaattgaaaatgtctcctgggcggagcagaggcccagggggagaccctcatcacatgaatccacacatgaccttttcagagagggctaaccggagttctttacacactcccttttctcccaactcagaaaccctggcctctgcttatcatgcaaatactcgggctcatgcttatggggaccctaacgcaggtttgaattctcagctgcattataagagacagatgtaccaacagcaaccagaggagtataaagactggagcagcggttctgctcagggagtaattgctgcagcacagcacaggcaggaggggccacggaagagtccaaggcagcagcagtttcttgacagagtacggagccctctgaaaaatgacaaagatggtatgatgtatggcccaccagtggggacttaccatgaccccagtgcccaggaggctgggcgctgcctaatgtctagtgatggtctgcctaacaagggcatggaattaaagcatggctcccagaagttacaagaatcctgttgggatctttctcggcaaacttctccagccaaaagcagcggtcctccaggaatgtccagtcaaaaaaggtatgggccgccccatgagactgatggacatggactagctgaggctacacagtcatccaaacctggtagtgttatgctgagacttccaggccaggaggatcattcttctcaaaaccccttaatcatgaggaggcgtgttcgttcttttatctctcccattcccagtaagagacagtcacaagatgtaaagaacagtagcactgaagataaaggtcgcctccttcactcatcaaaagaaggcgctgataaagcattcaattcctatgcccatctttctcacagtcaggatatcaagtctatccctaagagagattcctccaaggaccttccaagtccagatagtagaaactgccctgctgttaccctcacaagccctgctaagaccaaaatactgcccccacggaaaggacggggattgaaattggaagctatagttcagaagattacatccccaaatattaggaggagcgcatcttcgaacagtgcggaggctgggggagacacggttacgcttgatgatatactgtctttgaagagtggtcctcctgaaggtgggagtgttgctgttcaggatgctgacatagagaagagaaaaggtgaggtggcttcggacctagtcagtccagcaaaccaggagttgcacgtagagaaacctcttccaaggtcttcagaagagtggcgtggcagcgtggatgacaaagtgaagacagagacacatgcagaaacagttactgccggaaaggaaccccctggtgccatgacatccacaacctcacagaagcctggtagtaaccaagggagaccagatggttccctgggtggaacagcacctttaatctttccagactcaaagaatgtacctccagtgggcatattggcccctgaggcaaaccccaaggctgaagagaaggagaacgatacagtgacgatttcaccgaagcaagagggtttccctccaaagggatatttcccatcaggaaagaagaaggggagacccattggtagtgtgaataagcaaaagaaacagcagcagccaccgcctccaccccctcagcccccacagataccagaaggttctgcagatggagagccaaagccaaaaaaacagaggcaaaggagggagagaaggaagcctggggcccagccgaggaagcgaaaaaccaaacaagcagttcccattgtggaaccccaagaacctgagatcaaactaaaatatgccacccagccactggataaaactgatgccaagaacaagtctttttacccttacatccatgtagtaaataagtgtgaacttggagccgtttgtacaatcatcaatgctgaggaagaagaacagaccaaattagtgaggggcaggaagggtcagaggtcactgacccctccacctagcagcactgaaagcaaggcgctcccggcctcgtcctttatgctgcagggacctgttgtgacagagtcttcggttatggggcacctggtttgctgtctgtgtggcaagtgggccagttaccggaacatgggtgacctctttggacctttttatccccaagattatgcagccactctcccgaagaatccacctcctaagagggccacagaaatgcagagcaaagttaaggtacggcacaaaagtgcttctaatggctccaagacggacactgaggaggaggaagagcagcagcagcagcagaaggagcagagaagcctggccgcacaccccaggtttaagcggcgccaccgctcggaagactgtggtggaggccctcggtccctgtccagggggctcccttgtaaaaaagcagccactgagggcagcagtgaaaagactgttttggactcgaagccctccgtgcccaccacttcagaaggtggccctgagctggagttacaaatccctgaactacctcttgacagcaatgaattttgggtccatgagggttgtattctctgggccaatggaatctacctggtttgtggcaggctctatggcctgcaggaagcgctggaaatagccagagagatgaaatgttcccactgccaggaggcaggcgccaccttgggctgctacaacaaaggctgctccttccgataccattacccgtgtgccattgatgcagattgtttgctacatgaggagaacttctcggtgaggtgccctaagcacaaggtgagactgtggagatgagaaggtggtggacactcgtgatggaatggaaatcgtcctaccgtgcagccacaccctgccctgccccgccccgccccgcccgcgtgcctgcccatgccagcacttccttaagttctcacatcacactcaaaccagtgacaccacaggaaagaaagacccaagacgttggaatggctgtttccatggacacaatctccatagtgacaatgtggggggaggggggaggggtgggatgatggggaaagggtggggggaattaaaagggagggataaatatatatatat

SEQ ID NO: 4234 - DNA, 7410 bp, Homo sapiens
  source 1..7410: mol_type = genomic DNA
tctgggcctctgattcatctttattccctccatcatctagacttgattttatttgtaccaaggagatgcgtgtctaatgtttttctttcttctatttctaggagggctgttggcctgctgctgtgctgctgaacagtatgcagtcctttcgggagcaaagcagttaccacggaaaccagcaaagctacccacaggaggtacacggctcatcccggctagaagagttcagccctcgtcaggcccagatgttccagaattttggaggtacaggtggcagtagtggcagcagtggcagtggcagtggtggtggacgacgaggagcagcagctgctgcggcagcgatggctagcgagacctctggccatcaaggttaccagggtttcaggaaagaggctggagatttttactacatggcaggcaacaaagaccccgtgactacaggaaccccacagcctcctcagcgaaggccttctgggcctgtgcagagctatggacccccccaggggagcagctttggcaatcagtatgggagtgagggtcatgtgggccagtttcaagcacagcactctggccttggcggtgtgtcacattatcagcaggattacactgggcctttctctccagggagtgctcagtaccaacagcaggcttccagccagcagcagcagcagcaagtccagcagttgagacaacagctttaccagtcccatcagcccctgccacaggccactggccaaccagcatccagctcatcccatctacagccaatgcagcggccctcaactctgccatcctctgctgctggttaccagttaagagtgggtcagtttggccaacactatcagtcttctgcttcctcctcctcctcctcctccttcccttcaccacagcgttttagccagtctggacagagctatgatggcagttacaatgtgaatgctggatctcagtatgaaggacacaatgtgggttctaatgcacaggcttatggaacacaatccaattacagctatcagcctcaatctatgaagaattttgaacaggcaaagattccacaagggacccaacaggggcagcagcagcagcaaccgcagcaacaacaacacccttctcagcatgtgatgcagtatactaacgctgccaccaagctgcccctgcaaagccaagtggggcagtacaaccagcctgaggttcctgtgaggtcccccatgcagtttcaccagaacttcagccccatttctaacccttctccagctgcctctgtggttcagtctccaagctgtagttctaccccatctcctctcatgcagactggggagaatctccagtgtgggcaaggcagtgtgcctatgggttccagaaacagaattttacagttaatgcctcaactcagtccaaccccatcaatgatgcccagtcctaattctcatgctgcaggcttcaaagggtttggactagaaggggtaccagaaaagcgactgacagatcctgggttgagtagtttgagtgctctgagtactcaagtggccaatcttcctaacactgtccagcacatgttactttctgatgccctgactcctcagaagaagacctccaagaggccctcatcttccaagaaagcagatagctgcacaaattctgaaggctcctcacaacctgaagaacagctgaagtcccctatggcagagtcattagatggaggctgctccagcagttcagaggatcaaggcgagagagtgcggcaactaagtggccagagcaccagctctgacaccacctacaagggtggagcctctgagaaagctggctcctcaccggcacaaggtgctcagaatgaaccccccagactcaatgctagtcctgccgcaagagaagaggccacctcaccaggcgctaaggacatgccattgtcatccgacgggaacccaaaggttaatgagaagactgttggggtgattgtctcccgggaagccatgacaggtcgggtagaaaagcctggtggacaagataaaggctcccaagaggatgatcctgcagccactcaaaggccacctagcaatggtggggcaaaggaaaccagtcatgcatcacttccccagccagagcctccaggaggaggagggagcaaaggaaacaagaatggcgataacaactccaaccataatggagaaggaaatggccagagtggccactctgcagcgggccctggttttacgagcagaactgagcctagcaaatctcctggaagtctgcgctatagttacaaagatagtttcgggtcagccgtgccacgaaatgtcagtggctttcctcagtatcctacagggcaagaaaagggagatttcactggccatggggaacgaaagggtagaaatgaaaaattcccaagcctcctgcaggaagtgcttcagggttaccaccaccaccctgacaggagatattctaggagtactcaagagcatcaggggatggctggtagcctagaaggaaccacaaggcccaatgtcttggttagtcaaaccaatgaattagctagcaggggccttctgaacaaaagcattgggtctctattagaaaatccccactggggcccctgggaaaggaaatcaagcagcacagctcctgaaatgaaacagatcaatttgactgactatccaattcccagaaagtttgaaatagagcctcagtcatcagcacatgagcctgggggttccctctctgaaagaagatcagtgatctgtgatatttctccactaagacagattgtcagggacccaggggctcactcactgggacacatgagtgccgacaccagaattgggaggaatgaccgtctcaatccaactttaagtcagtcggtcattcttcctggtggtttggtgtccatggaaaccaagctgaaatcccagagcgggcagataaaagaggaagactttgaacagtctaaatctcaagctagtttcaacaacaagaaatctggagaccactgccatcctcctagcatcaagcatgagtcttaccgcggcaatgccagccctggagcagcaacccatgattccctttcagactatggcccgcaagacagcagacccacgccaatgcggcgggtccctggcagagttggtggtcgggagggcatgaggggtcggtccccttctcaatatcatgactttgcagaaaaattgaaaatgtctcctgggcggagcagaggcccagggggagaccctcatcacatgaatccacacatgaccttttcagagagggctaaccggagttctttacacactcccttttctcccaactcagaaaccctggcctctgcttatcatgcaaatactcgggctcatgcttatggggaccctaacgcaggtttgaattctcagctgcattataagagacagatgtaccaacagcaaccagaggagtataaagactggagcagcggttctgctcagggagtaattgctgcagcacagcacaggcaggaggggccacggaagagtccaaggcagcagcagtttcttgacagagtacggagccctctgaaaaatgacaaagatggtatgatgtatggcccaccagtggggacttaccatgaccccagtgcccaggaggctgggcgctgcctaatgtctagtgatggtctgcctaacaagggcatggaattaaagcatggctcccagaagttacaagaatcctgttgggatctttctcggcaaacttctccagccaaaagcagcggtcctccaggaatgtccagtcaaaaaaggtatgggccgccccatgagactgatggacatggactagctgaggctacacagtcatccaaacctggtagtgttatgctgagacttccaggccaggaggatcattcttctcaaaaccccttaatcatgaggaggcgtgttcgttcttttatctctcccattcccagtaagagacagtcacaagatgtaaagaacagtagcactgaagataaaggtcgcctccttcactcatcaaaagaaggcgctgataaagcattcaattcctatgcccatctttctcacagtcaggatatcaagtctatccctaagagagattcctccaaggaccttccaagtccagatagtagaaactgccctgctgttaccctcacaagccctgctaagaccaaaatactgcccccacggaaaggacggggattgaaattggaagctatagttcagaagattacatccccaaatattaggaggagcgcatcttcgaacagtgcggaggctgggggagacacggttacgcttgatgatatactgtctttgaagagtggtcctcctgaaggtgggagtgttgctgttcaggatgctgacatagagaagagaaaaggtgaggtggcttcggacctagtcagtccagcaaaccaggagttgcacgtagagaaacctcttccaaggtcttcagaagagtggcgtggcagcgtggatgacaaagtgaagacagagacacatgcagaaacagttactgccggaaaggaaccccctggtgccatgacatccacaacctcacagaagcctggtagtaaccaagggagaccagatggttccctgggtggaacagcacctttaatctttccagactcaaagaatgtacctccagtgggcatattggcccctgaggcaaaccccaaggctgaagagaaggagaacgatacagtgacgatttcaccgaagcaagagggtttccctccaaagggatatttcccatcaggaaagaagaaggggagacccattggtagtgtgaataagcaaaagaaacagcagcagccaccgcctccaccccctcagcccccacagataccagaaggttctgcagatggagagccaaagccaaaaaaacagaggcaaaggagggagagaaggaagcctggggcccagccgaggaagcgaaaaaccaaacaagcagttcccattgtggaaccccaagaacctgagatcaaactaaaatatgccacccagccactggataaaactgatgccaagaacaagtctttttacccttacatccatgtagtaaataagtgtgaacttggagccgtttgtacaatcatcaatgctgaggaagaagaacagaccaaattagtgaggggcaggaagggtcagaggtcactgacccctccacctagcagcactgaaagcaaggcgctcccggcctcgtcctttatgctgcagggacctgttgtgacagagtcttcggttatggggcacctggtttgctgtctgtgtggcaagtgggccagttaccggaacatgggtgacctctttggacctttttatccccaagattatgcagccactctcccgaagaatccacctcctaagagggccacagaaatgcagagcaaagttaaggtacggcacaaaagtgcttctaatggctccaagacggacactgaggaggaggaagagcagcagcagcagcagaaggagcagagaagcctggccgcacaccccaggtttaagcggcgccaccgctcggaagactgtggtggaggccctcggtccctgtccagggggctcccttgtaaaaaagcagccactgagggcagcagtgaaaagactgttttggactcgaagccctccgtgcccaccacttcagaaggtggccctgagctggagttacaaatccctgaactacctcttgacagcaatgaattttgggtccatgagggttgtattctctgggccaatggaatctacctggtttgtggcaggctctatggcctgcaggaagcgctggaaatagccagagagatgaaatgttcccactgccaggaggcaggcgccaccttgggctgctacaacaaaggctgctccttccgataccattacccgtgtgccattgatgcagattgtttgctacatgaggagaacttctcggtgaggtgccctaagcacaagcctccccttccgtgccctctcccccccttgcagaacaagaccgcgaaaggcagcctcagcacagagcagtcggagcgggggtgaggggggcagtgtgctcgtgggaatggaaaggacagcaagcacaggtgagactgtggagatgagaaggtggtggacactcgtgatggaatggaaatcgtcctaccgtgcagccacaccctgccctgccccgccccgccccgcccgcgtgcctgcccatgccagcacttccttaagttctcacatcacactcaaaccagtgacaccacaggaaagaaagacccaagacgttggaatggctgtttccatggacacaatctccatagtgacaatgtggggggaggggggaggggtgggatgatggggaaagggtggggggaattaaaagggagggataaatatatatatataaatctatttttagtctggaaagactttgtttaaatgaaaggtgcgctatcccttttgattctgttttaaaattatctcgttaaagatctccaaatttgttccgatgacaagtgaaatttaaatgtgagattgaactgaacaaaccctcatctcatgaaggacggggtgtgtgtgtggcgttgatctttagcctgtctcacaccagttcagaaaacactagacccaggattgaaaaagcaaaccacagcagaaccatccttttgtcattaatttgtctcaaagtgggaaggttttgggggagggggaaatacagggatggtccatgttttcaagagtaggggaatgatgtttaaacacaaaaataaattttttttcatttccagaaacactatttatttatggttttttttttttaattttttctttttgggggtgaaattggcagatgcctgaggtcatagctgtgtcctgggtcactgtggctggtgaggacctcaaggaccccatcaagtgtacacagcagcagcaaaatcaagggatgaccctcctctggggccccctgtcctcagcacattccaggcagctgtgccctgacccacagggacccgtggggatgggaggaggtccaggcctgtgttgccagagctggcagtgtgagctgtaggcagggacggggagggactgtcgctgtgatcagagtgggttaagctgaccaggaacacccatttaacccctttttctttttgctttcatttttataaaggaaaagaggacctgtcagataggcagccccatgctacgtgattctttatgttgtgttgttttgttttgtaaattgtataatttttaaatatctgagttttaaaaaaagaaaaaagtacaaaaaaatcttgttatggccttaagaaggggttagtgcatctttcaggggtcactctgccatggggataaaatagctgtttcacaaacagttttatttaaaaaaacaaaaaacaaaaaaaatcaaaaaatcaaaaaaataataaacttcattttaaccttg

SEQ ID NO: 4235 - DNA, 3010 bp, Homo sapiens
  source 1..3010: mol_type = genomic DNA
cttcctcgctttctctgtctctctgtctctctctctctctctccctcgtccactcccccaaacatgtccaccggctccctcagcgatgtggaggaccttcaagaggtggagatgttggaatgtgacgggttgaaaatggattcgaacaaggaatttgtgacttccaacgagagcaccgaggagagctccaactgcgagaatgggtctccccagaagggccgcggcggcctgggcaagaggaggaaggcgcccaccaagaagagccccctgagcggggtcagccaggaggggaagcaggtccagcgcaacgccgccaacgcgcgagagcgggcccgcatgcgagtgctgagcaaggccttctccagactcaagaccaccctgccctgggtgccccccgacaccaagctctccaagctggacacgctcaggctggcgtccagctacatcgcccacttgaggcagatcctggctaacgacaaatacgagaacgggtacattcacccggtcaacctgacgtggccctttatggtggccgggaaacccgagagtgacctgaaagaagtggtgaccgcgagccgcttatgtggaaccaccgcgtcctgaccttggagtttggtacctggagcgagagcttctccgcccttccaccaaccccacaggccgcttcgcgggtggagccctctgcctggccatggaggaaggatcccgctaggctggtcccgactggagaagctgctctgccaggtgtgctctctgtcagcaatagtgacctcattaccaaggggtggcgaccacattaccaagcgcaattccccattctccaagggctgagaacttcggtgacttcatccacctgtctatttgcacatggaggacttttcaagatgtcaggatacccttccatcaccccaccaccgccaccccaacttgactttcaagaacacatttcaagctctggccagagtcccgttcctcaaattcatgtgttctctcctttctaccagagggatagagcccatgcctcaacctatccagagttcaaatcaaagagtccccagtgtgattcaattgattgcctttcacgtttcgcaaattttccaatctcccactcacgtttttacaaaacgaatgctctaaattctgaggattccaggcaggccatccatagagaaataactttttcttgctcattcccttacaaccccaatctatacatggatttttagaaagtcttcatggctatctatagttccctaccaataatttgaagcctttgctttaggcaggaggcatgtggctatgaatagggaacacgtagatttgaccctggttctgcatccaactagctgtttcttgaaagagcctggatcctcagttttcccatctctgcaagcagggataacggtaatgagaatgataataatcattatatgcagaccttcctctttcatcttacagaggcttagtgaggctcagatgagattatatctgtaaaatcccttggtaaaggaaaagctccgtgaaaatgtcagttacttttactaagtggcgggtagtgaattatctgtgcctagacccaaactgaaagtgtctcaggcaggaagttccaagggatgtatgtttatagcatccaggcaatgatctttttttttccacgaactaaaatacctctttttggtatctattgactctttctctctctctttctgtctctctttcaccttgcacctctccctaatgctctctaaatttgtccagagctttctttttcctagaaatccagagagcaaagtcagagcctggcacctgcagataggataacactggtgtctgatggtgaggctgcccagtcccatcaggagcctcagccaaggaggggcctgggcacactcaggtccccatggttgtccattgaatggagtgaggatcaaggtgggaatgactgggtggtggctgccactagcccaggaacatgacaacgtgaccacaccacacatgcctccaacacacacccacagtctaaacatctctccttctcagtgagcccttctcccattccagatcatcagcacacccacacccaccataggtctctctcctccggtcttcccagaagggtaaaactcccagcctaccctgctccagcttcagcccaggtagttggtgtgtctcaatatgaatagggggtgagtagcttcatagaaagaatggggaactcccttggcctcaagccagtatagtttggaagttgggggtcggggatgttaagggtggggagtatcctgcctgtgacctctaggttatgaaaactatcttagaaggtgcttttagaaagaaccaggagaacaaccaaagcagcttacagacgcctgaacggagaatgaagtgtttcaagtaagcgagtctgcaagttctcagaagcagacagatatccaatctggactgcagccagggaagtcctctctctcgctctctctctctctctctctctctctcattgcttgtatgacttcacaagcaactcaggatcattctagcaggctttcccactgtcaaacagagacttcattctaaaaagagaagtgataaacagagctccagctctgctagctctatatatttactgattagtggaaagcactgaccaaggagacttttaagccagtggttcttcagaatcacctagatgcctccaccctccagagatcctgagtccaggagtctgaagtggggccccaggtgatgtcattgctgctggtcccaggaccacattttaacaatcaatgttttcaggtgtctcatgaggaacactacttaatgcagtgggaaagaaaatatttcagaggagaattttttcttaaagaagctgcatattctggactctaatttagtttaattcactccaggatggcacgcaggattcctaattcttaaatgccattcagtctggacttcaaatcacttgtcttcagaaaataaaagatttgttccacccgggtgtgtggacatg

SEQ ID NO: 4236 - DNA, 4551 bp, Homo sapiens
  source 1..4551: mol_type = genomic DNA
ccacgactctgggagtggggaaacagagagccggttcctctgctgcagaagtcctcggggttccttctcacaactctgcgaaggggaaagggttgtgagacccaaccagaccccaactccagctcccagcaggaggtggctgcgccacactcgggaggcctcttggtttcagggtctctctgtctctctctcaccctcttcctcgctttctctgtctctctgtctctctctctctctctccctcgtccactcccccaaacatgtccaccggctccctcagcgatgtggaggaccttcaagaggtggagatgttggaatgtgacgggttgaaaatggattcgaacaaggaatttgtgacttccaacgagagcaccgaggagagctccaactgcgagaatgggtctccccagaagggccgcggcggcctgggcaagaggaggaaggcgcccaccaagaagagccccctgagcggggtcagccaggaggggaagcaggtccagcgcaacgccgccaacgcgcgagagcgggcccgcatgcgagtgctgagcaaggccttctccagactcaagaccaccctgccctgggtgccccccgacaccaagctctccaagctggacacgctcaggctggcgtccagctacatcgcccacttgaggcagatcctggctaacgacaaatacgagaacgggtacattcacccggtcaacctgacgtggccctttatggtggccgggaaacccgagagtgacctgaaagaagtggtgaccgcgagccgcttatgtggaaccaccgcgtcctgaccttggaggtgcgagtctgggaaaggcgcgctcccggggggagcgggccccgggaaggcgacccctgccctcagtgctctctgtctctgcttccccctcgcaatgctcctctctctgtcccaccccgcgagaacactttacaacgacgaggagattcgtttccaaaccagaggagatcaattgtacttacaaagattcccatctatttaactttattaacttctaccgtgaatgactctgcaagccttgctggtccaagtgcaatatgtaattataaatatataaatagataagagcctatcaatgtatcttttgtacaatatgttgtaaaatgtagatcataggatagctgactttgacagtcacatttataaagtaattcacttaaagatatatatttttttcaaacaagttttgctacttttgaaaataaatctttctttatattgctaaaagctctgatatttggagtgatttttaaaaatatttggaataagaaagtgggaaactatggggaagcttgataatgaaaatggttcttttaaacctcaatctaaacttctagagatagaagaaaattgcatatgagtttcataatgaagatgcagattatgttttatactgaaaccttaaaaaagaaatatatcggttacttttaaggctaatagaaattatataactgaaaacaaagaatgggcagtattaaagttatccacagttatacagttcaagagtaaaacgcaccagaaaaaggaaatccaattttcatggattccaccgtatgactgctgacacgggcgagaaagtaaactccaccttttgtcaccttccaggtgtgagcatagctgcaaactagtgaagaaataatagaagctatgaaagatgtaaattccataacccttagggtgtgtttcaggattttcaaagctctgcagcatacattatctacatttcttattaatagtccattaattaattctaacaataaacccgcatgcctgccttttggttgctgttagcgggtgcgtttagctcccgccacgacttccggcggactgggtttaatttaaacattttccaggctacggaacagctcctaagggaagattaagttgagataaacagagaagcaaggccgaggagcctgcgacccgggtccctcactgccccagcgcagcccgcggcggccgatgcgccagatgccaccggggctgtttaatgttcggggttatgaccgcagtgtttacaagacgtcttcggttatttatactgttattcctcgcagagagccttgaaacttccgcttcatttgctctttcttttcgattttttacccttttttctcggcttagtttggtacctggagcgagagcttctccgcccttccaccaaccccacaggccgcttcgcgggtggagccctctgcctggccatggaggaaggatcccgctaggctggtcccgactggagaagctgctctgccaggtgtgctctctgtcagcaatagtgacctcattaccaaggggtggcgaccacattaccaagcgcaattccccattctccaagggctgagaacttcggtgacttcatccacctgtctatttgcacatggaggacttttcaagatgtcaggatacccttccatcaccccaccaccgccaccccaacttgactttcaagaacacatttcaagctctggccagagtcccgttcctcaaattcatgtgttctctcctttctaccagagggatagagcccatgcctcaacctatccagagttcaaatcaaagagtccccagtgtgattcaattgattgcctttcacgtttcgcaaattttccaatctcccactcacgtttttacaaaacgaatgctctaaattctgaggattccaggcaggccatccatagagaaataactttttcttgctcattcccttacaaccccaatctatacatggatttttagaaagtcttcatggctatctatagttccctaccaataatttgaagcctttgctttaggcaggaggcatgtggctatgaatagggaacacgtagatttgaccctggttctgcatccaactagctgtttcttgaaagagcctggatcctcagttttcccatctctgcaagcagggataacggtaatgagaatgataataatcattatatgcagaccttcctctttcatcttacagaggcttagtgaggctcagatgagattatatctgtaaaatcccttggtaaaggaaaagctccgtgaaaatgtcagttacttttactaagtggcgggtagtgaattatctgtgcctagacccaaactgaaagtgtctcaggcaggaagttccaagggatgtatgtttatagcatccaggcaatgatctttttttttccacgaactaaaatacctctttttggtatctattgactctttctctctctctttctgtctctctttcaccttgcacctctccctaatgctctctaaatttgtccagagctttctttttcctagaaatccagagagcaaagtcagagcctggcacctgcagataggataacactggtgtctgatggtgaggctgcccagtcccatcaggagcctcagccaaggaggggcctgggcacactcaggtccccatggttgtccattgaatggagtgaggatcaaggtgggaatgactgggtggtggctgccactagcccaggaacatgacaacgtgaccacaccacacatgcctccaacacacacccacagtctaaacatctctccttctcagtgagcccttctcccattccagatcatcagcacacccacacccaccataggtctctctcctccggtcttcccagaagggtaaaactcccagcctaccctgctccagcttcagcccaggtagttggtgtgtctcaatatgaatagggggtgagtagcttcatagaaagaatggggaactcccttggcctcaagccagtatagtttggaagttgggggtcggggatgttaagggtggggagtatcctgcctgtgacctctaggttatgaaaactatcttagaaggtgcttttagaaagaaccaggagaacaaccaaagcagcttacagacgcctgaacggagaatgaagtgtttcaagtaagcgagtctgcaagttctcagaagcagacagatatccaatctggactgcagccagggaagtcctctctctcgctctctctctctctctctctctctctcattgcttgtatgacttcacaagcaactcaggatcattctagcaggctttcccactgtcaaacagagacttcattctaaaaagagaagtgataaacagagctccagctctgctagctctatatatttactgattagtggaaagcactgaccaaggagacttttaagccagtggttcttcagaatcacctagatgcctccaccctccagagatcctgagtccaggagtctgaagtggggccccaggtgatgtcattgctgctggtcccaggaccacattttaacaatcaatgttttcaggtgtctcatgaggaacactacttaatgcagtgggaaagaaaatatttcagaggagaattttttcttaaagaagctgcatattctggactctaatttagtttaattcactccaggatggcacgcaggattcctaattcttaaatgccattcagtctggacttcaaatcacttgtcttcagaaaataaaagatttgttccacccgggtgtgtggacatg

SEQ ID NO: 4237 - DNA, 4445 bp, Homo sapiens
  source 1..4445: mol_type = genomic DNA
gcgccgcgtgcccggccgcgcccagcagggtttccaggcctgaggtgcccgccctggccccaggagaatgaaccagccgcagaggatggcgcctgtgggcacagacaaggagctcagtgacctcctggacttcagcatgatgttcccgctgcctgtcaccaacgggaagggccggcccgcctccctggccggggcgcagttcggaggttcaggtcttgaggaccggcccagctcaggctcctggggcagcggcgaccagagcagctcctcctttgaccccagccggaccttcagcgagggcacccacttcactgagtcgcacagcagcctctcttcatccacattcctgggaccgggactcggaggcaagagcggtgagcggggcgcctatgcctccttcgggagagacgcaggcgtgggcggcctgactcaggctggcttcctgtcaggcgagctggccctcaacagccccgggcccctgtccccttcgggcatgaaggggacctcccagtactacccctcctactccggcagctcccggcggagagcggcagacggcagcctagacacgcagcccaagaaggtccggaaggtcccgccgggtcttccatcctcggtgtacccacccagctcaggtgaggactacggcagggatgccaccgcctacccgtccgccaagacccccagcagcacctatcccgcccccttctacgtggcagatggcagcctgcacccctcagccgagctctggagtcccccgggccaggcgggcttcgggcccatgctgggtgggggctcatccccgctgcccctcccgcccggtagcggcccggtgggcagcagtggaagcagcagcacgtttggtggcctgcaccagcacgagcgtatgggctaccagctgcatggagcagaggtgaacggtgggctcccatctgcatcctccttctcctcagcccccggagccacgtacggcggcgtctccagccacacgccgcctgtcagcggggccgacagcctcctgggctcccgagggaccacagctggcagctccggggatgccctcggcaaagcactggcctcgatctactccccggatcactcaagcaataacttctcgtccagcccttctacccccgtgggctccccccagggcctggcaggaacgtcacagtggcctcgagcaggagcccccggtgccttatcgcccagctacgacgggggtctccacggcctgcagagtaagatagaagaccacctggacgaggccatccacgtgctccgcagccacgccgtgggcacagccggcgacatgcacacgctgctgcctggccacggggcgctggcctcaggtttcaccggccccatgtcactgggcgggcggcacgcaggcctggttggaggcagccaccccgaggacggcctcgcaggcagcaccagcctcatgcacaaccacgcggccctccccagccagccaggcaccctccctgacctgtctcggcctcccgactcctacagtgggctagggcgagcaggtgccacggcggccgccagcgagatcaagcgggaggagaaggaggacgaggagaacacgtcagcggctgaccactcggaggaggagaagaaggagctgaaggccccccgggcccggaccagcccagacgaggacgaggacgaccttctccccccagagcagaaggccgagcgggagaaggagcgccgggtggccaataacgcccgggagcggctgcgggtccgtgacatcaacgaggcctttaaggagctggggcgcatgtgccaactgcacctcaacagcgagaagccccagaccaaactgctcatcctgcaccaggctgtctcggtcatcctgaacttggagcagcaagtgcgagagcggaacctgaatcccaaagcagcctgtttgaaacggcgagaagaggaaaaggtgtcaggtgtggttggagacccccagatggtgctttcagctccccacccaggcctgagcgaagcccacaaccccgccgggcacatgtgaaaggtatgcctccgtgggacgagccacccgctttcagccctgtgctctggccccagaacggccactcgagaccccgggcttcatccacatccacacctcacacacctgttgtcagcatcgagccaacaccaacctgacaaggttcggagtgatgggggcggccaaggtgacactgggtccaggagctccctggggccctggcctaccactcactggcctcgctccccctgtccccgaatctcagccaccgtgtcactctgtgacctgtcccatggatcctgaaactgcatcttggccctgttgcctgggctgacaggagcattttttttttttccagtaaacaaaacctgaaagcaagcaacaaaacatacactttgtcagagaagaaaaaaatgccttaactataaaaagcggagaaatggaaacatatcactcaagggggatgctgtggaaacctggcttattcttctaaagccaccagcaaattgtgcctaagcgaaatattttttttaaggaaaataaaaacattagttacaagattttttttttcttaatgtagatgaaaattagcaaggatgctgcctttggtctctggtttttttaagctttttttgcatatgttttgtaagcaacaaatttttttgtataaaagtcccgtgtctctcgctatttctgctgctgttcctagactgagcattgcatttcttgatcaaccagatgattaaacgttgtattaaaaagaccccgtgtaaacctgagcccccccgtccccccccccccccggaagccactgcacacagacagaacggggacaggcggcgggtcttttgtttttttgatgttgggggttctcttggttttgtcatgtggaaagtgatgcgtgggcgttccctgatgaaggcaccttggggcttccctgccgcatcctctcccctcaggaaggggactgacctgggcttgggggaagggacgtcagcaaggtggctctgaccctcccaggtgactctgccaagcagctgtggcccccagggctaccctacacaacgccctccccaggcccccctaagctgctctcccttggaacctgcacagctctctgaaatggggcattttgttgggaccagtgacccctggcatggggaccacaccctggagcccggtgctggggacctcctggacaccctgtccttcactcctttgccccagggacccaggctcatgctctgaactctggctgagaggatgctgctcaggagccagcacaggacaccccccaccccaccccaccatgtccccattacaccagagggccatcgtgacgtagacaggatgccaggggcctggccagcctcccccaatgctggggagcatccctgggcctggggccacacctgctgccctccctctgtgtggtccaagggcaagagtggctggagccgggggactgtgctggtctgagccccacgaaggccttgggctgtgcgtccgaccctgctgcagaaccagcagggtgtcccctcgggcccatctgtgtcccatgtcccagcacccaggcctctctccaggtctccttttctggtcttttgccatgagggtaaccagctcttcccagctggctggggactgtcttgggtttaaaactgcaagtctcctaccctgggatcccatccagttccacacgaactagggcagtggtcactgtggcacccaggtgtgggcctggctagctgggggccttcatgtgcccttcatgcccctccctgcattgaggccttgtggacccctgggctggctgtgttcatccccgctgcaggtcgggcgtctccccccgtgccactcctgagactcccaccgttacccccaggagatcctggactgcctgactcccctccccagactggcttgggagcctgggccccatggtagatgcaagggaaacctcaaggccagctcaatgcctggtatctgcccccagtccaggccaggcggaggggaggggctgtccggctgcctctcccttctcggtggcttcccctacgccctgggagtttgatctcttaagggaacttgcctctccctcttgttttgctcctggccctgcccctaggtctgggtgggcagtggccccatagcctctggaactgtgcgttctgcatagaattcaaacgagattcacccagcgcgaggaggaagaaacagcagttcctgggaaccacaattatggggggtggggggtgtgatctgagtgcctcaagatggttttcaaaaaaatttttttaaagaaaataattgtatacgtgtcaacacagctggctggatgattgggactttaaaacgaccctctttcaggtggattcagagacctgtcctgtatataacagcactgtagcaataaacgtgacattttataacg

SEQ ID NO: 4238 - DNA, 4436 bp, Homo sapiens
  source 1..4436: mol_type = genomic DNA
gcgccgcgtgcccggccgcgcccagcagggtttccaggcctgaggtgcccgccctggccccaggagaatgaaccagccgcagaggatggcgcctgtgggcacagacaaggagctcagtgacctcctggacttcagcatgatgttcccgctgcctgtcaccaacgggaagggccggcccgcctccctggccggggcgcagttcggaggttcaggtcttgaggaccggcccagctcaggctcctggggcagcggcgaccagagcagctcctcctttgaccccagccggaccttcagcgagggcacccacttcactgagtcgcacagcagcctctcttcatccacattcctgggaccgggactcggaggcaagagcggtgagcggggcgcctatgcctccttcgggagagacgcaggcgtgggcggcctgactcaggctggcttcctgtcaggcgagctggccctcaacagccccgggcccctgtccccttcgggcatgaaggggacctcccagtactacccctcctactccggcagctcccggcggagagcggcagacggcagcctagacacgcagcccaagaaggtccggaaggtcccgccgggtcttccatcctcggtgtacccacccagctcaggtgaggactacggcagggatgccaccgcctacccgtccgccaagacccccagcagcacctatcccgcccccttctacgtggcagatggcagcctgcacccctcagccgagctctggagtcccccgggccaggcgggcttcgggcccatgctgggtgggggctcatccccgctgcccctcccgcccggtagcggcccggtgggcagcagtggaagcagcagcacgtttggtggcctgcaccagcacgagcgtatgggctaccagctgcatggagcagaggtgaacggtgggctcccatctgcatcctccttctcctcagcccccggagccacgtacggcggcgtctccagccacacgccgcctgtcagcggggccgacagcctcctgggctcccgagggaccacagctggcagctccggggatgccctcggcaaagcactggcctcgatctactccccggatcactcaagcaataacttctcgtccagcccttctacccccgtgggctccccccagggcctggcaggaacgtcacagtggcctcgagcaggagcccccggtgccttatcgcccagctacgacgggggtctccacggcctgcagagtaagatagaagaccacctggacgaggccatccacgtgctccgcagccacgccgtgggcacagccggcgacatgcacacgctgctgcctggccacggggcgctggcctcaggtttcaccggccccatgtcactgggcgggcggcacgcaggcctggttggaggcagccaccccgaggacggcctcgcaggcagcaccagcctcatgcacaaccacgcggccctccccagccagccaggcaccctccctgacctgtctcggcctcccgactcctacagtgggctagggcgagcaggtgccacggcggccgccagcgagatcaagcgggaggagaaggaggacgaggagaacacgtcagcggctgaccactcggaggaggagaagaaggagctgaaggccccccgggcccggaccagcagtacggacgaggtgctgtccctggaggagaaagacctgagggaccgggagaggcgcatggccaataacgcgcgggagcgggtgcgcgtgcgggatattaacgaggccttccgggagctggggcgcatgtgccagatgcacctcaagtcggacaaagcgcagaccaagctgctcatcctgcagcaggccgtgcaggtcatcctggggctggagcagcaggtgcgagagcggaacctgaatcccaaagcagcctgtttgaaacggcgagaagaggaaaaggtgtcaggtgtggttggagacccccagatggtgctttcagctccccacccaggcctgagcgaagcccacaaccccgccgggcacatgtgaaaggtatgcctccgtgggacgagccacccgctttcagccctgtgctctggccccagaacggccactcgagaccccgggcttcatccacatccacacctcacacacctgttgtcagcatcgagccaacaccaacctgacaaggttcggagtgatgggggcggccaaggtgacactgggtccaggagctccctggggccctggcctaccactcactggcctcgctccccctgtccccgaatctcagccaccgtgtcactctgtgacctgtcccatggatcctgaaactgcatcttggccctgttgcctgggctgacaggagcattttttttttttccagtaaacaaaacctgaaagcaagcaacaaaacatacactttgtcagagaagaaaaaaatgccttaactataaaaagcggagaaatggaaacatatcactcaagggggatgctgtggaaacctggcttattcttctaaagccaccagcaaattgtgcctaagcgaaatattttttttaaggaaaataaaaacattagttacaagattttttttttcttaatgtagatgaaaattagcaaggatgctgcctttggtctctggtttttttaagctttttttgcatatgttttgtaagcaacaaatttttttgtataaaagtcccgtgtctctcgctatttctgctgctgttcctagactgagcattgcatttcttgatcaaccagatgattaaacgttgtattaaaaagaccccgtgtaaacctgagcccccccgtccccccccccccccggaagccactgcacacagacagaacggggacaggcggcgggtcttttgtttttttgatgttgggggttctcttggttttgtcatgtggaaagtgatgcgtgggcgttccctgatgaaggcaccttggggcttccctgccgcatcctctcccctcaggaaggggactgacctgggcttgggggaagggacgtcagcaaggtggctctgaccctcccaggtgactctgccaagcagctgtggcccccagggctaccctacacaacgccctccccaggcccccctaagctgctctcccttggaacctgcacagctctctgaaatggggcattttgttgggaccagtgacccctggcatggggaccacaccctggagcccggtgctggggacctcctggacaccctgtccttcactcctttgccccagggacccaggctcatgctctgaactctggctgagaggatgctgctcaggagccagcacaggacaccccccaccccaccccaccatgtccccattacaccagagggccatcgtgacgtagacaggatgccaggggcctggccagcctcccccaatgctggggagcatccctgggcctggggccacacctgctgccctccctctgtgtggtccaagggcaagagtggctggagccgggggactgtgctggtctgagccccacgaaggccttgggctgtgcgtccgaccctgctgcagaaccagcagggtgtcccctcgggcccatctgtgtcccatgtcccagcacccaggcctctctccaggtctccttttctggtcttttgccatgagggtaaccagctcttcccagctggctggggactgtcttgggtttaaaactgcaagtctcctaccctgggatcccatccagttccacacgaactagggcagtggtcactgtggcacccaggtgtgggcctggctagctgggggccttcatgtgcccttcatgcccctccctgcattgaggccttgtggacccctgggctggctgtgttcatccccgctgcaggtcgggcgtctccccccgtgccactcctgagactcccaccgttacccccaggagatcctggactgcctgactcccctccccagactggcttgggagcctgggccccatggtagatgcaagggaaacctcaaggccagctcaatgcctggtatctgcccccagtccaggccaggcggaggggaggggctgtccggctgcctctcccttctcggtggcttcccctacgccctgggagtttgatctcttaagggaacttgcctctccctcttgttttgctcctggccctgcccctaggtctgggtgggcagtggccccatagcctctggaactgtgcgttctgcatagaattcaaacgagattcacccagcgcgaggaggaagaaacagcagttcctgggaaccacaattatggggggtggggggtgtgatctgagtgcctcaagatggttttcaaaaaaatttttttaaagaaaataattgtatacgtgtcaacacagctggctggatgattgggactttaaaacgaccctctttcaggtggattcagagacctgtcctgtatataacagcactgtagcaataaacgtgacattttataacg

SEQ ID NO: 4239 - DNA, 2463 bp, Homo sapiens
  source 1..2463: mol_type = genomic DNA
ctgaggtgcccgccctggccccaggagaatgaaccagccgcagaggatggcgcctgtgggcacagacaaggagctcagtgacctcctggacttcagcatgatgttcccgctgcctgtcaccaacgggaagggccggcccgcctccctggccggggcgcagttcggaggttcaggcaagagcggtgagcggggcgcctatgcctccttcgggagagacgcaggcgtgggcggcctgactcaggctggcttcctgtcaggcgagctggccctcaacagccccgggcccctgtccccttcgggcatgaaggggacctcccagtactacccctcctactccggcagctcccggcggagagcggcagacggcagcctagacacgcagcccaagaaggtccggaaggtcccgccgggtcttccatcctcggtgtacccacccagctcaggtgaggactacggcagggatgccaccgcctacccgtccgccaagacccccagcagcacctatcccgcccccttctacgtggcagatggcagcctgcacccctcagccgagctctggagtcccccgggccaggcgggcttcgggcccatgctgggtgggggctcatccccgctgcccctcccgcccggtagcggcccggtgggcagcagtggaagcagcagcacgtttggtggcctgcaccagcacgagcgtatgggctaccagctgcatggagcagaggtgaacggtgggctcccatctgcatcctccttctcctcagcccccggagccacgtacggcggcgtctccagccacacgccgcctgtcagcggggccgacagcctcctgggctcccgagggaccacagctggcagctccggggatgccctcggcaaagcactggcctcgatctactccccggatcactcaagcaataacttctcgtccagcccttctacccccgtgggctccccccagggcctggcaggaacgtcacagtggcctcgagcaggagcccccggtgccttatcgcccagctacgacgggggtctccacggcctgcagagtaagatagaagaccacctggacgaggccatccacgtgctccgcagccacgccgtgggcacagccggcgacatgcacacgctgctgcctggccacggggcgctggcctcaggtttcaccggccccatgtcactgggcgggcggcacgcaggcctggttggaggcagccaccccgaggacggcctcgcaggcagcaccagcctcatgcacaaccacgcggccctccccagccagccaggcaccctccctgacctgtctcggcctcccgactcctacagtgggctagggcgagcaggtgccacggcggccgccagcgagatcaagcgggaggagaaggaggacgaggagaacacgtcagcggctgaccactcggaggaggagaagaaggagctgaaggccccccgggcccggaccaggtgccaacccacccctcggcactccccaccctcaccccatcaggacgcacatgtgcacaggccacacgcacaccgcacccacactgggaggccgtcggcgggccccacgctcttcccccaacctcactgtctccctctggccccctcccggcgccctccccatagcccagacgaggacgaggacgaccttctccccccagagcagaaggccgagcgggagaaggagcgccgggtggccaataacgcccgggagcggctgcgggtccgtgacatcaacgaggcctttaaggagctggggcgcatgtgccaactgcacctcaacagcgagaagccccagaccaaactgctcatcctgcaccaggctgtctcggtcatcctgaacttggagcagcaagtgcgagagcggaacctgaatcccaaagcagcctgtttgaaacggcgagaagaggaaaaggtgtcaggtgtggttggagacccccagatggtgctttcagctccccacccaggcctgagcgaagcccacaaccccgccgggcacatgtgaaaggtatgcctccgtgggacgagccacccgctttcagccctgtgctctggccccagaacggccactcgagaccccgggcttcatccacatccacacctcacacacctgttgtcagcatcgagccaacaccaacctgacaaggttcggagtgatgggggcggccaaggtgacactgggtccaggagctccctggggccctggcctaccactcactggcctcgctccccctgtccccgaatctcagccaccgtgtcactctgtgacctgtcccatggatcctgaaactgcatcttggccctgttgcctgggctgacaggagcattttttttttttccagtaaacaaaacctgaaagcaagcaacaaaacatacactttgtcagagaagaaaaaaatgccttaactataaaaagcggagaaatggaaacatatcactcaagggggatgctgtggaaacctg

SEQ ID NO: 4240 - DNA, 4074 bp, Homo sapiens
  source 1..4074: mol_type = genomic DNA
ggtttccaggcctgaggtgcccgccctggccccaggagaatgaaccagccgcagaggatggcgcctgtgggcacagacaaggagctcagtgacctcctggacttcagcatgatgttcccgctgcctgtcaccaacgggaagggccggcccgcctccctggccggggcgcagttcggaggttcaggtcttgaggaccggcccagctcaggctcctggggcagcggcgaccagagcagctcctcctttgaccccagccggaccttcagcgagggcacccacttcactgagtcgcacagcagcctctcttcatccacattcctgggaccgggactcggaggcaagagcggtgagcggggcgcctatgcctccttcgggagagacgcaggcgtgggcggcctgactcaggctggcttcctgtcaggcgagctggccctcaacagccccgggcccctgtccccttcgggcatgaaggggacctcccagtactacccctcctactccggcagctcccggcggagagcggcagacggcagcctagacacgcagcccaagaaggtccggaaggtcccgccgggtcttccatcctcggtgtacccacccagctcaggtgaggactacggcagggatgccaccgcctacccgtccgccaagacccccagcagcacctatcccgcccccttctacgtggcagatggcagcctgcacccctcagccgagctctggagtcccccgggccaggcgggcttcgggcccatgctgggtgggggctcatccccgctgcccctcccgcccggtagcggcccggtgggcagcagtggaagcagcagcacgtttggtggcctgcaccagcacgagcgtatgggctaccagctgcatggagcagaggtgaacggtgggctcccatctgcatcctccttctcctcagcccccggagccacgtacggcggcgtctccagccacacgccgcctgtcagcggggccgacagcctcctgggctcccgagggaccacagctggcagctccggggatgccctcggcaaagcactggcctcgatctactccccggatcactcaagcaataacttctcgtccagcccttctacccccgtgggctccccccagggcctggcaggaacgtcacagtggcctcgagcaggagcccccggtgccttatcgcccagctacgacgggggtctccacggcctgcagagtaagatagaagaccacctggacgaggccatccacgtgctccgcagccacgccgtgggcacagccggcgacatgcacacgctgctgcctggccacggggcgctggcctcaggtttcaccggccccatgtcactgggcgggcggcacgcaggcctggttggaggcagccaccccgaggacggcctcgcaggcagcaccagcctcatgcacaaccacgcggccctccccagccagccaggcaccctccctgacctgtctcggcctcccgactcctacagtgggctagggcgagcaggtgccacggcggccgccagcgagatcaagcgggaggagaaggaggacgaggagaacacgtcagcggctgaccactcggaggaggagaagaaggagctgaaggccccccgggcccggaccagcagtacggacgaggtgctgtccctggaggagaaagacctgagggaccgggagaggcgcatggccaataacgcgcgggagcgggtgcgcgtgcgggatattaacgaggccttccgggagctggggcgcatgtgccagatgcacctcaagtcggacaaagcgcagaccaagctgctcatcctgcagcaggccgtgcaggtcatcctggggctggagcagcaggtgcgagagcggaacctgaatcccaaagcagcctgtttgaaacggcgagaagaggaaaaggtgtcaggtgtggttggagacccccagatggtgctttcagctccccacccaggcctgagcgaagcccacaaccccgccgggcacatgtgaaagtaaacaaaacctgaaagcaagcaacaaaacatacactttgtcagagaagaaaaaaatgccttaactataaaaagcggagaaatggaaacatatcactcaagggggatgctgtggaaacctggcttattcttctaaagccaccagcaaattgtgcctaagcgaaatattttttttaaggaaaataaaaacattagttacaagattttttttttcttaatgtagatgaaaattagcaaggatgctgcctttggtctctggtttttttaagctttttttgcatatgttttgtaagcaacaaatttttttgtataaaagtcccgtgtctctcgctatttctgctgctgttcctagactgagcattgcatttcttgatcaaccagatgattaaacgttgtattaaaaagaccccgtgtaaacctgagcccccccgtccccccccccccccggaagccactgcacacagacagaacggggacaggcggcgggtcttttgtttttttgatgttgggggttctcttggttttgtcatgtggaaagtgatgcgtgggcgttccctgatgaaggcaccttggggcttccctgccgcatcctctcccctcaggaaggggactgacctgggcttgggggaagggacgtcagcaaggtggctctgaccctcccaggtgactctgccaagcagctgtggcccccagggctaccctacacaacgccctccccaggcccccctaagctgctctcccttggaacctgcacagctctctgaaatggggcattttgttgggaccagtgacccctggcatggggaccacaccctggagcccggtgctggggacctcctggacaccctgtccttcactcctttgccccagggacccaggctcatgctctgaactctggctgagaggatgctgctcaggagccagcacaggacaccccccaccccaccccaccatgtccccattacaccagagggccatcgtgacgtagacaggatgccaggggcctggccagcctcccccaatgctggggagcatccctgggcctggggccacacctgctgccctccctctgtgtggtccaagggcaagagtggctggagccgggggactgtgctggtctgagccccacgaaggccttgggctgtgcgtccgaccctgctgcagaaccagcagggtgtcccctcgggcccatctgtgtcccatgtcccagcacccaggcctctctccaggtctccttttctggtcttttgccatgagggtaaccagctcttcccagctggctggggactgtcttgggtttaaaactgcaagtctcctaccctgggatcccatccagttccacacgaactagggcagtggtcactgtggcacccaggtgtgggcctggctagctgggggccttcatgtgcccttcatgcccctccctgcattgaggccttgtggacccctgggctggctgtgttcatccccgctgcaggtcgggcgtctccccccgtgccactcctgagactcccaccgttacccccaggagatcctggactgcctgactcccctccccagactggcttgggagcctgggccccatggtagatgcaagggaaacctcaaggccagctcaatgcctggtatctgcccccagtccaggccaggcggaggggaggggctgtccggctgcctctcccttctcggtggcttcccctacgccctgggagtttgatctcttaagggaacttgcctctccctcttgttttgctcctggccctgcccctaggtctgggtgggcagtggccccatagcctctggaactgtgcgttctgcatagaattcaaacgagattcacccagcgcgaggaggaagaaacagcagttcctgggaaccacaattatggggggtggggggtgtgatctgagtgcctcaagatggttttcaaaaaaatttttttaaagaaaataattgtatacgtgtcaacacagctggctggatgattgggactttaaaacgaccctctttcaggtggattcagagacctgtcctgtatataacagcactgtagcaataaacgtgacattttataacg

SEQ ID NO: 4241 - DNA, 1177 bp, Homo sapiens
  source 1..1177: mol_type = genomic DNA
cagatggcagcctgcacccctcagccgagctctggagtcccccgggccaggcgggcttcgggcccatgctgggtgggggctcatccccgctgcccctcccgcccggtagcggcccggtgggcagcagtggaagcagcagcacgtttggtggcctgcaccagcacgagcgtatgggctaccagctgcatggagcagaggtgaacggtgggctcccatctgcatcctccttctcctcagcccccggagccacgtacggcggcgtctccagccacacgccgcctgtcagcggggccgacagcctcctgggctcccgagggaccacagctggcagctccggggatgccctcggcaaagcactggcctcgatctactccccggatcactcaagcaataacttctcgtccagcccttctacccccgtgggctccccccagggcctggcaggaacgtcacagtggcctcgagcaggagcccccggtgccttatcgcccagctacgacgggggtctccacggcctggttggaggcagccaccccgaggacggcctcgcaggcagcaccagcctcatgcacaaccacgcggccctccccagccagccaggcaccctccctgacctgtctcggcctcccgactcctacagtgggctagggcgagcaggtgccacggcggccgccagcgagatcaagcgggaggagaaggaggacgaggagaacacgtcagcggctgaccactcggaggaggagaagaaggagctgaaggccccccgggcccggaccagcccagacgaggacgaggacgaccttctccccccagagcagaaggccgagcgggagaaggagcgccgggtggccaataacgcccgggagcggctgcgggtccgtgacatcaacgaggcctttaaggagctggggcgcatgtgccaactgcacctcaacagcgagaagccccagaccaaactgctcatcctgcaccaggctgtctcggtcatcctgaacttggagcagcaagtgcgagagcggaacctgaatcccaaagcagcctgtttgaaacggcgagaagaggaaaaggtgtcaggtgtggttggagacccccagatggtgctttcagctccccacccaggcctgagcgaagcccacaaccccgccgggcacatgtgaaaggtatgcctccgtgggac

SEQ ID NO: 4242 - DNA, 8332 bp, Homo sapiens
  source 1..8332: mol_type = genomic DNA
gtgtgtggatgtgtgagtgagagggaacgagagtaagagaaagaaagaagtgaggggatgtaaactcgaataaatttcaaagtgcctccgagggatgcaacgggcaaaaactgaactgttcaggcttcagattgtaactgacgatctgaggaaaaatgaggtgctcgatgaattttcgtttgtattttttggcgaggcgggggaggtgttgagattttttttttttcccctcggggtgggtgcgagggggatgcatcctagcctgcccgacccggagcaagtcgcgtctccccgccggagcccccccacccatttctttgctgaacttgcaattccgtgcgcctcggcgtgtttccccctccccccttccctccgtcccctcccctccccggagaagagagttggtgttaagagtcagggatcttggctgtgtgtctgcggatctgtagtggcggcggcggcggcggcggcggggaggcagcaggcgcgggagcgggcgcaggagcaggcggcggcggtggcggcggcggttagacatgaacgccgcctcggcgccggcggtgcacggagagccccttctcgcgcgcgggcggtttgtgtgattttgctaaaatgcatcaccaacagcgaatggctgccttagggacggacaaagagctgagtgatttactggatttcagtgcgatgttttcacctcctgtgagcagtgggaaaaatggaccaacttctttggcaagtggacattttactggctcaaatgtagaagacagaagtagctcagggtcctgggggaatggaggacatccaagcccgtccaggaactatggagatgggactccctatgaccacatgaccagcagggaccttgggtcacatgacaatctctctccaccttttgtcaattccagaatacaaagtaaaacagaaaggggctcatactcatcttatgggagagaatcaaacttacagggttgccaccagcagagtctccttggaggtgacatggatatgggcaacccaggaaccctttcgcccaccaaacctggttcccagtactatcagtattctagcaataatccccgaaggaggcctcttcacagtagtgccatggaggtacagacaaagaaagttcgaaaagttcctccaggtttgccatcttcagtctatgctccatcagcaagcactgccgactacaatagggactcgccaggctatccttcctccaaaccagcaaccagcactttccctagctccttcttcatgcaagatggccatcacagcagtgacccttggagctcctccagtgggatgaatcagcctggctatgcaggaatgttgggcaactcttctcatattccacagtccagcagctactgtagcctgcatccacatgaacgtttgagctatccatcacactcctcagcagacatcaattccagtcttcctccgatgtccactttccatcgtagtggtacaaaccattacagcacctcttcctgtacgcctcctgccaacgggacagacagtataatggcaaatagaggaagcggggcagccggcagctcccagactggagatgctctggggaaagcacttgcttcgatctattctccagatcacactaacaacagcttttcatcaaacccttcaactcctgttggctctcctccatctctctcagcaggcacagctgtttggtctagaaatggaggacaggcctcatcgtctcctaattatgaaggacccttacactctttgcaaagccgaattgaagatcgtttagaaagactggatgatgctattcatgttctccggaaccatgcagtgggcccatccacagctatgcctggtggtcatggggacatgcatggaatcattggaccttctcataatggagccatgggtggtctgggctcagggtatggaaccggccttctttcagccaacagacattcactcatggtggggacccatcgtgaagatggcgtggccctgagaggcagccattctcttctgccaaaccaggttccggttccacagcttcctgtccagtctgcgacttcccctgacctgaacccaccccaggacccttacagaggcatgccaccaggactacaggggcagagtgtctcctctggcagctctgagatcaaatccgatgacgagggtgatgagaacctgcaagacacgaaatcttcggaggacaagaaattagatgacgacaagaaggatatcaaatcaattactaggtcaagatctagcaataatgacgatgaggacctgacaccagagcagaaggcagagcgtgagaaggagcggaggatggccaacaatgcccgagagcgtctgcgggtccgtgacatcaacgaggctttcaaagagctcggccgcatggtgcagctccacctcaagagtgacaagccccagaccaagctcctgatcctccaccaggcggtggccgtcatcctcagtctggagcagcaagtccgagaaaggaatctgaatccgaaagctgcgtgtctgaaaagaagggaggaagagaaggtgtcctcagagcctccccctctctccttggccggcccacaccctggaatgggagacgcatcgaatcacatgggacagatgtaaaagggtccaagttgccacattgcttcattaaaacaagagaccacttccttaacagctgtattatcttaaacccacataaacacttctccttaacccccatttttgtaatataagacaagtctgagtagttatgaatcgcagacgcaagaggtttcagcattcccaattatcaaaaaacagaaaaacaaaaaaaagaaagaaaaaagtgcaacttgagggacgactttctttaacatatcattcagaatgtgcaaagcagtatgtacaggctgagacacagcccagagactgaacggcaatctttccacactgtggaacaatgcatttgtgcctaaacttcttttggaaaaaaaaaatataattaatttgtaagtctgaaaaaaaaatatttaatttaaaaaaaattgtaaacttgcaataatgaaaaagtgtacttctgaagaaaactacatgaacgtttttgttggtattcaagtcagctagtgtttataattactggatattgaattaggggaagctcggctgccctagtaacaaaaccagcaaacgtcctgatgacaacgaagtgatgacattagccattccttagggtaggaggaacagatggatcttatagacctatgacaaatatatatataaatatatatataaatatatattaaaaatttagtgactatggtaagcttttgttcatttgtttcagacttttttctcctgtaaaaaaatagtactgattaacttttttaaaagaaagattttactgtaaatatggatttttttttttttggtcttatttctgtccctttccctggtttgttatcgtaacctgtagtgccaactctgcttccagaggggtagtgcaggatgaaatgctgaccctgatgttgcttctcattcataaataagtagaaagttgtttctccagtcttttgggaacacaggacttaaaagtcacatcatgtgtagatattacaagcagcattaccaagacatggcaaaaagagtttgtctgaattgtaatgttgcgtttgtgaacctattctgggattttcagaggtacaaggttagaatgctacaatgttaccactgtgccttccaatgtttatatcatcggaaacataacataatcaaagtggctgtgatttaacaaaatgattaaagtgttacctacctgtgtagccgaagtagtgtgcagtgaggcgtttctgaatacatggtcagatttttggaaaaaaacaaaaacaaaaaaaacaagtaaagttcaaaaaccgtcaaatgagaaaattgcaagtagtgtgacagagctgattgattttgttgctttcttgattttttttttcaaaatgggtttactaaaatgtagatgacttaactgcctcctccttcgtctgaaaaatgccaatattcaatcatcatgcagcattataacaagccttataagtcctaaagcattaagttgcacttttttgaggaggggtagtgcagtatttctctggccagtatgaatgaagtttatacttaccatatttgatagaaacatagatcaagctatggcacagcgactcatcagatagctagctttgacgtctgggcacaattgaaccaacttccatcgtgaatctttataatgattgactttggtgtatagtgcagtaaacaaatagtgctcctagttaagtatttgtcagcatccttttgtctctaacttgtttctatttttacagccacacaattcttggcatgtattaagaaaaaaaaaaatccctgttcaagtagtttttccacctatcagcactgagtaaatgccataaatccattgaaatggtctaaatgttccatctgttctcctgttttgccagttatatagtaatgaaatacatttgtaaattttatgcaacaaatggcaaacgtatcattattttgaaattgtgtatgtaaaagttatatttttacatgtagactcttgttattatgtgttttaatacattgtatcagtttttgtttttttttaaaaactgtggtttaaaaagaagtctcatttaaatgaaatagctacaagaatcagaattttatgttcatttctgaaaatgtaagaacaaataagatagttaccacgtggtcatcttttacaaacccataaacattttgattagctgtgtgtgtgttgaaaaactgtaaatatgttcagtagcgataaaactaaaataactttgatttgttgataagttcctaaaatgtggaggtggattaaaaccttaggagaatagcagaaatcaaacttcatgaaaagttattttggggctttcctgtgaaatgtatgaacaaagaggctcagagaaggacatggaagacaataatgtatactctctcctcctccctgaataatgaaaaccatgtgtatttgttccctccgtatgttaaagatttccttttagtggtacattctgcactcattttgtatagtctaccaaggcgggtatccctaggaacaatattatataggaagcaggtatactctgatcacattcaggataagtgtacagaagaaaatacggtgtttactctttagggaactggaaacactccctgcattgatgtacattttaagaatggcacttttgatacatgttatcataaaggtgcttaatagagctgaattaaagtttttcaaatctgtaaacaaagcaaaaaagtaaattgtagtcatttgattattttttaaattggtgctttatattttgttctcactcagagtaaaagctgcaatttattgttcaccagctttgatgtattcattactcagtaatgcaatacctctattgttgaattccctttggaaataagtgaaaattctaacggccactgaaagctgctcgctaggttttgcttggtggagaaacataatctgcacctatccatattaattgggttgtatccccattaaaaaagaaaaaaagggaatgtggcctttttagtgtgttttttattgttgttgttttgtaattatcaaacccaggtaagatattggtatcctgcactggattttcaaatgaagttcagcagaagacagttaagattaaagtactatacaaaaatttcaaaagggtccatactacgctatctgtatgacgacacttaggctggggatctctttcagaaactcggactttaaaagcaacttggagcagttgatccacctccacattcaagtaatttatgaatatgcagaatagggatctgttcatctagaaatttttaccatttgtcttctgtgtagctgcaaggaacactaatgtttatacaactgtcagtccacccagtggtgcaactggttctgattcagtcttccgattcctttttatttttcactttttcctatttctgaatttttttttttatttgtgatcttgattttgatgaggggttggggagtggggagggagtcgaaccaagacttggagttaagaggattttcatcttttgcatccaacaggcagaatatgatctgtgtccaaaagtgaacttgagtcaggaatgaatcaatttcagcataaacaagcacaaaaatttagtctgctggctgactggaagcaaaaaagtcaagatggaatatgatgaattccaacacaatggggcaccaaggcctttaggcctctctttttattttgctttggttttgtttgtttttctttagagacatgctctttctcatgggacttgaagtggactcatctttgtgcagtgctggttttgccatactcatttcaagtattatagacatatgtaatggtgaaaatatatgaactgtggcctttttcattcttgttacttgtgatgcaattaagtgaagataagaaaaaaaaaaaaaaagcagagatttaccatgtatcagtgcctggctttttgttataaagctttgtttgtctagtgctcttttgctataaaatagactgtagtacaccctagtaggaaaaaaaaaaaactaaatttaaaaataaaaaatatatttggcttatttttcgcaggagcaatccttttataccatgaatattacaaaaaaattgtcagattctgaatatttcttctttgtagatttttggaatcattatgagtaaaagtttgttactttattttactatttaaaagatgttattttaccatgtgttaccaagatgaaactgtatgggtagcttttttgtttgttttttgttttgtttttgtttttgtttttgtttttagttgtaggtcgcagcggggaaattttttgcgactgtacacatagctgcagcattaaaaacttaaaaaaattgttaaaaaaaaaaaaagggaaaacatttcaaaaaaaaaaaaaaagataaacagttacaccttgttttcaatgtgtggctgagtgcctcgattttttcatgtttttggtgtatttctgatttgtagaagtgtccaaacaggttgtgtgctggagttccttcaagacaaaaacaaacccagcttggtcaaggccattacctgtttcccatctgtagttattcgatgaagtcatgtacatgaccgttctgtagcaataaatgtgccatttttataaactgtttctgacacttgtttcatttcattttgcattgtccatatagctatgattctcttctgtaagtaaaacgcatctatatttcattttccaagtgttggaggtattgacagcttaacaaacaaaacatacaaaaaaaatcacaaaaacaaattgaaaagcaaagcacatgattgatcaaggaagagatgcccttaatgaaaatggaacgggatgcatgcaaaacaaaaagaaaactgtctagaggattaactaattgaaggaatataattaatgtgtgtgtaacactgaagctatgcatttgaagagctctgaactgcaccagtgttttcggttgtgctgcaggttgctaagtcaagtcagccttaaccttttgcaccagttggtcggctgtttggcagaacattctcagatcttttcagtcaaaaatctaagatgatttattttgtatcactttgttaaaagctgaatattgttaactacagttaatattaacactgtatttatactttctcaaactacatccgccccaccacttctggttgcctctgttgactattaatccagatgtaaacaaccagatgtttttttctaacttgtacaaactgacgtgtgtcaactatcatggaaggaaaaaaatgtacagattaaaattattcagtgttatgtactgtaagttaatatttttgtagaatggacatcaatctactttgcaaaatttggaggctatttcaacattgcactgtagaaatgtaaagtaatgtatgcaatgtaaaggaaagcccgcggtagctgagcgcttcataacagaatgttctaatcaagtacgtggtatttggggatgtctccaatattgctcttgtattctttctaattgggtttagtgactagttgaaggaaaatgttataacgccatttggttcacatgtgaagtgccctccatagccaaatgttgggatttttttttttttcgtttttggttggactgtttgcagatatttaaattttatgaaatttccaaagattttggttgataacccccttttaccttctaaatgatttgagatgttcttatgttcttactgtgtgttttaaatatatataaaagagccacaagcattt
